United States Patent Application Publication US 2024/0301345 A1 - sequence listing, part 6

SEQ ID NO: 767 - DNA, 8103 bp, Unknown
  R14_18m  MAG No. k141_1286
ccggccacatcggcgaacttggtggtgggggtctggccatcgagtagcttgccgctgttcttcttgccacccatgccgagcatgccgccggcaccacccatgcggctcatcaggaaccagaacagggcgaagaagatgatgaacggcaggatcgaggtgacgaggtagctcagcatgctggtctgctcgatattcgaggtccagcccttttcgagatcaccgttctccacggccttggccacctgtgcgccctgcgcgaaggtgtagtagaactgcacgttcttgccgtagttggtcaccttgccggtgtcggcgttcttcttggtgtagtcgttcttcagcttaaggcggacgacctgcttgttgtccgtgatctcggcgtacgtggccttgccctgattgatcagcgcgaaaccatctttggtgtcgatggttttggtgccaccgccggcgaacatctggaacatcagcacgaccatgaccacgagcacggcaccccatagccaaggggactgccatatcgggcggttctcgttgttgttgcctttgccattgttcccgttattgccacggttgaacgggttagtgaacgggttgccgttgttacggttgttgttcgggttcggattattgccgttacccggcccttgcgggaagctcatgcttgcactccttggtagacggacggcttgaggaccgcgatcgaatcgaggttgcggtagcgctcgtcaaagtcgaggccgaagccgacgacgaactcgtccggaatctcatagccggcgtacttcacatcaacgtccacttctcggcgggaaggcttgctcagcaaagcgaagacctccacggaagcggcaccacgacgtttcagttctgcgaccagccacgcgagcgtgcgtcctgaatcaacaatatcctccacaatcaaaatgtgccgtccgcgaacatcggcggacaaatcctgcctgactgtgacctcaccgctcgacactgtgcccgagccatagctcgaaaggctcatgaagtcgatctgtacaggaatgctcatggcctgggtgaacgcgaccagcgtattcacggcccctttcagcaccgcaacgagcagcggattcttatcgcggtaatcctcgctcgcgagagcggccatctcgtggatcttggcatcgatctgttctttgctgaccagctcgtggtcaatatcttcctcaacgtcagcgattcgcatgcgctccatcttggcacacgcgaatgacgtgtttcttgcgattggctgaataacctctgggaagtgagacgccgccttggccatgccaatcgacgaccagccggtcgatggcggcaatctgggcggcactggcgttcacaccggcctggctcagcgcgtgagcgatgacccgcaaccgaatcgcctctggctcacgtgcaatacgtttgacgccgatcatcaggccgatgccatggcccgaatcgttggtatcgtctgcagcacaggctcgtggcgtatcggtcgataccgctgccgacgatgccggccggtcaactgccgtaaccgcctcccccatcacctcgtcggatcgctgatccagatactccttgtccattctggccagctgtgcgctttcggcgaaatggcgggtgacattgaatccagcgaatcgttcgatggccggcagcaggtcgtggcgtacccgcgagcgcaacggatagtcgtccggcaactcgccgtctaccgcatcgccattggtggggtcatcccaatattccacacccaagtcttcacagaggccggtggtttcgtctcgagtaagggtcagcagcggccgcgcaaaagtcacgccactgcgtgtgaagacctgcggcatgccggccaacgcatccacgccacggctgcgcagcagtccgatcaatacggtttccgcctgatcgtccatagtgtgggccaacagcacggcaatggcacctgattcacgcgccgcggtgcacagctcgttgtaccgggcctgccgtgcggccgcttcgaggccctcaccgcgtgcctgcacggttgtgttgcgcacgatgaccgggcccagtcccaacgcacggcaacgatccgcggcctcgccggcgacctgttcggaaccctcctgcaagccgtgatccacaatcacgacaccgcaacgcacgcccatggacgtgcatacgatatggcttaccgcggccagcgccatcgaatcgcgcccgcctgaacaggccacgagcacgagtggtgcatcggaggcaacggcatggtccccatgctgcgcgaattcgggagcctgcacatcgcatagttccacggcgctcagcgttgttcggaccgcgcctacggccttgcgcaatcgtgcggaatatgccatgtactcaccacccttttctggttataggcactcgtgcgtttatggacgtttacggcctttgtagcccttgatggcccttgatgcctcttttacagccccgcgagcttggtgatgaacgagtcgatggcgctacgcgcggcggcataatcctcaggattgttgaccaccacggcaaacgacaacgctcccccattggtacgggacacattgccggccatcgacgtgaccgtgccgaggctgccggttttgacgcgcagcagaccggccacggcatcatccgtataccgatcctgcgccgtgcccaccaaccccgcgatggatagaccttccgcaccggccgcgccgctctcggtggtcagattacgttgttggacggccgccagcgtgcgtacggtgagccgggagccgggagacaggccggagcaatcggccatggtcagaccggatgtgtcgagaccgagatcgttcagagtggatttgaccgcttccgtgccgccttcaggactgtttgtcgctgatttcgccaaggcggtgagtctgccgaactcctcggccagcgtattgtccgaatgccgcaacgtgtatgccatgatttcggacagtgttgccgaactcaccgaggccaaaggcgtttcgccggatggagcggtgtttgccgtcacgtctccggtaacggccacaccgttcgattggagcagttcggcgaatttcgtggccacgtcgctggcggtgtgctgggacagttccgggtatccggccgaatcatcagggtcggccggcgcaggcgtatcggcggtgtgttggcgacctccatcaatcgccattgatgagaccggcgtgaagtagacggtgtagtcgcttaagaccgcgccgccttccgacagacctgcgggaatgcgtgagtcgccgaatagggtgtcgtcgtactcgagattgacggaagtgatgcctcgctgggcgagcgcggccacggtggccttggccaaggtgttcagaccggcacgtccgttggtatggttggcgtcggaatcgcctgcagacagcagcatgtcgccattgcctttgagggtcaacgtattggtgccgtcatcggattgggtcaggaacacttgggtatccaaggtggatgccatgttcagggtggatgaggcggcgagcgcggtcagcgttttcagtgtggatgcaggctcgcgtggagtgttcgactcatgttcggcagcgacggtgccttgggcgtcttcaatgatcaccgacgtatcgtttcccacgccttgcgtggacagcaattcgttgaccagtgcagaagcggccgtggaatcaatggccttgttcgcgttcagggcaccggcgatggtgccgcctgatttggcggtggccggattggcgaaaacaggtgcggtgacaggttttaacgtcaacaatccgggggccacgtcggtgatgtcggcggcgcagtaccccgcgaacagggcgatggtggtcagtgcggaaatgatgacggtcagtgttcggcgatgcgatcgttgggtccgccgttgcgcttcacgtcgctgacggcgtgataccgctgtagataccatcgtgctccttatgccaaggcaatcatttctgcaatgaggcgaacgagtcgagtgttgccacaatcgagagcattcgcgcatccatcagcttaccgcccagccatgtcccgagtgccagaatgccgatgccattggccagcgcgaccggaataatcgccagccacatgccgccttcggctcctgtcagcagcatgaccagcgccacgatgccagtgggcagcatgagcagcaggctgccaagcatgtagacgaacgggaagaagccttgggccatggcgcggccttgaggcgcggagaacggcttgtccattgaggcgaccgggtacatcagtacacaggaggtgacttcggccacgcccagtccgctcaaggcgatgcccatgcccgtggcgaggaagatcaggccggtagcgaggtcatcgggctgcgcccagcgtccggtcagtgcgccgaccagcacgatgccggcgagatagagcagcaccatgtagacgaccatgatgccgacgtagacgcgtacgcggccgattctgtcggtccggccacgcacgccggcgatgacttccatggtgaagccgcggccgtcatatgcgagcccgttgctttccacgacggacatgaaccagccgcaccagatcagcgactgccagacgaccgcgctgatgccgtgtgcctggaaggcgaagatgatcaggaacaggaccggcatggcgaaggtcatggcttggcgggggtctcgtttgagataggtgatcaggcgtgcggaaaccgcgccggatgccgaatcgggcatccatgcgaatgcgccgatgcctttggcggtctcggacggactgtttgcgccgatggtgagccgttcatgtctcagacaccaggtgcagacggcgaagcagacaatccatgtgacggcaaggatggcgatgcgggcgagcagcaccgcccaggctccggtaagcgcgtcgaacggtagttggaaggccgcgccgaacggcgtccatgcgacgatggtggtcgccgcgccccaggtttcggtgttgaggctgaaggccacgccggagttgaccagaatgttcggcaactgacagatgataacgaacgtcagcacgatgaagatatagaacgcgcctttgccgcgtttgctggtcaccagcgtggtggatagggcgatgagcagtttggagatgctcatcatggtgatgacggccagcactgcggcgaggagggaactgatgattacggctggtcccatatgccgataggccagtgtccagagcatcagtgaggccacgccggtaagggcggggatgccggacaggccggaaagcagcaagccgaattgcaggttgcggtcggcgatgccgtagagcgcgaatttgcgtgggttcatggtggagccttcgccaagcatcatgagctggatgaagccgatgaagatggtcatggtcgcgccgaccagcacgacgactatgttgacgatgcctccggaaccaaggatgttcagcggaaagccatccgcgttcacggtgaagggcggcagtatgccgatgaaccatgcgagcacgccggtgccgatgatggtgccggccgcgagtacggcggaaaagacataggcgacggtctgccacgccgattttcgcagggtggcgagcgtgagcgtccagcgcaggcggaccagggtgatggcgctgctgatcatcggcgggcctcatcggtgggtgtggcgggcgtggcggttgtaagcggaatgggctggaccggctggaccgaagttggtgcttgggcttgggcttgcccgccgtcgagccatgcgagatgggcggcttcgtggcggccgccgaccagttgcaggaagcggtcttcgagttcttcgccggcggcgacctcgtccaccgtgccggccgcgcacaccagaccgttgttgattacggccacatgcgtgcacatcttttcgaccaatgccatcacgtgcgaagagataatcaccgtgccgccggtcttcgcgtattcgatgaggatgtctttgaggttggcgctggacaccgggtccacggattcaaacggctcgtccaggaccagaatgcgcgggctatgaatcatcgcggaggccaggcagatcttcttggtcatgccggccgaataatcggtgaccatcgtgttggcggccccggccaagtcgaaagcattgagcaggtcctgggcgcgacgcgtggtctcatcgcggctcatgccgcgcagcatgccggagtagacgagcaattgcaaaccggtcagtcggtctaagatctggtcgggctggggcatgacgccgatcatgcgcttggccgtgttcacgtcgctccacacgtcatggcccaaaatcatggcggtgccggcgtccggtaccaatagaccggtcaccatattgagcgtggtggttttgccggcgccgttggggcctacaagtccatagaacgagccgaccggaatatcgagcgcgagtccgttgacggcgatcttccggtcgaagtgcttgaacaggccacgaatggacaccgccgcattcggattcggcggccatgcttgtggctgcggttgcgacggctgtgcaggcgcgggggcggcagccggcatcatcggcggctgaaatccgacattcctttgagtattgtctaagctcatacatccactctaccccaccagccaaccctcagcgaagcaaacccccgggttgctgttggattgccccgctgagcggctccaactagcggactcggtcaacccttatgcgcgatgggcttccactgggctttggagaagagggcctggaaggagatcggcacgtagctgagaatgtaaatcgggaagctgagcacataggcgagcagctccttgttcgtggcaccgatctggtcgcgctcgacaatgatggtcaatgcagccaatgccatcaggcccaacaccgatatgatgatgccactggaccaactggccagcgattgcagctggctcggccaactcacgaagccacacgcggcgaacagcaagcccattaccgcgcgaatcacgcccaacacggtaaacggacacagcatcaaggtgaagtcgatgcaggagaaatcacgttcgcgaaccgcgcgtttcagcaatgccgagccataataacggaatacctgcaggaatcccttgctccaacgcaaacgctgacgccaactttgcgagaaggtaaccggctgctcgtcgtagagaatcgcagtaccgcaatagccgatgcggtcgccatgcagaatcgaatccatagtgaattcaagatcttcagtgagcagatggaacttccatcccttgttccgcttcatcacctcgcgggagaacatgaatcccgtaccgcccacatggcaagaggaaccgagaatcatacgcgagttagacaggaatcgcgattcacggatgaaccacagcgcagaaccagaagacacccagttatccgccagattcaccgaattacggtagctggtcagaatcttgaatccggagcagaacgccttgttcatttcctcgaagtagtgcttgtccagcttgttatcggcatcgaacacgaagtaggcctcataatcatcggccacaccgatgtcgagcatatgccccaacagatacgtcagcgcatatcccttgccaaccagctcaagattgtggcgttccaccacatggcagcccaaagaccgcaccacgtcggcggtgttgtcggtgcagttgtcggccaccagccagatgtcgatgaggttggacgggtaggtctgatcgcgaatcgacccaataaggttgccgatcactttttcttcgttgcgcgcggagatcagcacggcataccggttggtcatcggggcgtcggggaagcgcacgggcttggcgaacagggacatcacgatgcacagtccctgatatatcatgccggcaccgccgacgatcatcagaagaatatcgagtacggaaagcagagtcatcagcgccaccctgccctaggattgctggaggcagattgatcagactgcttggtttgcttgcgttgctcgggctgctcaggctgttcggcggaccgctcaggctgctcgggctgctcagactgctgcgtatccgcggcaccacgctgcggaatcgccgccgtatccggctca

SEQ ID NO: 768 - DNA, 12671 bp, Unknown
  R14_18m  MAG No. k141_1406
ccggcccgaacccgcacgggcaccgggacctccccgcatacccatgagacccacgcccgggaccattcccggccagccccgacggcgaggccgaacggcgcggcgcgtccgcgaccgtgggagcccaacgcccggccccccggtccgccgcgcagacagctcccctccagaggggagccagaaactggcttggttatggggtcgctctacactggcttctgctatgcattacttcacccctaaacgttgcgccacgtcgaataaaatcatgtaccacgataaggcgcaggctcagcgtgccgctgatcaaagcctgatcgagcgtggagccgagctatgggtgtaccgttgcgaatattgcggatgctggcacctcacacatcgcgatccacaatccagttaccggcatgtaccgctgaaccagcaactcaagccacacagtcgtaaaaagggctacaagccacgtagacgttagcgtcagaagctccacaggcctcgccaacgccgtatctgaggcaggttacggtccaaacacgccaggtcgtaggctgctaagcgttcagggcgctcggacacactccgtccaacactcacatcaccttggtgctttcaaggttgcggataacccaatcgttgaagcgaattaccggcttgcgcaacataagtcccaacagcaatgagggaacaaggaacagtgccagtttgcccatggaaacccagtattccatgccgaatgagcccgccatggccgaatgcatcgcatccaccgcataggggaacagtagccatttagaaacgacctggaagaacgtcggcagtgtttcaatggggaatgtgccgccggaaccggctacctgcataaccagcagtaccacggcaatggctttgccgatatcaccgaacgatagggccagcgtatacacaatattcgagaacaccagtgcagacaaccacccgaccatcaaaaactgaatcggatgctcacactgcacgccgagatagaacatatcgcccaggcacaccagcgtaccttgcagcaaagcaaggaaaccgaaaatcatgtatcggccgaaatattcgtggtgcaagcgtaaaccgaactgccgcgcattgccggaagactcggcacgcggcttcttcagcacatccaacgcggcggccggtccggcaatccgcccggcaatcatggcctcgcgaagacccactcccgaaccgagcggcagatcattgcccaaccctaagatacgggccttctcatggtcggaaatcgatactttcaacatggcgaccagaatgatcgcaccgacccagatagacagaatcgtgtagaacggagccatcgcggaaccatagttggcaacgggatagagcgcgatgcggtcgaccgctacgggtgccgccagcatggaagcaatggcatcgggcttcgcagaggaaatcacagacaggtcgttggtgccgccactggtgatagaggcgagttgggaagacaagttgtcgagtttcttcgccgaacgggtcaaagcgctagctgcgtcagtcaaggccgactggatatccgtcaggctgtctgaaacgccgccagaaagacctgacacgctgctgacggtcgacgcaagcccgtcgattacggaacttgcctgcgtggccacttcgtccatggacgaggtcagattgttcagttgcggtttcagcgtgctcttgtacgtgtctgaagcctgagtaatcgattgtttggcggcggcgatttgtgatttcagatctcgacgcgctgtatcggcatcggcagtaccatttgctatgtgcgtggccgcatcgcccaacgcggtggcggcttgctgcatgctctgctgcgcctttgtggcttggtctgcagccgcgttcagttgagcggcaacggtatctccgcccacgggcagtgaagccgcttgtttggcgagatctcgtaaagcggcggcatactttccaaagctgtcggcctgagcctccactttggattgcatatcggtcagcttgtttgatatctgcgaggattgtgagcccacatcggcaaaagcggcatcgatctgcttggcaatggtgtcgtaggatgaaccggcctgctgcaatgccgtaccgacgccatcggtggctccggacaatgccttgtcgaggctggagacgccgttgcgggtctgtttcaacgcctttttggttgtggccgcagctgagcctgttgatcccagcagcttatcggtggaatcaatgatgctgttggcggccccgagcagattggcataggaatccatctgcgacgcagtgccggtcaaacgagacgacatggtggcaatatgactggaggcgttgttgacgtactgctccatttgcgggctttgcgcgtaatcggccacgttggaaaccaaatccagcgccacgctcgccaaggtcttcacaaatgtctggtcgatggtcgtggccacggtggtagcaccctggtcggtgatatgcggagcgatcggattgattttctcattgagatagtattcgagcttggcgtgcttgatcttcggtgaaaacagcgtcatcatatcggagctgaagctctttggaataatcagcgcggcatagtattcgcctgagttcacgccatcgatggccttagcacgatccacaaactgccagtcaaggtcatgattggccctgagcgtattggtcacggtttcgccgacgttgatggtgatcggcatcagatcggacttatagcccttatccacgtttgccacggcgaccttcaaggccttggtgttgccgtacgggtcccagctggcggcgatgttgtaccaggcgtacagtgccggcacaatcaccaatcccatagccacgattacggcgatcacattgcgggtggcttggcgcacgtcacgtacgaatattttccagataagcttcatcgtgcgcctccttgcccagactgaccggactgaccggactgctcgaactgtgcggtgtgcgcagtcggctcggcggcctgatcgccgaacagtgtgagtcgttcagtggtttcgccgatatccggattgctgcccatcgccgcttcgtgacgtccgtggccgtggaaacgccgccacacatatccgttgagcatcacattgcggaactcgtcggcactcatggcactgacgccaagctgcatggcgtaggtttcgcgtgcgtattcaaccacaatgagataggcgtcgataagaataatcgacagaatccaggaggtcagcatggcgattttctcttgggtgacgaacagcagtaccaggaatacgaacgggagtacggtcagcaatgtcagaccggcaacgatcatctttgggtaccgcgcgaagaaccggtgcgcgcgatgagcgatgatatcgcgcagttccttgctgtcggacaccgtgcggaatacggagttcaagctcacctgttcgttcaccatgctgttgtgctcggtgatcatcaggtcggtatctcccaaacgatggtcgaacagcgcgttcaggttcatcgcataccggcgtacgacaagtcccacgaaaagcgccgccggcagataccagaacaggtgcagcatgtcgagccagtaatggttcgcgtacaggccggcgatcgggccgcgcatcgcgttgatgccgtaggtaaagggcagccatgggtgcagttcgcggaagaagttcggcatcatttcaatcggatacaggccggaggcaccgggtatctgcacaatgaccagaattacggcgatggctttgccgatatggcggaacgccacggccagcgcgtaaataatgttgatgtagacgaacgaacagaagattccggccaagatgaacagcagcggatgctcgcattggatgccgagcaccagatcgccaatggtggcgatgatggcttgcaggaatccgatggtgaccagcagcagccagcggccaagatatgcttgcgtagcggtgatacggcgaatgcctttgcggtcgacctcaagcttgtagatggcaatcagcacgaaaccgcctacccacagtgccagattcgtgtagaacggggtgactgcggacccgtaattgtcggtggcgtacacgactttcgtggtcagggtgacgggattgcccatgaactcgccgaatcccttgtcatccagatgcagcgtatcccggattttctggtaagcggcggaactatcgagcgtggcgatatcggtgcgtacggtggcgacatcgctggccgcctggcgcagcgaatcctgcgtgctgctgatggtggttttcgtttggttcagggtatcgacaagctggtcgaacagcccgtcggcctgatccaaggtgccggacaacgaagtcaacgtgccatccagcgtgccgttcagggcggcgaaactgttcaatgatgaggtgagcgacggcattacggtgccggtcagcgagccgcgcgcggtattcagcgccgcgatgccgccggtggtggtgttggtcatggctccggaaaggttcgtggtggcgtctttgccggagctgatgaactgtgtggtgtcggtatggaaggtgttgagctgtgtctgctgtttgctgatcaatgagtcgagcgcatcgatttgtttccagatgttctggccgaccgggtcggtggtgtctttgccgatgccggctttggtcagcgcgtctttcagatcgctgattgacgtttgggtggcgttcagtggggccgaaagtgtgttggtgatggtgtcgacggagttctgcgcgctgttgaaggagccggtgatgctgccggcggcgttgttgacgtggatggccagtccggagagttgtgctgaactgctgtcgagcgcgccgaccagtgtggtggagaaggcttgtgacccggcctgtgtttccgccaacagtgtgccggactggcgggaggcattctgcgcggccgcgacggtctgcttgagtgaggcggtggtctgtttggcgtcggcgagaatcgtgtctgattgggccagcgtgtcctgtaagtcggtgagtgaatcctgaacggtgttcagcgtggacatcaccgtattgagatcatcgatcgtatcgtgctggactttgccagtggcttggccgagatcgtctccggtttcggaaatggccgaggcaacggtggtggctaccgtggtgacgaaggcggagttgatctgctcatcgatggtggtggcgccggtgtcggtgattttcggcgcgatcgcgttcttcttctcgttgacgtaatacttgattttcggctgtttggaggttccggtcaccgattcgaccaagctggcgctgaaatccttgggcagcacgatggctgcatagtatccgccggtctccacgccgtggacggcctgttcctcattgtctacgaagcgccagccgagttcgtcgttctgcttgagtttcttgacgacctgccggcccgcatcgagatggccgaccagatcgttggtggtgccttggtcttcattggctacggccacttgcagattgccggtggctgaatagggatcccagttggcgagaatgttgaaccatgcgtacagcgagggcagcattgctacgccgagcgtcaccacaacggcaacgggattgcgtaagatacgtctgcaatcgcgtagaaagacttgccaaaccgtccgcatccagtccctcttttccggttcgtagtcattgcggccacatgcagtctattcccaccactggtgcggatactgctggtttggcgggttttcttgcaaaactggccgttggttgtccgcataatgggactgatatgtgaacgtttgttgatggtgcgacaccggcgggatggttgtgcaattttgccggtatccggtgatgaaatgttgaggtgttggaactgagtcgtcgcagtgctgagaccgagacgactcagtgacgagcctatccgaggctatctcgttggttctggtctcactgatccagacggaagccctgagcggcggccttgtcgagcagtgtctgatggctgacatcctgccgactgatcgtggcgacctgatcgctgaaagcgtccaccggacggtcggcttggcgcagatcgtagtaccggtgaacttcctcgtcgaaggcgggcagctggtcgagtacgccatcggcgtcagccgggtaggtgttctcgaagaactgcatcgtgcgcggcatgcgcggcttgacggtcgggttctgatcgggcttgccgatggccagacccagcaccggatacgtgtattccggcagattcagcacgtcgataagggccggggatgttgttgagcagagagccgagaatcacgcagcccagtcccagcgaataggcggcggtctccatggcgtgcagggccagcactgcgtcgttctgagcttgggtgaagcgatagctgtacttgagatggaattcgtcggaagcgggatcgatacccttgcgttcggcgatgcgtgcgttgcggtgctcgccgatgacgaacacgtacagcaacggcgcggtggcgatatacggctgatggccgaattcggcgagcttggctttggtggccgggtcggtgatacggatggcggaccagtcgttaaggaactggctggacgcggcatgttgggcgacggtttcgagcgtggcgcgggtatcgtcgtcgatggcctcgtccttgaacttacggatggagcggcggcccagaagagcctcgattgttgcgttggtaaccatggctttattgtcgcacggcagacgccggacgccacggtggattacctcacagtgaaatgccgatattgtgtggcggaactgtgctggactgatggttcctgtcgattgactgatggttccttgacgaaattccagcgatgagtcatcagtcagccaacagaaaccatcatccaaccgggggattagcggctgggcttgcgatggcggtggtcgacgaacgccttggagccccgatccgacagctgcgaaaccactgcgccgagtgcggccgaaacggcggcgaatgccagactcattgccagactttgcggcgcgtctgccgccagtcccttgcgcagattgcgtttgcttgtgcccttgtcccatatcatctggaatgctttgccggcaaccaagcctgccagcgctgggactgccgacttgatgagcttgtcgcccagagaatcagggtcgttgagccggtcctcgcgcagcctgttgaccttctcgtcgatgcggtgcaggctgtcgaccgcgcggtcggcgctggaggggaagtcggtgttcgtttcgtcgctcatgactctcagtctaatagcatctcaatcatctcagcgcaaaagatgggcgttaatggtggagtcatgaacgagcgcagactagagtggaggcatgagcgaacagaacgtgaacggcaccgttgccgtcgagaactctcgtggcggcaatggatttttggtgttgctgcgccacggccagaccgtgtggagcgaatccgggcagcataccgggcgcacggacatcccgttgaccgcggtcggcgagcagcaggcagcggatgccggaaggcgcctgcgcgaggccttccccgaaggattcagccagagctgtgtgttttccagtccgctgaagcgggcgtgccaaaccgctgaattggctggttttgcggaccacggtgtgttggacggcatcgctgaatgggattacggccgagccgaggggcgtacgcgccagcaggtgagtgaggccagcggttttgaatgggatgtgtggcgtgacgggccgcgctcgctgacgcccacgctggagggcgactgggtcgagaccttgccttcgggcgaacaggtgccggtccatgccgggcctggcgagacgctggaagaagcggcggcacgcgccaagagcgccatcgacgagattacgccgctgctgaaagacggccataatgtgctgttggtggctcatgcgcacatcctgcgcatcctcacctcgcaatggctgggcgtggacccgcatttcgcacggttgctgcgtttggatacggcgcactactcggtgctcagcgtctataagggagataacgtcatcgaacggtggaacgcctagccccggttgcgctgcgattgcgctggcctgcccgctactgcgggcgggcctttattatttgtggcgggaattgcggtatgtcgataaatgatttgcaaacgatagcgtcggcgtgttgttttttgatgggtataagtggcaatcgatcgccatgaaagatatgttagcgctctcatagttgcgaacgcttgcattgcgataatgaggcaaaaatgactgaattaatgggatatttgttgacaatggcctgaaaatgatgatttatgacgcgccgatattgctatcgtttgcaaaaagaagcaaaccgttgcacaatagtgcatgtcgatagtcgtaaaggtgcgtgctagcgtacctgtcccgaccggggacggccgggtcgacgatgaaagagaaaggttcgatgatgaatcgtacagtcaagtcagcagtcgcgatggcggctgtcgctgcgatgtccctcggcgctttggcggcctgcggaagctcgacctccggcgatgacgccaagggcaaggtctactacctgaatttcaagccggaagcggctgatcagtggaccgctctggccaaggaatacaccaaggaaaagggcgttgaggtcaaggtgcagaccgcggcctccggtacctacgagcagaccctgaagtccgaaatcgccaaaaccgaagccccgaccttgttccaggtcaacggcccggtcggctaccagaactggaagaagtacaccgccgatatgtccaatacggatgtgtacaaggagctcaccaaccaggatgtggccctgaaggatggcgacaaggtggtcggcgtgccgtacgtgatggaaacctacggcctgatctacaacaaggacatcctcaacaagtacttcgcgctggatggcgccaaggccacgtccatggacgaaatcgacaacttcgacaccctgaaggccgtggccgacgacatgcaggcccgcaaggacgagctcggcatcaagggcgcgttcacctccgccggcttcgactccagctccgactggcgcttcaagacccacctggccaatctgccgctttactacgagttcaaggacgacaacgtcaccgagcagccggccaagatcaagggcacctacctgccgaactacaagaagatcttcgacctgtacatcaccgactccaccaccgaacccacccagctgagcgccaagaccggagatgatgcgaactccgagttcgcgctcggcgaggccgccttctaccagaacggcacctgggcctggaccgacctgcagaaggccggcatgaccgccgatcaggtaggcatgatgccgatctacatcggcgtcaagggcgaggagaagcagggtctgaccaccggttccgagaactactggtgcatcaatgacaaggcctccgacgccgacaagaaggccaccgaggacttcctcaagtgggtgatcacctctgataccggcaagaaggccctctctcaggacatgggcttcaccaccccgttcaagaccttcgatgacgtcaaaagcgacaacccgctgaccgaggccgccgtggaagaccaggagtccggcaagacccaggtttcttggaacttcaccatgatgccgtccgaggaatggaagaacaaggtcggccaggcgctgctcgagtacgcgcagggcaccggcaagtgggatgccgtcaagaccgccttcgtggacggttgggcttccgaatacgaggcctcgcactgagtctcatagagtcccatagccgataagtaacaatccgcggcgcccctgcctttccttctccaggggcgccgctttgtattgctgagtctcgcacaaaatcgtccgccgcagaaaagtgtgaggcacgcacccgctcaatcgcacgctgtggggccatgaatcggcgatttttcgccattctccacaatgtgcgattgagcgttattgtgcggttgcctcacactttttctatggtgggctttgttgtgtgagcctacttaacgcgggaggtggaggagcggaccttcagctgggccgggaacacgatgtagggttgctcaatcggcttttcgtcaatgagatcgagcgtcatgcgggctgccacgcgggccatttccaccggatcctggcggatggtggtcaggccgatatcgccggtgtagaaactatcgtcgtagccgaccagcgagacgtcgccgggcacggagaatccattgcgctccagctggaacataagcggcaaagcgatgccatcctcctggcatgcgatggcggtgggcatctcgtcttggctcatgagttggtcgaccacgtcgctgatttcataacgtccatcgtcatcgaccttgcagacgatgacctgcggctcgatgccttccctgcggcagcaggcggtgaatgagtcgaatcggctttgcacggagaagctcagcgacacctcgcgattggtgctgatataggtgatgcggcgatgtccgagattgataagatggcgggcggccagcgtggagccctgcacgtcgtcgatattgacggcggcggtaaagccgcgggcttcgggctcgactgaattgatgccgacgatcggcacgccgaccgaagccagttgcgcgatttcgttgttgtcgatatcgaaagacgccacaatcacggcatcggcgttacggcgtaccggcaacatctcgaagaattccttgcgctcctcgatgctggaaatctggaataccgaaatatcgtagccctgcgtgtgcagcacctcgttgagcccctcgatgaccgaggcggtgaaccacaggcggatatggccgctcatcagtactgcgatgcgcagggcgcggccggatttcagggccgcagccgagcgggagagtgagaaattgagtttgtcggcgatggcgagcacgcgctcgcgggtcttggccgacaccagatccggcctggtgaaggaacgtgagacggtggagatggagacgccggcctcgcgggcgacatcctgaatgctcgtagccattgcagcccccttgcgttgaatggaaaatcgcaatacacatgcacaactgactccagtgtacatgctgattgattgatttgcggcgatgacaacgattgtattacaaacgtttgcaaagtgtttatgacggcgtcagattggctttatatagccattatcttagttgaaagaagattgctggagctggagtatgctcgagcttgaaacgctgaaaatgacaacgtttgacatataatgattcgacgtctactatgaacataggcttgaacgagaacaggccgtgcatgcggttctcgatcggcaggctcgcattgagttgaactccgcagccggcgcacgatgcagtgtcgcaacgcagcggactcaaggaggaggaaaagtcatgatcagcatggctggcaaggcgatacgcagatggtgggcgctgttcgcgctccccacattcgccgcattcatcatcgggttcctggtgcccttcatcatgggcatctacttaagcttctgcgaattcaccaccgttaccgacggtgaatgggtggggcttaagaactatggcaaagcgttgaaagacaaggaattcctgcacgcgctcggcttctccaccgcgtttaccatcgtgaccaccatcgtgatcaacgtgatcgccttcgccatcgcctacatgctgaccaaggcgatcaagggctccacgctgttccgctcggtattcttcatgccgaaccttatcggcggcatcatcctgggctacatctggctgctgctcctgaacggcgtactagcccactggggccgcgccctgacctataaggcgtcctacgggttctggggcttggtcatcctggtgtgctggcagcagatcggctacatgatgatcatctacatcgccggcctgcaagccctgcccgccgatgtgctggaggccgcggccgtggacggcgccaacggacggcagaccatgttccgcatcatcatcccgctgatgatgccgtccatcaccgtgtgctccttcctgaccgtgaccaacggtttcaagctctacgatcagaacctcgcattgaccaacggtgcgccgagcaacatgtctgaaggtctggcgctgaacatcacccgcaccttctacggccgtatgggctgggaaggcgtcggccaggcgaaggccgtgctgttcttcatcctggtcgcggtcatcgccctgattcagaacaagctcaccacgagcaaggaggtggcagcctgatgaacgagaacaagcctgtgaagcatggcgcattatggaccgtgctgtttgccgtcgtctccctgttctggattttcccgatcgtcctggtgctgatcaactccttcaagcagaaggcgtacatctccaagaacgcgttctccctgcctgccggcaaggcgttcgtgggacttgagaactatgtgcgcggcatcgagaccacgcagttcttcgcctccttcggctggacgctgcttatcaccgtcggctcggtggtgctgattctggtgtgcacctcgatgtgcgcatggtggatcgtgcgcgtgaacaactgggctgcgaagctactctacaccctgttcctgttcaac

SEQ ID NO: 769 - DNA, 3221 bp, Unknown
  R14_18m  MAG No. k141_1457
agaaagccaccacggacggcgtggtacgggcgccttcggcgttgacgataacggtgggctcgccaccttcaagagttgcgatgcaggaattggtcgtaccaagatcgatgccaactgcgcgtgccataatgtgtgctcctttgtgggacttgcgattgcccggccggcgccgccgttcgccacgacctgttcgggttgtgacgcgcggtgtgcgcgagccgtctcgcacgtgttcattctttcgtttttcgcccgggtttcggtcggttccttgtgcggttcctctcggttgtggggtttgcgttcgcaaccgcccattcccgtgcttccgaaacttgagcctacaccactcaactttaaaccgcaagtgcatattcccggattcggcaaaaaacttgagcgattctcactcaggtttctgcgaagcgtggcacacggcacgtatcgcatcacagccaaaagccgccggaaaaccatcgcccgccgggcatcggctcggcgggcgatcgttttccggcggctggacgactcgggattaccggtcggccaaggccgaatcaattgttcctggcgttacgcgcggccttgatgagcatcgcgatcgcaaccagcatcacagccgcgatggcgatggccatgacggcggtaccggtggcgcccagggcgccgaacggaccggagaccgcggaatcgttcggcaccttgcccgaagcgatcacgccgttcttgtcggcgcccggcttcttgtcggcggagccggcggccggcgcctggatggcgacggtcgcgaccttaccggactggcgaccggtgacggtgagcgtgtactcggcgccttccgacatcttgtcgagcgcgatcgaagtggtctgcgcgggcttgacgcgcacgccggacagcggggtgctggaatcggacttggacaccacggcgccgtccttgtccttcagctcgtagctgagcagcgcgtcgccgttgaaaccgtcgacattggcgacgtacttgccggcctgcgtgcgggcgaccttcacggtgccgtccttggagagcgcgttctgctcgtcgggggaggtggccaggcccagggcgccggcgatggtgtagaagttatcggtctgatcggtcaggccgatgacgcgctgggcgccggggccggaagcggcgatgcgcagctgggtgccggtgtgctccatgtcgccgccgttgtagccgccttcggcgtcggtggaggcttcctgggcggtgccgtaggagacgaccatgttgttgccgtcggcggacttgagcacggtggacagcgcgtaagccggctgggcgttgaggacctgggaggtgtgcgcatgatcggcggtgacgatcaccagcgtgttcgtgaggtccacgttcttgatggcgtaggcgatggcctggtcgaagtcgtcggtctcgccgatctggccgcaggcgttggcggcgtggtcctgcttatcgatcgaagcgccttcgacctgcaggaggaagccgttcttctggccgttcgggttggcgttgagcagatcgagcgccttcttggtcatgtccttgagcgaggcgccacggttgccgagccaggcgtcattcggggtgcacacggtcgggttggcgtccttggccggatccttggcggtggccttggacgggttgaacttggtcggcatgttgccgtcgctcatcagggcgagcaccggctggccatccttgtactgcagggcgttcatcgcggccgggtcgttctcaacggtctggaagcccatgtccttggcctgttcccacacggtcttgcccttgtattcgccgccctgcacggtctggcggaagtacttggaaccaccgccgatggtcacatcggcgcgggtgtcgagcagctgctcggagatggagccgatgccgccgttctccttgagctggttggcgaggcactgcttggaggcgttgttggaagtgccgtcggtcttgccctgcgggccgtagcaggcacgctcggtggagtgcgattccagcacggccggggtggcgtcctggatttccgcggtggacacgttgccggtggccttgccggcggccttggcaagctcgaagagattcagctgcgggttgccgtagatgtcgacatccacggcgttgttgtaggtcttggtaccggtcgcccatgcggaaccggacgcggaggaatcggtgacgggggtgagcttgcccgggttggggttggcgaccagcttgccggtgccatccttgccgacggcgctgtccttgctgccgtcgccgagcgagaaggtcgtgtactggccggtgcccgcctgcacgtcgtcaagcgcgccgggctgaccgaccgcgtccagaccatcgaagtggccgttggcgcccttcagatagtcgcgggcgatggtgatttccgaatcgcccatgccgtcgccgatgaacagcacgacgttcttcgcgctcttgttgccgatggcggcgatgcgctgcgcggcgccgtgcttggcgagctcggcgaccgacttgccgttggggctgtaggtgccgtttgcggcatcgacagcaaacgccggagcggcgagcgcgccgagcgtcgcgatggaggcgaccgccgcgacggcgctcttcaaagccttgtgattgcccattgttcttccttcttccatgcagtgtcatctgcgccgtccggcccgcacttctccggccgcacccgtttggccacgtccgtcgtcgtcatgccttccagcttcgcggaaccgttccgcacctgcattgcttggatctttcgattccggatttcacggtaggcctcacaagccaacgtccggataccgccggaagaacgccgggtgaacattcttcgtcgaatcggccgaggcatcatcgccgcatgaaccggcaagccatacacgatccgcacctggcagtacatgttctcgaaaatccgccccgaattccccgaggcggcgttcgtcgccgaatgtgggccgaccgaacgaatcgatgcaggccggattcgacatggacttctacctcgactggcgctgggacggccacccgacgctctccccgcagtcgttcgtcgtgctcggataacccgctaattgcccaactcaccgaatgtattgcaatcgttgtcaatatgagttacggtaaagatagaacagctcgaacattggtctgtcagattgccggaacctcaacgcagagcggccctcgaacag

SEQ ID NO: 770 - DNA, 6491 bp, Unknown
  R14_18m  MAG No. k141_1521
gagcagatgacgcaaaaacagaggaaagcaacacaatgagcaacactgaaatcgtcgtcgtgggcgcaggcgtcgccggactgtccgcggcactggccgtggccggcaccggacacgacgtgaccttggtaaccaaggccggactggtggaatcgaacacctatcatgcgcagggcggcatcgccgcggccattttctccgacgacgacccgaagctgcacgccgccgacaccatggccgcgggccacggcctgtgcgacccgaaggccgtggacatcctcacccgtgagggtgcggagcgcgtccgcgagttcgccgcggccggcgtccacttcgaccgcgacgcgcagggacgcatgctgcgcggcctggaagcggctcattcgcgcgcccgcgtggtgcatgccgggggagatgccaccggcaaagtgctcgaactggacgtctccgccatggtgcgcaagaacccgcgcatccacatcatcgagaacgcattcctcaaagacctcatcgtgcgggacggccacatcgccggcgtccgcctgctgatcgacgggcaggacaaggatctggccgccggccgggtgatcttggccaccggtggcgcgggtcgtatgtacccgtacaccaccaatccgccggtcgccaccgcggacggcctcgccgccgcatggcgtgcgggcgcccagatcgccgatctggagttctaccagttccatcccaccgccatggccgtgggcgagcacttcctcgtctccgaagccgtgcgcggcgaaggcgcggtgctgctggacgaacacggccaccggtacatgaaggacatcgatccgcgcgccgaactcgcaccgcgcgacgtcgtggcccgcgagaacttccgcgtgatgcaggcgcaaggcggcaagcccgtgatgctcgacgtgtcgccgatgacccgcgagaaccccgacctagccagcttcctggcccaccgattcccgaccatcgacgcctatacgcgttcgcttggcttcgactggagcaaggagccgatcccggtggcgcccgccgcgcactactacatgggaggcattcgcaccgatctgaacgcccggacctccatccccggcctgtacgcggccggcgaatgcgcccgcaccggtgtcatgggctccaaccgccttgcctccaactcgctgctcgaaggacttgtctacggacgccgcgccggtcttgccgccgtcgcggacggtgacgacgcggtctgggcacccgaaccgttcctgaactccgccaccggtgccgtgttcgaccatgcgccgatcgcgctggccgctcctgccgctacggctgctgctgacgataccgccgccgacaaggtgtgggaccgtacccgcatccagaacaccatgtggcatggcgtcggcgtgctgcgcgacgaggccggactgaaaaccgccatcgccgaactcggccaaggcctcgccgccgcaaacgcccaggctgatgtaaacgccgatggtgctgcaagcagcgttgaggctttggagaaccgcaacatgctcaccgtaggctatgtggccgccatcgccgcgctcgcccgcaccgagtcgagaggcgcccacgcccgcaccgactacagcgagccagtcgacaactgggcccactccgtcgcctacatcaaggactgacccatgctcacatcacacatcatccgcaccgccgtcgaagcggcgctcgccgaagacgcgccctacggcgacatcacctgcgagaccaccatccccgcggacgaaaccggctcggcccacctcaccgcgcgcgaaaacggcgtgatgagcggcatcgacgtgttcgccgcagccttcgccgcgcagaacccggccgtcaccgtcaccgccgccatcaaggacggcgaacgattccagcgtggccaggtactcgccaccgtggaaggtccggtacgcgacctgctcaccgccgagcgcatcgccctcaacttcacccagcgcatgagcggcatcgccaccatgaccgccgctttcgtggacgcggtgaacgccatctacggcgacgattatgacggacccgtcacccggccgcgccgctacgagcgcacccgcatcgtcgatacgcgcaaaaccacgcccggcctgcgcccgttcgaaaaatacgccgtggtctgcggcggcggccacaaccatcgctacggactgtccgacgcggtcatgatgaaggacaaccatctggcggcgctcgccgcgcgcggcatcgacctggccggcgcgatccgccacgtgcgcgaacaggtgggccacaccacgcatatcgaagtggaagtcgaccgccttgaccagattcccgccgtgctcgccggcggagcggacaccatcatgctggacaatttctcgctcgacgacacccgtcgcggcgtggagctcatcgacggcaaggccatcgtggaagccagcggcaacatgagcctggagcgagtgccagccgtggccgccaccggcgtggacgtgatctccgtgggcgcgctcacccactcggtgcgcagcatcgaccttggattggattggaactagtcatggccgatacccccaacgcatccggtgaacccggtgaactgtacctggacgccgccgccaccgaaccagtgagcccggcagtcatcgaggccatgaccccgttcctgactgaggcctacgccaatccggccagtgtgcaccagcccggtaaaaccgcggcccgcgcgctggacgcggcccgcgcatcattcgccgcggcattgggcggccggccggatgacgtgatcttcacctcaggcggcaccgaatcggacaatctggccatcaaaggcatcgccatggcgcgcatgcgcaaactgggcctgcggccggtctacggactcgacgaaaccgatggcaaacaactggcaagcagccgcccgcgcatcatcatttccgctatcgagcacccggccgtggcccaatcggcggcatggctgcacgaatggttcggcttcgaagtcgtgcgcattcccgtggatgcgcaagcacatctcgatctcgacgcacttgaacgcgagcttgacggcgaggccggcgaacgtaccacgctggtctccaccatacttgccaacaacgaggtcggcaccgtggaacccgtggaggaactggtccgcatcgcccacgcgcacggcgtgcccatccatgtggacgccgtacaggccgccggccagattccgattcgttttcgtgactgggatgtggacgccctgtccgtatccggacacaaattcggcacgcccaaaggactgggcgcactgctggtacgcggccgcacacccatcgaaccggtgctgtccggcggagggcaggaacgcggcctgcgctccggcacacagaacgtggccggcgccgtggcgctcgccatcggactcaacgaatcgaatgcgcgcatgcaggcgcagtgccgtgaattggtcgcgtcccgagacacgctcatcgacgcggttcgccgggtcgcgcctcgcgccgacctgaccggcgaccccgaacgccgtctgcccggtcacgcctccttcatcttccccggcgtcaccggggaagcgctgctcgtcgacctggacgcgcgtggcatcgctgcctcatccggctcggcctgcgccatcgggcgccacgagattcctgccacgttgctggcgatgggcctcgaaccgtccatcgccaaatcggcattacgcatgaccttccgcaagccgctgacccgcgaacaagtcgaacgcatcagcttggccatcgaagagtcctacaccgacctgacccgacactaaatctgacgccacttaccagaaaggaaacgacgtgagcaccaccactccagcgcaacccgcgcagctcacccgcaacgagcgcctcgaccggctgcccttcaacaaggcgcaccgtaaactcctcgtcgcctccggcatcggctgggcattcgacgccatggacgtcggcctcgtttccttcgtggtcgccgccatcgcagccgacccgcacttcaacctcaccccgaccgaaaagtcgtgggtgctgtccatcggcttcgtcggcatggccatcggcgcggcggtgggcggcttcatcgccgaccgcgtgggccgcaaaaccgtgttcaccgccacgctgatcatcttcggcatcgccaacggcgccatggcgctgtcctggtcgctcggcatgctgctcggcgcccgactgatcatcggactgggcttgggcgcggaactaccggtcgcctccacgctggtctccgagttttcgccgaccaaacagcgcggccgcatgaccgtgctgctggaatcgttctgggccgtcggctggatcatcgccgccataatcggctacttcgtgatcccgaacaccggtgactggggctggcgctgggcgctggccatcggcgcgctgccactgctctacgcgattgtcacccgtgtacacatcccagaatccgtgcgattcctcgaagccaagggtcgcgaagacgaagccgaaaaggccgtgcgctacttcgaggaagccgggggagtggccccggtaacctctcccaagggcaagccgctgccgaagatcaagacgcgcgagctgttcggctccaagtacctggcccgcaccatcgccatctgggccacgtggttcttcgtgaacttctcctactacggcgcgttcacatggatgccgtcgctgctcgccgaccagttcggctccctgaccaagtcattcggctacacgctcgccatctccatcgcccagctgcccggttacttcctggccgcctggctggtggaggtctggggccgccgcaagacgctgagcatcttcctggccgtctccgccgtggccgccttcgcgttctcgcaggccggatcagcggccctcgtgctcgtgttcggcatgctgctgtccgcctccaacctcggtgcgtggggcgtgttgtacgccgtgaccccggaaatctacccgacccgcctgcgtggcgcggccgccggtgccgccgccgcggtgggccgcatcgccgccatcatcgcgccgctcctcatgccgtggttcctgaccctgtccggcggcaacaaggccgtggccttcatcatcttcgccgccgccttcatcctcgcctgcatagcagccctctgcttgcccgagcgcaaaggcctcaatctcgaagactgattacacttcagccttcgctactaaagtggcccacaccaatgtgtgggccactttttgtcttatagctcccgaatgacacggcaagggttgccgtatgtcactgatcaatcgagggaacgacgggtgagattgcgcggtggttttgtgaccagccacgccaccagcagtccggttaccactacgccgaatgccagcgccgcctgcaatccccagatcggcacggtttccagccaatgaccgtccacaccgatcctgcggttccatgccacatgcagccatcccaacgccacgccggataccacgcccactggcgcgccggccagcagaatcaccgcagcctgcgtcaggccgtaacgtctgaggaatcggggtggcgcgcccacggcgaccatcgtggccatgtcgcgctgggcctgcgtgcgggccagcagcagtgaaacgagcgtggccatcagtgccagcaatgccaacaggccaatgggcaccaatgccatattgtcaccccacggcaggcgattcccgtcagtgctcgtggatgccagcggcagattttcgattgcataagctgaggccttctttacggtaacgggggagttgccaccggcgaagtctagatactcacccagatactgcaattgtttgatgccgagcgcctgtgctgttgccgggctcatcaccagcgggtacgcgccgcgcacgtagatggccttgcgcttctcgatatgtgtggcctgagattcgtttgcaattgccggattcggcgaaatggccacacgcaccatacctcccgcgtcgattgtgccggcatcgccgaccaccacaccgcccgcatcaagcacctgtgccgcctcatccgcgttcgggaagccggacaaacgcatcgcattgccatccataatgagattcacgccgcggaaactcggcagtatattcgaatacgttggctgatgggatcggtctatcggcacacaacgtatcggaacgtttggatacagggccgaagcggcatcctggcccacccatgtggacgtgtccggttgctcttggatcgttgggttatcacaagtgtgaccggccgggagcaatgcagcggcatacatgtagccgtgttcggcgttcaacttgtcggaatcgacttcggtcgtatcattgagttttgaccatcgcttgacatcctcggtgtacaccgggtaatgagcgcgtatcggcgtctctttgccaagccggcgtatcgcatccgacaccacagcacggtcgaactcattgctgacatgcacgtcggccccaatggccatc

SEQ ID NO: 771 - DNA, 11948 bp, Unknown
  R14_18m  MAG No. k141_1533
cctcgccctttatttccgaactgcctaacggtatccgttcagtgagtcagactcacttcttggacatctcggtgtaggtcgggaggttctgccaatcgaaggcgtagccggacttcacgctgagggaagccgcgccggaggcgttggagtagtacagcgggatggccggaaggtcgttgaggaggatttcctcagcctgctggtacagcttgttggcgtcatcgacggacttggcggcggcggcctgcttgcacatgtcgtcgaaggccgggttcttgtagtcaccgtcgttggagccgttgccgtcagcagcagcggtggagtacagctgccacaggtagttctcggcggacgggtagtcaggctgccagccggtacggaaggcgcccttcatctgacggttggtgacggcgtcacggaactcctggaaggtcgggatcgggttggtggccgcgtcgatgcccaagttgttcttgagctggttcacgacggcgtcgtaaagcggcttggcaccaccatcggcgttgtaggagaaggtgagctggccgtcgtacttggagatggcgtcagccttggcccacagttccttggccttggaggcgttgaacttcaggttgtcggcacccttgagggagtcggagtagcccggggtcttcggggaggtgaactcggtggcggcggcggcgttaccgttgagcaccttgtcgatgagctggtcacggttgatggccatggagatggcctgacgacgcagctgaccttcctcgtcgttcttgaagtgatcaagggaggacgggatggtgaaggtctggatgacggagccgacctcggagtaagcctggaccttcttgtcggtcttgaaggtcttggtgaaggcggccgggacggattccatcacgtcgaggttgccggcctgaatgtcacggtaagcggcggagtcgtcggtgtagaccttgaaggtcacgccgtcgttcttgggctgctcgttacccttgtagtcagggttcttgacgagggcgatttccttgttgtgatcccagtggtccagcttgtacgggccattggagacaggcttctcgccgaaggccttcggatccttgtagaaggattccggcagcggggcgaaggccgagtagccgaccttaatcgggaacacggagtcggactggttcaggtcgacggtgaaggtggtgtcgtccacgaccttgaggccggagagctgctcgtcacccttgaggccatccttctgcagatcgtcatagccggcgatggtggagaagaaggaggagcacttctgggcgttcttggcgttggccacgtaggaccaggccttggtgaaggactcagcggtcaccggagtgccgtcggtgaacttccagccagacttgatcttgatggtgtactgggtggcgtcatcgttcggggtgatggactcggccacttcgttggaagccttgccgtccttgtcgaaggagaccagacgggagaacagcaggtcgaccggcttgccgccgccggtttcgttggtgttgcccgggatcagcgggttctgcggttcggagttgtacgcagtgatgatgttggagccagcggtgttaccggaggcagcgttgctgttggagccgccgcaggcgctcagcagcatggccacggagcaggccatggcagcgaaagcaagagctttcttcttcatatgatttctcctattcattaggttgcaggacgtctcagccccgcctcatgcaaacggggctggattccccgtcaccgtgagacttgcatctcacgatgtctcgaacaatccaaccccgttgctgattacctgtcatttttgcgcacttgggagacaagcagtgtattttttgttacacccatgtaaaattcaggggttcttgccggctaggttcagtctttgctgagtttgttaaccaatgtccacatagtggtcatgcccgcggaaaggcctgtccgtaacggttcttgagctgctcgatggagacgtgcgtatagcgttgtgtagttttcaaggaggaatgcccgagcatctcctgcacctccctcaaatcggcaccgccgtccagtatgtgcgtggcggcggaatgacgcaacgcatgggggctgatgtccggcacgccggcctctcgggccgctctgtgcacgatgtcacgggctatgcgttggtcgatacggccgcctcgtgcgccgaggaacagggcgttggcagcacgagacttgactgcatccgttgccgtacgggccagtaccggccgcccctgttccagccaagtctccagcgcacgctgggcgggtagtccgaacggcaccacgcgttgcttgttgcctttgccggtgactttgatggtgcgattggagaagtcgatgtcggcgatatccatcgacaccagttcggcgacacggatgccggtggcatacagcagttcgagaatcgcggcgttgcgctgcgattcggcggtgactcgggcgttatcgcgcttgtctgcacgggcgggtgcctcactgcggtttacggtatcggccgacttatcagctgtcttgccagctgccttgccgctgccggacgcggctgccgctcccccatcgtccttgtactggtttgttgcaacggcatgttcagcgacatccaataattgctcggcctgggattcggtgagcaccgcgggcagcgtgctgggaatcgagggagtcatcagtgtggcggccgggtcggtggtggtcagcccatgctcataggcccacgcgaagaacccgcgcacggccacggttttgcgggccatgctgctgcgggcgtgatcgcgcgattccaccgccatccagctgcgcagatcatccagcgtgatctcgttcagatcggtcacgccgcgcagctcgaacagatgcaggcatgccgtgagatccgcgcgatacgctttgagcgtattcgctgacaggccgcggttggacttcagataggagacgaaggagtcgatatcgccgtcgaactgcgtagatgacactctcgttctcctccgaattctttatggccttgggttacggccggggtggcgtgttacgccgctccggcacgggtttcaatgtggcaatctgttcctgatggatggtcacgttctgggccgggcgcgaaccattggcggcggcgtcacgcaccatctccaacgtgtatccatcccaggaaaccacatgccccacatagtcgcggaacttcatacggtggtcgaccgggtcaatgccgtcggtgatgcgcaccaccacgcgggcaccggccggaatctgccttggtaacgtcatacgtcatcatccccttagccatccgccgcatcaacttctatgcgtttcctgaaaaacggtacagactaccttactcctttgggtctttcgaacagcggagccacacggtcttctcacgaaaacaagcgggaacttcatccccctcgcgcagccttcttcgtgacgggcggcgaggggaacctgcacacgggctgcatggcggggcgcagttacatggcggggcgcagttggacgatggcctgacgcggatggatgaaaccggtgatggcttctccccggcgtgcggagaacagcaaggtctgctgccagccggcttcggggacggcgagctcgcgttccgggaatccggcggcagttgtgccggcttgctgcgcggtggccgtaccagcttgtgcagcggtgatgccggctcgcgtcacggcggccttgtaccggcggaaggggtcgccttcggcgaagaatcccatcacatcctgctcgccgtcggcaccagcgtgcagttggtcggccatatcggtcagacgtgccgccatgcggcgcagcagcacttcgacgttcagcgagtcttcctcgaccatcgcgcgcgtgcggtccgggtcggtcagggacacgcgggtcatgtccctccagcagccggcagccagcgcggcggcgatgttgcggtccgggttggcgaccagttcgttgatcagcgcggtggacaccacatgcggcatgtgggagatcatcgccgcggccttgtcatgcgtttcgtcgtccacgacgatgacgcggttgccgacgtccttggtgatcatcgtggcgacgtcgaggaagcggcggtagtccgtggactcgtccacggtgatggcccatagggcaccgtcgtacagatgcgggtcggcggcctgccagccggacagttcgttgccggccatcggatgggcgccgacgtagcacttccccagcgcggcagccttgacctgatcgcggaccatgcccttgactgagcccacgtcggtgagcgtggtgttcggatggtcgcccataagcggggctagggcggcgaggattgagggcatcgccttgagcggattgcacagcacgaccacatccggctcggcatccatgagttcggagagcgtgctcttgcagaaaatgccatcggcttcggcctgggcgtaggggtgcgagcgatggttccacgcgatgacgcgtacgccgcgctcggtcaggcggcgtgcgagcgagccgccaatcaatccgagtccgacgattccgactgtgtctaccacagcagttccttccttgctccctcggcgtactgccagccttccgacgcgcgattggtgatgtggacgccgccctcgggcagcatccaggcgtcgaccggcgggttcgggcgttcgcggcgtgggtagacggccagggtttttgcccagtcgccgtgtccggcgatctcttccagtgcggtgcggaatcttggctcccagggggcggcgtcaagggtggcgatgaagctgtaggttccgtcgtggcctttgatcgggcgcgagatgaagctggtcatgttcagccccgcatcacgcaggacgtccagcaggtcggcgagcacgccagggccggtgaccagcgggatgaaggtgatgatggtttcgaagtcgccggcgtcattgcggtgggcgcgggcgttgaattcctggaccacatcacgcggggcgatgacaaggaattcggtgtgcgcgccatcgaaatcctgcacatgttcggcgagggtgtcgagatcgtagagttcgccgcagatgctggggccgagcgccacgcggccgggcttcaggtcgcggcaggcggcggcgttggaggatgcgggttcgggctgcaaatggtgttcggcgatgaaccgggtgcattgggccaggccgtgcgggtgggcgctgacggggttgccggtgcagtcgcagatgctgtggccgcgcacggtgaaggcgttgaaggccacgtccacactgatccgggcgaagccggccgcgtcgggggcgtcgatcagcgcgtcgagattcgggaccacatagccttcgacgttgttttcccatgcgatgacgccccagccttggcgcgactgtacggcctgcatgatcgcgggcacgtcgggcagggcggtgaggtcgaagtcgccgagtgtggcgaactggtcggcggccgtcattgccgcctgatgggtgaaggtgccttccgggcccaagtaaaacagtttcatgcgtgccataaggttctatggtagcggccgtaatcccctacgcccgccgatacgcgacgcattcgcggaaatgtgccgccatatatagttacgcgcgcgattcagaatgagtgggaataacgaaccagcgggcgggaagaatgagcaggacgacttggaccagtatcaggccgtacagccagatgtagccggcatgctgggagaagaacggcatgtcgccttggaatccggcgacgatgaccgccttgccggatgtggtggtcagtgccatgccccatgcggtcagcgaggaggcgatgaggtgcagggccagtccgaccgcgcccatgcgcgaacgggcgcaccatgtcgataggccgatcagcagaaatgccagcaccagaccatacggaatactcagttctgcacccatacggtgggcgaacgtgcccacaaaggcggaagccacgcccgccgcaatcgtgatcaacgatttgaccagcgcgttctggcgatacgaccacggacgcagttcagtagtgctcttcacagtcatgcgtttcagtataggtggggatatgacttggcgaggaataaacttggctcccctcagagaggggagccagagagaatggtcggctacagtcgcaccagatcacttaccctgctgggcggcgttctggcggcgctgcttggcgcgccacttgtaccagtcctcacggccgaggatgatcttgcgcacgcggatggactccggggtgacttccacgcactcgtcctcgttggcgaagtccagggactcctcaaggctcatcttgatcggcggggtcagggtttcgagcacgtcagcggtggaggaacgcatgttggtcatgtgcttggccagcgtgatgttcacatccagctcgtcgggcttgttgttcacgcccacgacctggccctcgtacaccggggactgcggttcgacgaagaagttgccacgggcctgcagacgctgcatggcatacggagtggccacaccctgacgatcggaaaccatggaaccgttctgacgaatggtgatggcaccagcccacggagcatagccagcggagatggaggaggaaatgccggtgccgcgagtggcggacagcagagccgtgcggaagccgatcagaccacgggacggcacggtgaactgcaggcggacccagccggagccgtggttggtcatgccgtccatacggcccttacggtcggccatgagctgggtgacggtacccatgtactcttccggcacgtcgatggtggtattttccatcggctcgttgaccacaccgtcgatcttcttggtgaccacctgcgggcggccgacggtcagctcgtagccttcgcggcgcatctgctcggcgagcacggccagcgccagctcgccacggccctggacttcccaagcgtcggggcggtcggtgggcagcaccttgatggagacgttgccgatgagctcgcggtccagacgatccttgatcatgcgggcggtgagcttgtggtccttgccctcggtgccggccagcggggagtcgttggtgccgaaggtcatggagatggccggatcgtccacgtggatgagcggcagcggcttcgggtcgttggggtcgacgatggtctcgccgatcatgatgtcgttgacgccggcgacggccacgatgtcgccggggcccgcggactcgaccggggtgcgctcgaggccctgcgtgcgcagcagttcggagacgcggaagttctcgagggagccgtccacacgggacaggccgtaggtcttgcccttctcaagggtgccgttgtagatacggaccagaccgagtcggccgaggaagtcggaggagtcgatgttggccacgtgagcctgcagcggggcgccttcctcgtattcgggggccgggatggtggagatgatggcctcgaacagcggctcgaggttgtcgttgtccggcaggccaccgtcggcgggctggttcacggaggcgtagccggccttggcggcgcagtagatgaccggcatctccagcagctggtcgaggttcaggtcgacgccctcgtgctgcacgtcgtcggccaggccgagcagcaggtcggaggtttcgccgacgacctcttcgatacgggcgtcggggcggtcgaccttgttcacgcacaggatgaccggcagcttggcttcgagggccttgcgcagcacgaatcgggtctgcggcagcgggccttcggaggcgtccacgagcagcacgacgccgtcgaccatggagatgccgcgctcgacctcgccgccgaagtcggcgtggccgggggtatcgatgatgttgagggtgatgccctccgggtggccgtacttggcggccagcggaccggtgtattccacggccgtgttcttggcgaggatggtgatacccttctcgcgttccagatcgttggaatccatcacacgatccggcacttcctcacgctcggaaaacacgtgcgactgctgaagcatggcattgaccagggtggtcttgccgtgatcgacgtgagccacaatcgccacattacggatatctccacgaaccgccatcgaaacctctcttaatactgattttcttgcgtaatcgttcggtacttgcgttctcgagtacttgctcttggatatcaacctgtacctacacacaaaccgtcacgatgttactggcacaccttgacacacaacgggcccggctttctgagaattagtcacatgtcatctggcttgcgagactttttgtattccacactctcgactcccctccctgaggggagctgtcgccgtgggcaactgaggggcgccaagtgtatcccctgaatctcccctgaatcatccctgagtacagcaccgtcatgggtagttactgagtaacctgatatccaacgatagttactcagtaaccttcgcccaaggcaaaccgtctatgcaaaggggatgcggtatggcaatcagagaagcgctattagcactgttggagcgaggcccggccagcgcctatcagcttaagaaggacttcgaccgcaccatcggtctgacttggccgctcaatatggggcaagtttccactacgctgcagcggttgaaccgcgacggactgattgaagagaccgcgccgactactagcggatccaatgatgtcggcaccgcagcggccgcaccattatggcgattgaccaattccggcgcccaagagcttgaccgatggtggcgctcccccattaccccggaacaacgcggacgcgacgaactggtgatgaagctggccgtcgccgtggaaatacccggcctcgatgtttccgaactcatccaacaccaacgccacgctttgcagcaactgctgcacgacatcacccgactgcgccggcaaacaccgcccaccgaactcgccacacgtctagtactcgaccaccatattttcatcactgaagcggaattgcgctggctcgataccgtggatgagacccagctgcgagcacaactggcgcagcaccccgtttcggcacctctcacggcaagctcagccgcactcaccgccaccattcaatagtgcataggagcacatcatgacttctcccgttctttcttctctcccgcaatcctccccatgcgcgctggaattacacgacgtcactcgcgttcacggcaaagatgcacgtcgtgtcaccgcgctcagtcacgccaatctcacgcttcgcccgggtgaattcgtggccatcatgggccccagtggttccggcaaatccactttgctcaatcttgcgggcgggctcgatgtgcccacgcaggggcacgtgctggtcgaaggccgcgatctggccacactgtcagtggccgaacgcgcggccatccgccgcaaatcgataggctacgtgtttcaggatttcaatctgctgccttccctgagcgcagccgagaacgtgtcgttccccttggaattggatggctggaatccccgcaaggcacgtgaggccgcgatgcaatccctcaatgaagtgggagtagccgatatggctgatcgccgacctgaagacatgtccggcggccaggcgcaacgtgtggcgattgcccgcgcactggtcggcccacgccgtctactactggccgacgagccgaccggagctctggattccaatgccggcatgacgattctcgaagtgttgcgcacccgcgcagatcgcggcgcggccgtactgctggtcactcatgagcctcgcttcgccgcctgggccgaccgcacggtgtttttgaaggacggccgtatcatcgatgaaaccggctccagcaatatggatgatttgctcaaccttgaggaaaggggagcatgatggcacgcgcagccctcaataatcttgccaatgccaccgtcggtcgctctgcccaaattccccatgccgctaggccaagccttggcgcacgttgcaaccggtatcgggccgcgctgcgactcggctggcgcgacgcactacggcacaaggcccgcaccctactgtccttgctgctggtaatgctgccaatcgccgcaatggtggcctccatcggtatgaccaccaccataccgcccaccagatcgcgtgcgctggcgacaatcccggctgatacgcaggcggtcatcaccgccaccgccaggccccgcaccggccaaccgttccggcagtcacccgaaagcggcggcacgtggcaggacgatccctcccagcagccggcctcggccgccgagcttgcgaagattctgccgcaacaggatcggctgctcccgtattggcagtcgcccgaactcatcgccatcaccggcaccgcgttgcaacccggcgaacagaccaaggctgggatcgacgtgaaaagcgggaacgacattgatctgaacgcggcctccaccgcgaccatgaccgaggcttcacctgaggcattgcaacgaatgttgccgaagctggtcaagggttcggcgccgcagaataatacgcagattgtcatcagccgcacattggcggataatctcggcgcttctctcggtagcacggtgacgttcgtcgctccgccgttcgatggctggatgagcctggacgggcgcatcggcgaggcggtggccgacactcagcgtgcttggacagtcagcgggctgaccgatgaatccgaagccgcggcatggggcttggaaggctggatgtcagccatattggaatctgatggcgtcggtgtggatggccattatttggtggtcggtccagagccggtcacgtgggcgcacacccgcagcatgaacctgttgcaggccatcgtcatttcccgccatgtgctgactgacggctatccgcccgcatcgcagctctacccgatgcagatcgatgcggctaccatgttgaaccacatggtcaccgtggtcatcaccatgctggtgggtatgttgctggtactgtttctggtcacgcccgcgtttacggtgtcggcagatcagtcacgtcgtgtgcttgggctcgcggccgcatccggtgctgcaccacgtgacctcagtcgaatcatttcctcgcaaggtctcgttatcggcgccatcggtggcgcgctgggctcggcattgggattcgcgcttaccttggcggccggccctgcgataggcgcattgcgtggatccacgccgctggagatcctgcacggattctcgtggggctcgctgccgatgggtattgtcacggcaatcatcattggatttgccgcgacgattgcgccggctcggcatgtggcgcgtatgcatccagtcgatgcgttgaaggattgcccgacaagagaggaaatcggctacggtgaatccgcgaatggcgtggatacgaagcttcgccgtaatcctttgagactgctccgtgttgcggttggtccgattctggtcttggtctccatcgtatgcgccgcgctcagtctgacattgccattacccacgctggccgatcacaatccgggcgcggttccggccggaaccgaaacgcatatggctctgcttgttgccacgattttgttggctgtcatagggcttgcgttgtcgattcgcacttttgcacggtggtgcggcaaagcgggttcccaactgaacatcggcgcacgcctggcactcagggatgcagccgagcatcatcgacggttcgttccggcggcatgcgcggtgctgattaccatgtgcatcgcctcgtacacactggtaatcaccggctccatggtggcggaccagcgaaattccacgatgacgatgacgtatggaccgtcggggatggccattggggccgacgtgcatgtcagcaatgagttcgaccgtgctgtggtgtcggatgcgatacgccggcttggcaaagagacgccgatacgcgctcattacccggtgtacaccgaggatgtcaagcgatggtcaaa

SEQ ID NO: 772 - DNA, 11097 bp, Unknown
  R14_18m  MAG No. k141_1634
gatgccgcgccgggaggcaactcagtcgaggttggactgcgtgcctgcggtggcttcgttggcggcttgctcggcttgtgcctggtcgagcttggctcgtacgtcgttgagcaggccctgggcgcgcttggccaaggcctcgccgatttcccattgacgcatcgactggtcaagattgaggccgccggtttccagtgcctggacagcctgaatcagcttgtcgcgcgcctcctcatatggcatctgggcgatgagctcgcgttccttgtccgtcagggacgaggcgggggtgttcttgtcggtgggtgtggtgttctcggtcatcttgttctccttatatatacggtatatatgcgtgaatgcatatggtgcattacgcggttgcggttgcggatgtggcggtggcggtaatgacgccctttttcagggtgacggtgatgccatccccggtactgacccgcgaagcgtcatccagcacatggccatcggaggactgcaccaccgcatagcctcgattcaatgtggattgcgggctgagtgcggtcagtgaggcatgggcgcgttcgacggtgagctgggcatcgtccacgatgcgtcgcaggccgatgtcaagccgctgcagggaatcgtcgatcagccgctgatgcggttcgagcatggtatgcggttgggtcaggcttggccggttcgcatatccctcgataagtcgaatctcgttctccacgcgcgaacggacccgcagtcgcatacggtcgatggcaccttcgatgagctgcgactgctcacgcacatccggcaccacgcgcttggccgcatcggtgggggtggaggctctaagatcggcgaccagatccagcaacgtccagtcatcctcatgcccgatggaggagattaatggtgtggtgcaggcatacgccgcacgaaccacacgctcatccgagaaaccgatgagatcctcaaacgagccgccgccacgggccacgatgatcacatccacgctcgggtcggcatcgagttgtgcaatggcctgaaccacttcggccgggcattgctcgccctgaacatgcacatggaccaccttgaaggttacggaaggccaacgaaggttcacattggtgatcacatcgccttccgcgcgtgcctgaggtgcgcaaatcaggccaatagtcttcggaaactccgggagaggcagtttgtgatcggcatcgaacaggccctcgcccttaagctgcttgcgcaattcgtcgatcatggccttgaggctgccaccggctccgaccttgagaatcgtgtccccgcgcaacgacagcgaagtgcgcttcatccacaggttcggtttgccatgaatcaccacgcggtcgccctgaacgaactggctggccgcggccgcgaacctgccgaagccattgacttccatggcgatatcctcgaagtcgtcgcgcagcgtgatgtaggccgagccggcgcgacgggtattgatctgcgtgatctggccggtgacccacgcggacggccatcgttccacggcaccgtagaacttctggctcagcacacttaccggccacggattttgcgcgctggtttcagcggcgcgtgcaggcagctgatcgatagggcgaggctcattcggcagattgatggtgccctgatcaggcgcgaaagtgccttgacccggctcaaagccagccgaggccagtgaagcggcggtcggtggacggccggtagatgggtagcccattgcagtagtcatgcactccactataagtgcgttggttgatgacggtaaatatttaccgtcgcctgaaaacggtgtgatgatgaatgcgagaaccgtacgaagcgatgtatcagccgatgatggagatggtctggtgcatcagaagaaaggagtcattatggcgaagaaacgggtgctatgaagaggagtgagatatgcgttgcgctgacgattgagagtcgttagtgagctcgctgtgcgacacgcgagcagaaaacagttacgctaatcacacacttgtggttttggcggaaaatagccgaaaaccctataaatagttcgacacaccactgttgagcactagatatagtggtggagatgccgtattcttctagaggttcaaaaaacgacatcaatgtaatttcgtgtggcccacgtcgagtgcggccaaaatgcggaactcaggagagtgttcgccttataggaaaggggtgcccgatgggcgcacaggtgttggaggaaatcgtcaccgataacgagaccaaggtggccgccaaggcctccaccgtgctcgttgagaagcgtgatggtcgtgtggtcgacttcgaccccattaacatcatctctgcggtcaagtctgctttcggtgacctgaacaaggaagtcggccccgaagaagatgccatgatccgtggtttcgccaaccaagtcgaaggcgaaatcaaggggcgttacgccggccccgccaagatcgaggacatccagaacctcgtggagcacgccctcattgacgcccacctgtacgatgtggctcgcgcctacaccaactaccgtctcgacaaggacattcagcgtgccaaggccactgatgtcaacgaggccgtttcccgcttcatcaaccacgacccgaccctgattcacgagaacgcgaacaaggattccaacgtctactccacccagcgtgatctgctggccggtgccgtgtccaaggccgccgcgttcaacatgctgccgccggcggtgtccaacgcccacatgaagggcgacattcacttccacgatgccgactactcgccgttcactgcccagtccaactgctccttgccgaacttctgggacatgttggccaatggcttcactcttggcaacgctccgatggcttccccgaagtccatcgccattgcggccacccagattacccagatcatgaaggacgtggcctccagccagtatggtggccagaccgccaaccgtgccgacgagcatcttgcccagtatgccaagaaggattacgagaagttcctcgaggaagctcgtgagaccatccccgacggcatgccagttgaattcgcccgtcgtcaggtcgagagcgccaagaggaacgagcccgccaagctgcatttcggttcccgcgaaccgctgccgatggacaccccgttccacaccgacgttgacgaacttgagcaggagcgtgaaatcctcgccaagattcgtacccgcaaggccatctatgatgccatgcagaccatggaataccagatcaactccaaccgtgtgtccaacggccagaccccgttcgtgactgtcggctttggtctcggcaccgactggttctctcgtgaagtgcagcgcgcgatcctgctgaaccgtattcgcggcctcggcaaggaacaccacaccgccatcttcccgaagctcgtctttactgtgcagcacggcgtgaacgccgacccgggtgacccgaactacgatttgaagcagctcgccctcgagtccgccaccaagcgcatgtacccggatgtggtgttctacgagaacatcgtcaagatcacaggctccttcaaggctccgatgggttgccgctccttcctgcagggttggatcaacccggagaccggcaaggatgaagaagatggccgtatgaacctcggcgtggtcaccgtcaacgtgccgcgtatcgccatcgaatcccacggcgacaaggcccgcttctggaagctgttcgaggagcgtatggaagtcgcccatcaggccctccagttccgcatcatgcgctgcaaggaagccaccccggtcaacgccccgaccctgttccgcttcggtgcgtttggtcgtcttggtgccaacgacaacgtggaccagctgttcaagaacgagcgtgccaccgtgtcgctcggctacatcggccttgccgagaccaccgcggtcttctacggcaagaactggattcgcgaccacggctgggatccggaaggcaaggagttcgcgctgtccatcgtcaagcgcatgaacgagctgtgcaagcagtggagcaaagcggagggctaccactattccgtgtactccactccggctgaatccctgactgaccgcttcaaccgcatggaccgtgaaaagttcggccgtatcgaaggcgtgactgaccacgacttctacaccaactccttccactacccggtgtggttgcagcccaccccgatggagaagctcagctacgagaaggacttcccgtactacgcttccggcggcttcatcaactactgcgagtacccgtgcctgcaggacaacccgaaggcgctcgaagccgtgtgggattacgcctacaacatcggcatcggctacctgggcaccaacaccccgatcgaccactgcttcgtgtgcggcttccagggcgacttcgagccgaccgaggaaggcttcaagtgcccggagtgcggtaactccaacccggacaagtgcaacgtcaccaagcgcacctgcggctaccttggcagcccggtccagcgcccgatggtgcacggccgtcacgaggagatcgcccaccgagtcaagcacatgagcggcgaaaccggtcgtgtgacgctggatgacggcaccacccgcgagtggttcgaagaggccaagtagggttattcgtgagtaggctcccctctctgaggggagctgtcagcaaagctgactgaggggagtccgaagagctattccgaagctcccctcagtcgcctacgacgacagctccccctcaaagaggggagctaatgctttccgcaaggagggaatcatgccggagttgcatacgaccaagcccgaacccaagcgccatgactttgcggccagcgagaccgggcgtggcccctccgtaccctccaacggtcttgccaacgatccgaaagccggtcaatgggatggccggcgcatgtccaagcggatgatcgccgactacaaaaccttcatcgtcaccgacggagaaggcgtgcgcaactccctttacgtctccgggtgccccttccactgcgtcgactgcttcaacgcctccatctgggatttccaagccggccacgaatacacgcaaaaacttgaagacaaaatcatcgaagatctgaaagccccatgggtgcaaggcattacgttccttggtggcgagccattcctcaacactcccgtgctggtgccgctcgcacaacgtatccgccaggaattcggtcataccaaagatatctggtcgtggaccggctacacatgggaagaactcatgcgccccggagaaaccccagacaagcttgaattgctacatctcatcgacattctcgtcgacggccgctacctcagagaccagaaggactcgctgctgcaattccgcggctccagaaaccagcgcatcctcgatgtgtccaagtccctagaagccggcgaaccggtcatctgggccaagctccacgatcaagaacgagatatccccgaaatctatttgagagaccgcgaagccggcgaaggccaacaggcctcgtagtagcaggtccggaatgccgcactcagcaatatcgtcggaactgttggggaacgcccttcccgtgagcgaaatcaccatgcccggcgtcacgttgggcaggtggtcggactaatattccagaagaagtagccgggcgaagccgtccgcaggtatctgccagccgtcccgaaacggctcatggtgcctgaaggcgcacatacccggaagtcggaattaagaggaacacatggttgacatcgtcactgacgcgagcgtaaagcccgcttcacacccgaagcccctgcgtgtgggattggacatcggttccaccaccgtcaaggccgtggtgcttgatcagtccgattccctgaaagacaccctcttctccgattaccgacgccaccacgccaacgtgcgtgccaccgtggccggcctgttggtcgacatccgtaaagagctcgtggaactaggtcgaggcgatgagccgattcgcctgtctatcaccggttccggcggtctggcgcttgctgacaatctgcatgtgcctttcattcaggaggtcatcgccgaaaccgaggcgatcgacaaggaatacccgcaggccgacgtcatcatcgagctcggcggcgaggacgccaagatcacctacctgaagcccacgcccgaacagcgtatgaatggttcgtgcgcaggcggcaccggcgcgttcatcgaccagatgtccacgctgcttgacaccgacgccgcaggcctcaacgagatggccaagagctacgagaacctgtatccgatcgcctcgcgttgcggcgtgttcgccaaaaccgatctgcagccgctgatcaacgacggcgcggccaagcctgatctcgccgcctccatcttcaccgcagtggccacgcagaccattgccggcctggcttctggccgcccgatccacggtaccgtcatcttcctcggtggcccgctgttcttcatgtccgaactgcgcgccgccttccagcgtgcccttgaaggcaaggtcgacgagttcatcgtgccgaccgacgcccacctgtatgtggcctacggttcggcattgcaggccgacatggattccgacgatcagggccaccatttcgaggcccacacctgcgatgagatcctgaagcgtttggacgagctgaagaacctgccctccaacacgcccaccatgccgccgctgttccccaccgaggccgaccgcgaggacttcaacaagcgccaccacaaggaacacatccacatcggcaccctcgaaggcgcgcatggcccgcacttcctgggcatcgacgccggttccaccaccatcaaggccacgctcgtcaacgacgaccgtgaaatcgtctggtccagctacgccaacaacgaaggcagcccgctgaccgccgccatcaacatcgtcaagaagatccaatccgagctgcccgaaggcgcatggatcgcacgctcctgcgccaccggttacggcgaaggcctcatcaccaccggcctgcacctggacgagggcgtggtggagaccatggcccactatcgtggtgctgaaatggtcagccccggcgtcaccgccgtcatcgacatcggcggccaggatatgaaatatctggccatcactgacggcgtcatcgactcgatcgccgtcaacgaagcctgctcgtccggctgcggctcgttcctgcagaccttcgccatgtccatgggcctgacgattcaggaattcacgcaaaaggctctggcttccacccatccggtggacctcggttcgcgctgcaccgtgttcatgaactcctcggtcaagcaggcgcagaaggaaggcgcctccatcgaggacatcgctgccggcctatgctactccgtggtgcgcaacgccctgtacaaggtcatcaagttgcgtgattccggcgaactcggcgacactgtggtggtccagggcggtacgttcctcaacgacgccgtgctgcgcgccttcgagctgctcaccgaacgtcaggtcacccgcccgaacatcgccggcctcatgggcgcgtttggcgccgccctgaccgcccgcatgcactatcaggatgaggccgaccacttggacgtggtggttaaggccgatgggtccgaggaacagtccaaggccgagcccgcacccaagtccgagcccaaggccgcagccttcaagaagaccgagccggccaagcccgaagcccatgtcgttgtcgtggacggtgtgacccacaccgccagctccattctgaccggcgaagcgctcgacaacatgagcatgaccgccgagcgtgacgtgtgcaagctgtgccagaaccactgcaagctcaccatcaccacattctccgacggctcgcgcttcgtgaccggcaaccgctgcgaacgcggcggcgacgccaagaagaagcgttccgaccgcccgaacctgtacgactacaagtacaagcgttgcttcgcctaccgccgtttgaccgacaagaaggccactcgtggcgagatcggcattccgcgcgccctcaatatgtacgagaactacccgttctggttcacgctgctcaccacgctgggcttcaaggtgatgatctccggccgcagctcccacgagctgttcgagaccggcatcgaatccatcgcctccgaaaacatctgctatccggccaagctggtgcatggccatatcaagtggctgatcaacaagggcatcaagaccatcttctacccgtgcgtgagctacgaggagaacctcgtgcccaacacggacaatcattacaactgcccggttgtggccaactatccgctcgtcgtcggcgccaacgttcctgagctgcgtgaggacggcgtgcgctacatgcacccgtacttcaacctcgccaaccatgagctcatggttggccgcatcgtcgaagagtttgcgtgggccaacgtgacccgcgaagaggccgaaaccgcggtcaaggccgcctatgccgaagacaaggtcttcaagcacgacgtgcagcaggaaggtttgaccgcgctcgcctacatgaaggagcacaactgccgcggcatcgtgctcgccggccgcccctaccacatcgaccccgaaatcaaccacggcatccccgaaaccatctgctcgctcggcatggtggtgctctccgaggattccatctgcgaactgcagccgggggagaagctcaacctcaccgaattcctctcggaaggcgaagccgacccgcgctccaagaacgccgccggattccgccacgtgggagaccgcacagtcaccaagatgccgttgcgcgtcaccaaccagtgggcctaccactcccgtctgtacgcggccgcacacttcgtggcctcctacccgggcctcgaactcgtgcagctcaattccttcggctgtggccttgacgccatcaccaccgatcaggtggccgaaatcctggcagacaaggcggacgtgtacacgctgctgaagattgacgaggtctccaacctgggtgccgccaagattcgactgcgctcgctcaaggccgccgtcgaggaacgcgaagccaacaaggcccgcgaagccgccgcggccaaggccgtgcaaggccccaagtccaccggattccgcaagaccggctccaccgcgccaacccccggccgccagattctgcttgacagcaccatggccgccaacccgaagctcaccaaggccatgcgcgccgcctccaagcgtgccgccgaacgcgacctgcaggccgcagtcgccagcaagaacggcacttcggacggcaccaccggcgtgacgaacgccaagaacgccaagaagtccggccacaacaacgccaccatgtcccgatacgcgcatcgcgagaagttcgttaaggacatgaagaagaactatacgattgttggccctcagatgagcccgatccacatgtccttggtcgaagcggtgattcgttccggtgggtacaagttcgacatcctgaagcacgcgagccgtggcgatgtggaaaccggcctcaaatacgtgaacaacgacgcctgctacccggccatcatggtcgtcggccagctcatcgacgcgattctggaaggcgaatacgatcccgaccatgtagcgctcgccatcacccagaccggcggcatgtgccgtgcgaccaactacttcggcctgatccgcaaggctttggtcgatgccggctacccgcagattccggtcatcgccatttctacccagggcctcgaagacaaccccggcttcaaggccaccctgcccctgctgcaccgtgccatcaaggcgctgattctgggcgacttgctcatgaagtgcctctaccgcgtacgcccgtatgaggtggagaaaggttcggccaacaagctgtacgagctgtgggacaccatcgtgcgtgagaccatcgagcatcacggctattccaagaccgcagccaagacgccgagcatcaagaagggctatctgccgtataacgtgctggccaaggagatcgtgaagtccttcgacaatctgccgctgcgcgacatcccgcgcaaggtgcgtgtcggcgtggttggcgagattcttgtcaagtaccagccggacgcgaacaaccatgtggtcgacgtcatcgaatcccaggattgcgaggccgtggtgcccggcatcatggaattcatgaccacccgcccctacatcaccgactggaacgagaagaacctcggtatgggcggcaacaagacggtttacgccctgatgcgcaagggcctcgacctgtacaacgcgccgatcaaggccgcgctggccacatcgaacggcaagttcaagcaggacgagccgatgcccgaactggtcaagaaggctgctgaagtcacctccatcggcgtgcaggccggtgaaggctggctgctgacggccgagattctggaactcatcgaacagggttgcccgaacgtgatctgcgcgcagccgttcgcctgcctgcccaaccatgtgaccggccgcggcatgttcggcaagatccgccgcctgcatccggaagccaacatcgtctccatcgattacgatccgggtgcctccgaggcgaaccagctcaatcgtatcaagctgatgatcgccgccgccaagaaggctcacaacgccaagttcgccgaggccggcgagccgcagggcttcacctccgcggactgatttatgctctggctcgtccgcaattaaggacgagcttcgctcgcgacatgctggttcgcctatcggctcaccctcgcctacggacagtccactgggctgtccgctttacggctcggcctctgtgaggggagctgtcgcgcagcgactgaggggagtctctagagcgagaaaccgggccggagcctgctatcggtttttcgtatagcgtattacgggctttcgggcacgcgcaccggccggctcgaatacgatacaaagcatggttactccccgaatcagttacgcgcacctgctcgccaagccgaaccccaagcacgtcgaaagcctgctcaagttctttgagaatggacgctcccagcggggcgccggcggcttcggcgtggagatcgagcacctgcccgtgcacaacagcgacgacaccgccgtgacctactacgagccgaa

SEQ ID NO: 773 - DNA, 5888 bp, Unknown
  R14_18m  MAG No. k141_1883
atagtgctggtggaatgcggttgggtgcccatttcttttgtgctgttgttggtcgccctgtttatggcttgggcggtgctgccaagcgaagtggcgattgcccgtcaatgcgccagcaagcgggtcgaaccgttctggatgtggtattccgccgaactcatctgggtcgagactctgttcatattccttgccatcatggttgccatctcaggaatctgacatggccggtgaagcttaccggggctcatgcgcaacgaaccatttccaagcgggcacttgtttgatgacataattgctgttgcggtattcgcgctcgattccatcgccgacgatgatggttccttcatggagcttttgttcggccatgagttcccagagcgcgcgggtttctctctcgatggtccgattatcatccatgcgtgccgtgacctgatatagctcatattgttcatgttcgagtgcatcgcccatcacaaaatcaacttcatagccatgttccttggtatggcatgacgatatgccgtcgcgacgataacctgcggttcggcggcgtagttcgagataaacggcgttttccaatcgttggccatcatctctggcgcttgccatgcttgaggctgcggccagcccgggatctatggcgtatatttttgatgtggaagtggtgctctctttgagcgacatagagaagtctttcattcgaaacaccagataggcgtcttcaaaatattccaataaatctcccagtagcacacggctggtggctagtccggctgaacgcaattcgttttctatcctgcgaatagacaatggcttgccgttgctgccaagcaagcgtcgtgccaatgcggaggcaactcttggacgcgcgatgtcataacgttccactacatcgcgggatacgacacgctgcacatatgactggagcagggtcacacgttgaggcgttggcagtccctcgattgctgggaatccgccctcttccaggtaggagatcaatgcggccgacagcattaatcgttctttggtggaatatccagctgcttcgttccggctgagcaattctgattcggcgataccgcgcgcgcggacaaactcacggaatgagaaaggcaaaagctcgaagtccaatgctcggcctcgaaattcggtggaaatttcttttgagagcattttcgaggaagagccggtgacatagatcgttgcttttgtggtgtctacgatgcgacgtagccaagcgccccagttctgcatttcctgtaattcgtcaaaaaacaggtacaagccggtgtctaggctttcgggatgcatggagcaaaaggtttcgattacttcatcgcccacacttggagtgatgtcgccgagcctgtcatcttcaaaattgatatagcagatttggttccagctgacaccggatgtatgtagggcctctatctcttggaataggcggtagcttttcccgctgcggcgcatgcctacgatgaccttcaccagattgcctactctcggggtcagtggcttacctagatccaagtcgcgcggcacaatcgggtggaaatcttcgattctaaaatcgcgcagcttttcggcgatgatcggatttgccataatgtgcctttcaagaaaacggtaatgctaccttaccaatattgaggaaaactggtaaccttatcttaccaatttttagttttttggtaaagttacttagccggagttgtgttactgtgttgacgagttttgcgtctccgcaaagcgttggccttggtacaggactagacttaagtgctatgagagcgaagactgttaaggatcggcgtacgggggctcagacgctgaccatacataccacgcgaggcgagtcgttggatcttgggcaggcacaatggcttgctgaaggccattggtatatgctgccgttccggtttgaaagtaatggcgcggaaatcctcttctattacgacgtgactcattgcgagaccatgcatggcgtgttgaggtcggtagtgcctggcggccaatatgtgggcatactcgtggcggtattgtccgttatggagcaatgcgaggagcatcgcgtgccgctgtcgtacgtgcagtgggaccccaaaagcgtgtatatctccgcacaggggtatccgctgttcgtggtggtgccggcgctgggactggaacccgatcgcaacaccgccaccactttgctgcagacattggccgatgcacgccggacccggcttgaggatgccgttgtgcaaggctatcagcgtgcgctcgccgagttcctggggcgcaattcactggttaatgcagatgctctgcatgattttatggcgtatttgctgcccggcactgttcagccgcgtcaagcgcagtcagcgcagtcgactcatgaagataatggttcggagacgcaattcggcgcgaccgtagtgtctgacggcaccatggtcggtgccacgcgatttggcgccacagtattgagctccaagcctaaacttcagacgacgccgcaacaggccgcaatgccgacgacttccgcggcaccgtcaacgcatgcaacgccggcggctcctgcaatgccggcagcacacgcggcaccggcacagccgactcctgtaacgtcggcctcgcccgtgacacagccggctcctgcaatgccgattgccgtaaatcttccccgcaagcaggaaacgcagcccgctcgtgagaatctcgttcgcgaacaatatatccgtgaagattccgcccgcgatgtggcatccaatgtggcggctgccgctgccgcgggtgataccgctactgctgccgtggccgagactaacacgggtaacgctgctgccgccgctcacgttgctcacaccgtcaacaacgttgatgctgctcgcgttcccgccactagcaacgtcgttcgccctatcctccctgtcagcgccgtcagcacagcactgcgcgccgatgagaacgacagcgaaggcgagacgatgctgcgcctctacacggacaagtccagaggctttaccgtcacacgattgcgcgacggtaaagcaataacagtgcacgccacacgagccaccatcgggcgatcgaaaaccgcggacattcacatgggcggcaataccaacgtcagccgtatccatgcggtgattgacatgctggatgacggacgtttttgcatcaccgacaatcattcggccaacggcactgcggtaggtggccgcgaactggcaagcggcggatgcgaatatgcggcatctggcggcgatttcacgctggccgacgacacattcgtgatctctctcctacaatagaaggcagagaagaaccgaagcgatgacgctgatagcgggggagaagaactatgaaacgatgtgcacaatgcggcaatgcggttcctgacaatatgatgttctgcacgcggtgcggagccccggtaccggcggacgctacggtagtggcatcgcgcgggattccgcagccgggtgtgccgcagccgcagccgagcgtacctcggccgaatgcgcctcaaacgaatattccgcaaccgggcatttccagtccgaacggtccaatgcccggcggccaggtgccgggcagcccggtacccggagcgtatgccggtgccgccggtgccgttcctccggcaggaatcccgacctcgaacaatggcatgccaactggtgcaggcgtgcccaacaacggcaatggtgccggcaacaacggcaaaaagccccgtaaaatcgtgccaatcatcatagcgattattgtggtagtggcgctgatagccggcggcatcacgggctttatattctggcgtaacgcgcatcagaaggccgaggccaagccaacaactacctccagcaccaccaaatcgaaacctaagacaaagactaagacaacaaccaaagaccagcagaagaccaagtccgagcccgccaagccggcagccaccgaagtgacgatgaccgatttctcatgcgacggcaactccgccagtgactggaagtggactggcggcgcgatggtctcgaacgtcatccactgctgggatggggattcctcggtcgattcggattcgtcgtccaaatcctcaagtgattccctggacggcagcggcgagtatgccttcggcgtctggacgccggcgctggatgaatcgaaggaaatccacgtatccatgctcgaatcgggggagaaggagtattccgagccccaggtcgccgccacgtacggcgataatccggcggtattcgtgttctatgcggtaaaaaccaaggcagtgggcaccacgccggaaagcgtgcatctgttcgctcacgaggtcgatctcgataccggcgaactgtctgaccgcatcgacctgcgaaccgaggaagacaaccttatcgactatgagcagggttacgaatactcgttgctcgccgagtcccgcaacatggtggccatcaagaaaacgtggcatagcgatgaaaaatacaccgctaacaaggacgagcgctcagcgaccatcaaccacacgcaggtgatgggcgtaactcatgacagtgataccgccaaggtattgcagaccttccaagacaaaatcgtgcttaccactgattctggcgggtaccagtatgcgaaacaggtcaatgcctccgcgagcggcgtgagcttgtacgacgcatatatggtgcgagacaattcgtaccacctgtattcggtcgaagacaacaaggaaatcatgagtttcccgttgaattactgcgatacggactactcaagttgtgatttgagccgaatgcggtatctcggcaagaacatgtatgtgaccgatgattcgtatagcggcaagtttgtcatcgatagcacgaccggcaaacggcaatcgttggaagacgtgctgggactgagcaaggatgaggacgtcaaggccattgaccaattctccgacggcaccctctacgtgcagacggatggtaacggcaacgaaagcaaacgcgtgttcctgctgtcgtccgatctgaagcccacggaagtgttggatgggtcgcagtggggtcgtctgttgttgaccgacggcagtttcaagggcatcaactatctgaccaagaccatatacgtgaagaccacggatgagcagatcatcgttgatgcgcaaggcaagtccgtgggcaagtacacgcaattgccattgggtgatgattccacggtgtgcgaccatgccgctatggaatggatggcgtggagcccggaatccagcggagacgtgattgtgaccatcggtcaggccccgggcgaccccgcaccggatctgagcaacagttcgtcgcaaagcgagagtgattcggattcgtcggactcggagtcggactcgtcaagttcgtcgagctcatccagcgataacaagtcagactcgaagaagtaactactgcgttcagcggtcagtgaccgcccagcccggtataggcatagccgagcaaccgtcactgaccgcccgccaacggcaacaataaaccgcaggtaccgtacgggtacaagttgttctcacagcttgcttggtacgttacctgcggtttattgatatctgggggggggtatcgctggcctgtacagtccagaggtcactgctgttcggagaactggaagaactggtctccgatacgcaccgtggcaggcgcgctgagcttgagcggtgtgcccttggtgacttgggtctcctggccgtcggcgatgatgtaggtgccgttcaacgagccatagtcctcgatccacaacgcgccatcggtatcgatgctgatggcggcgtgattacgggacgtggtgcgggtcgggtcttcgatacgctcggccttggcaccctgcggcacatccatggatggcttgcggcccaacagtgtgctcttgtcgatcac

SEQ ID NO: 774 - DNA, 30242 bp, Unknown
  R14_18m  MAG No. k141_1897
gccggtcgccaaacggccggtcaccgtcgtcaaggacgggtccatagacttcaactgccgcgacgcaatatttggcgacttacaggcgtacgccgagttcggcgagcgattcgcgcgcctgcgacgcgttctcgaagaggatgctgtggatgccgacctcgttggcgccgacgatgttcttggcggtgtcgtcgaagaacacgcagcgctcggccgtgagaccgaagcgggtcaggaccagctcgtagatgtcggcgttcggcttgtgcatcttctccacgccggagaccacggtgccctgcagcagctgttcgaggcgcgggtacttctcgaaggccaggtggaaggtctcatgcgaccagttggtcagaccccatacgccgtagccgtgggccttcaaatccgccagcagttcgaccatgcccggcagcgtgcggggcagcgcgtccgcgtagtggccgatgtagaacttgaagatgtcggcgagttcctggccttgttcgcgtaccacatccgggtagatgtccgcgaaatcctcgccggcgtccatgcggtcctcgtagtggaagaagccgcaggggtcgtcgtcggcgcagatgcgttccacgatttcatcggggaatcggccttcaaggcatgcgcgggtgttccagtccagcagcacgccgcagaagtcgaaaatcacgtcggtgatgggggagttggccatgatggttccttgtgtgtttgggtcgttgggtggggtctgcgatttagtgtacggggtttgtgtataggtcggggtatgtggagtttgaggcttatgtttctctccctccgtctcggctttgccgagacacctccctcgtcagagggaggtcaacaaggttatgcgatgacgtcggcgatggcttcggggatggcgtggatcacgtcgccggccacgattgggtggccgagcgtcatgaagcgctggcgatgctcgcggccgatcagttccggctcctgccagccctgctgctcggattcggaggcgatcgccgccgccaggccatgcaggtaggcggccgaggccacggtctcgcccgtggtggccacgtcatcctgctgggcgagtagggcgccggtcagaccggccagtacgtcgcccgcgccggcggtgcccagccaggccggcgcactgcccgacgcatagacatggtcctcatccaccacgatggtcaccgcgcccttcagcaatacggtggcaccggtgagctcgtgggcgcgcttcgcgctggccaacgggttcagccgcacgtcgtcggcggtgtacggctcgtgcgaatcggcatgctccgcggtgctggcggtggtttcgaaccggttgagcagtttcgccatctcgccggcatgtggcgtgatcaccacctggccgggcacacgctccggcagcaggtcgagtgcgccggcatccaccacgattggcggcatgtcgtaggcgtccttgttctcatcctcgctgccgagcgcgtaatgcttgagcaatgcggcgatggtgtcccgctgcatatcgccgtcggagccctcgacgctagcctcgggcacgccggaccccacgacccaggactgcacatgtcccttgccgatcacggcttccggcagtgcggtgagcaccatgttctgcgcgcgctccgggcccagataccggaccatgccggtgttcgcgcgggcggcggcgctggtggtgagcacggcggcaccggggtagcgctgcgagccggtcaccagaccaaccacgccccgggaatatttggaatcctcgaaccgggggagacggaccgcgtcggacgcgaacgaattatccaccacttcgacgtccggatccttgtcgtcgatatcgaatccgaaatcgaacaactcgatacggccgcaggcgaacgtggcgggcggcagcaccgcgcacggcttcatcgcgccgaacgtgaccgtgaccgtggccggaatgtacgggccgggcagagaaccatcgttcacaccgacgccggatggcgtatccacagcaagtaccagcggaaaatcgcctgacgactcacggttcggcagggcgggctcatcgggagactcgccgtcgagaccaagggcggaggcgagcgcggcgggaatgccgcgtagcgagccttgaatgccgatgccggtcatcgcgtcgatgatcagatgcgatttcctggccacggcgatggcggtctgcaatcgctcgccggcctcaccggcggaaaacccggacgcgcaaccgggaatatcggctgccgggtcaagcaccagcaccttgccgccggcgcgcacgagcgcggcgaatccggcctcatgcagcgaccggcccacggcgatggcagtgacgttcgcgccctcctgggccagcgcggcggccgcgaacagaccatcgccaccattgtctccggccccggccagcagcacgatcgacgtgtcctccagcgccagatcctcgtcgtccagcataccggccgccatgtgggccgcggcctgggcggccatgcgcatcagcggcacgcctttgtccagcaggggtcgctccatggcccggaccgtatcggagtcataggcgctgtgcagcagcagttcgcgacgatcggcgtcttcggtgtattccatggcaacccctttcttgtgtttgttacttgcggcccgtgtttacaggccgtacacctcgtgggcgaacttttcgagcacggggatcgaacgcttgactttctcggtgtcgatgcagtaggccatgcggaagtatccgggcacgccgaagctgtcggacggcacgaggatcaggtcgtattccttggccttcatgcagaacgccacggcgtcgtcctctaacgccttggggaagatgtagaacgtgccgccggggcgcaccacgtcgaagccgatgccggtgagcgcatcgtagagcaggttcatgttcgtctcgtagacgttgaggtcggcggtctggtcgatgactttggctacgcccagctggatcgagctcggcgggcagttgtggccggtgccgcgcgagatttggcccatcatcggcacgagcaggtcggcgtcggtggctgcggggttcaccgcgacgtagccgatgcgttcgcccggcaggctcagcgacttcgaccacgagtagcaggtcagcgagttcgcatagaagctggccgggtagggctgggtggctccgtcgaacacgatttcgcggtaaggttcgtcgctgatcaggaagatgtcgtggccgtactcggcctgcttggcggtcaggatcgcggccagacgcttgagcgtgtccgccgaatacaccgcgccggacgggttgttcggggtgttgataagcacgacctgcacgttcgggttaagcgcagcctcgaatgcgtcgaagttgatttggaagttctcggtgtcggccggcacgatggtcagcttggcaccggtgcccttgacgtacggctggtattcggggaagtagggggcgaaggtgatgatctcgtcgcccggcttggtcaccgcacgcatcgcgtgggacagcgcgcccgccgcgcccgtggtcgggaagatgtggttgccggtgtatgccatgccgaaacgttcgttgaggttttcggtgatcgcgtccttgacggacgggatgccgagcgagggggagtagccgtggatggccgccggatcgccgttttcgtagaggtcgaccatggcgtcggtgaaggatttcggagccggcaccgagggattgccaaggctgtaatcgaacacgttctggtagccgatttcagcaccgcggctcgtggcgtactcgctcagcccgcgaatcacggacttgccgccaagcatggccttgtattcctcattgatcatggctgttctcctcgcatggttgtactggtatgcaccacgctactactatcgcggccggtttgcgccatttaccgcgccgtgcctaagtcggctgttctatttgttctattagtggagtttgaaccggcatatacccttgcaataaagccatttgtagggtctgaggctttccggggttgcttgtctcatagattttcggcctcttgatatttgcggttgatagctgtgatgtgtgtgggcgatggctgttgaggcatcatggggatctcttcgactgtccgccgtcgccatgccgccatgatgcctacagaaagtcgagttgcgtatttccgccaagcagggtggtgaccggtggggggcgatcggtggggggtgaccgacacccgctatagacagcaggcagccgcacacatcccaatatctgtgggacggcagacgagtcaatcgtttgtcgtccgcgccgtccctcaagagcgcgggatggcagacaagtcaaccgtttaacgtccgtagcgtcccacaccgacgactgtagaaaccgcggaataacgccgattctcgctgcagctccatgattatgcacaaccgttcatagcgagcgctgtgggacggcgggcggaaaacggccgaatccgcgtgccgtcccacacctcgtataatccgcgttttgggaaagcatcaccgtaaggctgacgcgcatccgcatccacagcaggagccttaccggccgtaatcccgcactcgattattttttctgacaggaaatcgaacccgaaacactaacccatgcccgccccaccgcaaacagcgaataaccaaaaaaatgcatgatctatccttggtgccgaataatgagagcctgactgtagtggctacgggtagctatatcggagaaggattcgatcagaagcgtttcgacacgcttctgcttgccgctccggtctcgtttgagggtactctctcgcaatatgtagggcgacttcatcgcgagaatgatggcaagaccgaggttcgtgtctatgattacatcgacgtgaccgtgcctttatccgctgtcatgtatcgaaaacggctgaaggcatacgcaaatcaaggatattcggtaaatcctgaccatactgagaaaatggacatgctcagtgcaaaggcggaagcgttgcgcgcttgcatgacggccgcgacgcagggcgaagatgctgcggatgcgttgctcgacacccggtctgacggattattcgaaggcggtatcgttacagccacgaattatgcagagatactccgcaaggatattgccggttgcgcacgttccctgattatctcggctgaatatgtatcacaacagggactcagcgcaattgacgatgaattgctccgactggccgacaggaaagcgctcatcgaagtttatgtccgtttgccggcgactgctgcggtggcaaccagaacacgaatagaacggaatattaatcggctgcgtgctattgggtgcattgtccggaccgtcgaatcgtgttccgattttgccataatcgatgacggattgatttggtttggaggcatccctttacttggcaatccaaggagtgacgactgtgcacttcgattcaaagatacgaaaatcggcgagaatctagcagatggactgaaacgacggtcgtcctgagtcaatattcagttaagataatcgcgcagtacgagggcgtgattgatgtgcgggtccttggcggcatagagcagggtcacgtcgggatgctccgcgcagatgtggcgcagattgtccacggcggcattggcgtcgagctcggcgatgtaacgcatgcggaattccgcgaatttggcggggtcatggccgaaccatttgcgcaggaggggagagggagcgacgtccttcagccacaggtccaacgccgcacgctctttcgtcatgccgcgaggccacaggcgatccaccagcacccgatacccatccgacgcagtcggctcttcatatatacgtttgattgcaatacccatacgccccatgattggcgtgtgcttgccggaagtcaaggggagacgcgatccatctacccgttcgatttctgggtgttctgtctaaggccttgtgctatgacagctagcgattcagcagcttttggtgatatcgtccaaccggaccgccttgcccctgtcgaaggtgttcatagtgagatcgacgggtttggtcttgatgaacgctgacagcgcggtgtgcggcgggttgtcgatcaagtgggtgatgggggcaatcgcctcctcgacgctgacgcccacaatggcgtaaatggcacgcgccagcagcttcatcagtggcgaatcgaaactgttcaatgcctcattgctgcgtacggcccaagggttgaacaacacatagtggatgcggcctccggtctgctgttggttttccgcgaagagcactcccagcagatcgttcagacgactcgtacagatagtcgcgcaatgctagaacgtgattgatgtgcacccttcattgacggtctctcaattgatctcctgcgattcatgccgtataaggaagttctcgaccaaggcgatcatcgtgtctttctccgcaggtgcggacagtgcaatcatcagcgtcatcgccgccaaggcattaccctccacaagcaggggagtcatcgtcgcccagtatactgttgccgttcaggaaatacacgaacagtgcggcggcacaacgtttattgccgtcggagaacgggtgatccttgacaacttgatacagcaggttcgcggctttctcccgggtggaacggtacagttcttcgcctccgaacgtctggcagagtcctgcgacgattccttggaacgaaccgttgcgttccctcccgaacagatcggattgcgtgtagaacggcatcgaccggatgaacagcatcgcgtcctcataggtcaagacccactgggactcgtcgcccttgggtatagggacattgcctgtgtcatagtcgttaagcagcacaagactcggcaaatatcgttccaagatctctgcggtgccagcaatttccggttcggtggacctcgatagcaccttgacgacggcgtgaagtgcgtcaagccgcttgtgattgatggtgtaaccatcaacgagatgctgcttcagaactgagttggcccatcgccggaaattagatgccttccttggatttgacgcggtatccgaccgacaggatcatatccaagttgtaatgctcgacttggtatgtcttaccgtcagatgcagttgtcgcaaattttgcgacaactgaaaatccattgagctcttccctcaatgcattgccgatatgcttgccgattgttttgatatcgcggccaaacagcaatgccaattgctgtctgttaagccacaccgtgtcctcgtccaccttcacatcgaggtgcacggtgtggtccgcgctctcgtactgccggtcgagaaccgggtggcaagggcggccaccaccagtatagtcaccacaccggcgcacaggatgccggcgatggaggccacatccgaagcgatgtccgcacctgcggccggcagcagtgtgccggaagcgtagtcgaagcgcgcgatgtacaggatgtagagagcgaccgtcaccaccgtctgcaatgccacgtacacggcgtagataccaaacagggcaaggattttcgcattgatgatcgtggcgcggtccagatccttgtacaggaacatgcggccggaggccacgggcgtatagatggcaccagccaccagataggccatgaccaccatcggcagcatcagcatgttctgtacgacgaactcgccagcgaggaaatccagcacactcaccgaaccggtctttccgctgactttcatgaaatcggagttgaacaggttcacggccggcagaatcagtatgaatgacggcggccggatccaaagctgcgaccgccgcacgtttcgcgacaccgagcggccggccaagctcgataaccgtgatccgcttctgttcgccggcgaattcgtccgcaagccggccgcctttgatgaacaggaatcgcccgcacaactcctgcaattcgttgagctgatggctggagatgagcatggcgatgctgcggtcgcggtacggccaaagtcccacaagttcaagcaccgggcggattgggaggtgcgggcggcgggtcggacgatcacagtgtgacccgaatacgttcatgaatcatcgaatcacacggcgaggcggaccgcaagtattcgagagtcgccagttcggtcgatttcaatgacaatggtgtggacgattacgcggatatcgtggcgggtgcgcgcaaggacgccgaaaaccatccggcttacgattccggctactatcagggcggctatccgccggccgatcgcggggcgtgcaccgtacgtgattcacaacatggcgcagcggcagcgcgaaaacgactacttcgccttcaagaagcacatgacggtcaccgggcactaccgtttcgacgcttcgaaagtgctgtagagcgtactcagggcttggcggtgacggtcggagcggcgtcggcattgccggctttggctccggctgcatcagctgaatcggtgccggccgcactggcgttagcactatcgtcagcgttggcaccgccggctttggccttggcatcagccgcgctcccgccatcgatcaccagtcgcagataatcgcagtcggcggacttgcggcgcggcacgaaccgactgatgatggagtttttcttgccgcggttcttcacgtacaggaagccgaacacggagaacacgaccgcgccgatgaagttgacgataagatcctccatcgtgtcgatcagaccgatgtcgaggtagccgccgaggcccaagtcttggccattgaccgtgacctgggtgatgtcgttgatgcgaatcgcatggttggtgtgcgtggggtcgagcatcaccgagctgatggaatgcacgatggcgtctttctgcatgtcgaatccgaacaactggtccatgccgaattcgaagaactcccagatcacgccgatggtcatggagaagcagaaggagacgatcgccagatacaggggcgaaagctcgaacttcacccggtcggaccggttgagcaggtcgaccagcgagaagccgatcgccgcggcgaggaagccgttcatcgtgtgcaacaccgtgtcccagaacgggaagatctcatagaacgaactgatctcgccaagaatctcggacgagaacacgaacaccagcacgatgacttccagcaccgaaggcagctcgatgcggaactgcacctggatgaacgccggcgccaacagcaacagcaacgtcaggatgcacaggaacacattttcgtagtcgccgttaaagaactggagtattgccatggcgagcaccagcatgcgcagcaccacatagaccgcgaatgagcttttgtgttcgcggatttccatgtctacggctcggctcatggtcttccagcgtacgcgccaggacggtttgcgttgtgcgtcgtgctgttgtgaccgtttccgggtcattcttgcctctttctcgcattgttctcgcgccagtctatccgaacctgcttacaggcaatcggcaagaacgggcgatagtctggccgcatgaaccgaatggaaaccgatgctgcctcgattgtggaccgcacgaatcatgcggcgatgctcgataggacattgtgccggcggcacgccaccgcgtgtgctgattgcagtgctcgccgtgctgctgtaccgccgtatgggcatgattacaccgctgatcgtggctcatggcatgtatgacgtctccgccgccatgaccaatctgaccggaatcgccggctcctcatggtcactggtcgtagggctggcaatcatggccatgccggtggtttgggctatcgtgaggtgtgcgagataggctttgtaccggttggcagcaaatcaaaccagcgagacaacggaatgaacgaagcgaaaggaacggtatctgatgactccgattgaattgtcaacccgacgccgggttacgggactgacttcggatgagttcgccaggctgttcgtctctttgcaacgcgatgtggacggcgaagccgcgcattggagcgccacggacgtcgaatcctgggagctggtcggcccgccggtgaccgccgaacagcatcttatcgacacgttcgccgcggccaacgaattcgtggccacgcttgcggaccgtctgtaccacacgatcatgccagtcacggaagaatcggtcatcaccgcatacgctgatgacctcacattctgggcatcgcatccggaccttggcggagtgccgtgcgcattatggaacatcgccgcactgcaggcggccgaatgggcccgcaaggaaaccggcatcgcctgtgaactagacgtgcgcgaaccgctggtgtgacagctgagctcaaacatgggcgtaggtaacggcatggtttgaggactatggtgttgcgttaccggtcggaaaggatatgatggtggggcgtcatagcaaaaaagcgcgtggacagtcgaggagacatgcgcgaaagccctccgtttggagtgaaattcgcggctatctgctgacggtgatcgcggtgatgctggtcgtgttgctgggacgcaccttcgtgttcaacgtctatgtgattccatcccgtagcatggaagacacgttgcaaatcggcgaccgcgtatttgcctcgcgattgactccgagactctttgcactgcaccgtggcgacatcatcgtgttcaaagatcccgcagactggatggagggggagcagcttcccaccaatctgatgtcgataatcgacagcaatcgttacctaatcaaacgtgtcatcggtctgcccggcgataccgtcgcctgcaagggatccggggagcccatcacggtcaacggcaaacccattgatgaaagcgcttatcttaagtccggcgtgaatccaagcgacagtcctttttccgtaaccgttactgacggcaacgtgttcgtgcttggtgataatcgctccaattccagagattctcgataccatcttgacgacggcaacaatgggctagtgccatacgacgatatccaaggtgtggcgttgttccgcttctggccatttacgagaatcggcttgctcaattgagtttggcgtgaatacgcaagttgacatgtgtcgcacggcccggtgcatcctgcagtcggaccgtttccggaaccctccccccgaaatctgacgacccccccctgtctcacagctatcgtacagctccgatacgggaaacgtgcgggtgattccataacgactacgtatttcaggaagtgacgtgtatcacattatggtcatgtgttcagtgccgcagataggcgaagtttattcatgagccgaatagggccggtgaagcgggctctcactgcgttcataatacggcatatcgtgaacggcgttatcatcacagtcaggccgaattaagggaggctcggtcatggtcgccgcatccacggcattcagcccgtcaagcacgatgacggccagtttggtggaatcgactggcctgcccagtgccgctattcctgtgcacgaggatggtaacaacggcaacggcgacagtagtgccgatggcagcggcgacgacggcggcatggtcagatcgctgagcctgtggaactacttcaccatgggattcggcgcaatcatcggcaccgtatgggtgctgctggtcggtgactggatgatcgtcggcggtggcccggtcgaggcgatgatcgccttcgtgctgggcgccgtgtttctgctgccgatcggctcgacgtccggcgcggttaccatggtcgggtcgtttctgcccggagtgctggtgatgacgccgctcttctacaccggtttcgacacgattccgcagagtgccgaagaggcaagcgaaggccttgactggaagaagttcggtatggtcatctcagcttcgctgctggccgccggcttaatcatcattggcctgcaggtgctgccgttctccccggccgcgctcaaacccacatcatgggcaatcgtggcggtgtggatttgctgggtctggcattgcgttggatcagtgcacgttcacggcgtgaatagcggtgcgccggtaggtcgcgagccgttcagtcgcgcgcgacccaaagcgtatcgaggtcgtcggcctcggtcgcctttttgcgcttgcgtacccactgttgcaggaaatacgccccatagcaggccacgatgaacacgagctcggccacgagcgcgaaccgttgctccacgtcgaaaaccaccaatacgaacgatgcggtgcacaggatgaacgccgcccaagacacgtacggatagccgggcgtgcggtatttgagttcgctggtggaatggccggactccagccaacggcgacggaacacgatctggcagtaggcgatggcgatccacaccaccacggcggacaggccggaaagcgccaccagcaccaggtacacagtcgaggcggcgatcacggaagacaggagcgccagcaggccaccggccatcgcggcgcacaaggcgagcatcggcacgccgcgacggttcgttttggcgaaccagcgcggaatcatgccttcgttgcccatcgaccacaccatgcgcgtggaggcgtacaggccggaattcgaggcggaaagcacggccgtcagcaccacgaaattcatgatgtcgcccgcataggggatgccgatgctgttgaagacgagcacgaacgggctttcgcccacgccggcctggcgccacgggatcagcgcgcacatcacggtgatcgagccgatgaagaacagcgccagacgccacagggtggtgtggatggctttcggcacggcggtttgtgggtccctcgtctcaccggcggtcacgccgatgagttcggtgccggagaacgcgaagttgacggtcagaatcgtggcgaacaccggcatgaagccgttggggaagacgccgtccttgatgagattgccgaacatcggggcatgttggtagccggcgaccgggatgacgccgaagatggcgagcgatccgatgacgatgaacgcgcagatggcgaacaccttgatggaggcgaaccagaactccgcctcggcgaagaaacgcaccgacaaggcgttcagggtgaagatgagtgtgatgcacgccgcgctccacgcccatgtgggactgttcgggaaccagcgctgcatgagcagcccggcggcggtgaactcggatccgagcgccaccgtccatgtgagccagtactggatcgcgatcacgaagccggtgccagggccgatgaacttctcggcatacacatggaaggagccggtcaccggcatggccacggacagttcgccgagcgtaagcatgaccagatagacgatgagcgcgccgatgctgtatgccaggatcgtgccgatggggcccgcctgctggatggtgtatccggagctcaggaacaggccggtgccgatcacgccgcccaacgagatcatctgcaggtggcgggattccatgccgcgcttcaggttggtatgcagggcgtgctcgtctttgccatcatgtgatgactcggactggctggtttgcgctggttggttcatctgttccgaatggcttcgacggccatccgtctgaatctgcggttcctgttgcgaggacggcgactgtgccgccgtgtcggtgtcgggctgactcatgtttctctctttgccatgcgtgcgttccataggcgtcgtcgtgacggcccggaatagtatacccgcaccgaggatatagctgcgctgcatgatgctgagtcaaaatcagcttcaaggggccgatttggcgtttgccggaggtctacttccgtttcaaggggctggtcaactggcggaacgcagatagaaatggcattgttctatcgctattccgccgtttttaaccagtggctactttggcatcagccccttgaaacggaagtagatgttccgcaaagtcaaaatcagccccttgaaacggagataggcactcgcagcggctacttcaccttctggatacgtagcacgaacacggcagcgcacacggtcatgacgatggagatggcgaacgccggcgtgtaggtgccggtcgtggtcttgaccacggaggtgatggtgggaccgactgcttggccgagcgtggtggccaagctgaggatgccgaggtccttgtcggcctcttccttgttcggcaacacgtcgacgttgagtgcctggtcgatggccgagtacacgccatagccgaagccggcgatgcccgcgtacaggtacatgcccgtgacactcggcatgatccacggggtgcggcgtcccatcttggaacgcgtgtggtcggagaggttgccgaacacgaggttggaaaccaggcccacgatggcggtgaccgagttcaacgtgccgactgccgcatccgggttagcgacgccgatgtccttgaacagctggggagcagcacggtggccaccacgtacaggccgctgctccacagaagaccgaaagccagaaacccgacagttaatcgaatgttgtttgttttgatgtgtccttggacatgtctgtcagcctcctatggtgattgcgtgccgttgtatggcgattgtagaccggctcggattggcggttttccgggctttttgagtgtgtggtagcggccgtatgcgccgttgcaatattgatcttgtgaacggttaatgtactcggggctcaaaatatattccagcgtgcggcgcgtttcttgtttaaggaaagtaattcgaaaaaagcagccgatgcatggccgtatcaggtgccgtatggcgagcggcgtatggaaaaagtgtctccgtcgggttgtgatgagcatctatgagattgacgtatgtcgtcaggggcagcaattggcatgtgcgggtggatttgcggctcaaagatggggaaacgatatgagactggcgatggcgcagatggcgatgaccgacaatatcgacgaaaacgccgatagggccttggcctactacgatcaggccggcgaggccggtgccgatctgttgttcttccctgagatacagttctccccgttcttcccccagtatgagaaccgcgatgcgtcgcgatatctcatggacctgaccgaccgtcacgtcgccgcattacagaacaaggccctgcaacacggcatgtacgtttcaccgaacctgtacctcaaagcccaggacggccacaactacgacgcttcgctatggatcaacgaacaaggccatatcagcggcatctcgaccatggtgcacatcctgcaagcagaacgcttctatgaatgcgactattatgcgccctcccgagacggattccacgtgttcgagaccccgttcggcaagatcggcatcgtcatctgcttcgaccgtcacgtgccggaaagcatccgtacatgcgcattgcgcggtgccgatctggtcatcatcccgactgcgaacatcagcgccgaaccattggagatgttcctgtgggagattcgcgtccaggtcatgcagaaccaggtggccatcgccatgtgcaaccgggtcggcaaggagggcgatgtggcgttcgccggccaatcagtggtggtggacccgtacggcaacgtcgtcagcgagactgatgaccatgaacagttgattatcaccgacatcgatctcacacaaaccgcagcagcgcgcaaacagcgaccattcctgaaactgcgccggcccgaatggtacgcctgacaagaacgaaccaacgtcagcccggaatcttctcgacgatggtgttcaaggtgtcgaaagtctcatcgatttggtccactacctgcttgccctggttgaccatttcggtgatctgttctgtgtggggttgcggcagcgcataaatcgacgtcttgacgcgcttcaagaccacgccggcgtcggacagatcctgcttgatggaggcgattttgggaatggacagcgtgccgtcggagaagttcatgccggacagcagctcttcgatattgaagtccaccaacgtgccctgcgcggcactgtcgattttgggcagggcgttggtcgcggcgtcggcggccgcgcccagcatgccgcgcaccgctttcacgtccgaaccgtaatatggcacgtattcggcggcctgccatagcgcgccctgggtttcgtcgtgcgccgtgacgatgtgactgccagcgctgtccatctgctcaagcgcctgcttgaagtcgccctgcccgacggattgctgtgcttcagccgcatattcgcccgcctgctgcgcctcgccgatcacccgttgtaccgactgccagaatagccagccggaaatgcccgacgccagcagaatagcgaccagtattgcaataacaacagtgccgatatgtttgcgcttagccataggaccaatgtacctgccactctgaccagtattatttacggattagcatcgtggcctgggcctcattctggctcatcggtatgttattggcgatgcgtagcggtggttatgcaagtgtcttttgattgatatcggcgcatgacaggtgaataacgtgtagcgggaaagcacgtctatggtcatattggcgttctcggcacagcaataaccgcggtattttttaaggtttgccaattcttccatctggtatgtgccgaacatggtgctgtcatgcgattgcttgacggcatattgcctggcttgaacgatacatcccattatcgcttgcggttgacgttgcgtaaacgtctatcctgacggcaacgccgcgaaacacgcacggcgggtagaggataatcggcttcaagggggatgatcgatcatgaacgagaacgacaacacggcgaacgccgtcaacggttccggcgcgttcgatgtggagggcaatccgctggatacgggccggttgtggcccattgatcaggcggcattgatcagcggcgtgacgacgcgcacgttgcgctactgcgacgagaccggtctggtcaagaccgcccgcacccgggcggcacagaatcaaaccgcgaccgtgatgaacgccatgccgctgtccggctcgttcggggccattcgctccgcgctggtcggcgatccgcgtttcgccgacccgtgtggtgaggcgctctacggcagcaaggcatgcgccgacttcgtcaacgaagccaagaacatccacgcacggcaaatcgccgaacggttcgcggcggaacaggatgtacggaatcagccgaaatgacagggcgtccggctccgattgcgcgacgaaccctgcgaccacgtcaccggcttaatcatccaagctgcgcgaagcggcgcaaaagatgatgagtcggcataagcggcgtagggttcagtctgcgtgttttgcacagtgagttacaggtcctgaacgttcatacgggccagctcggcgcgacgattgatcttgtcacgctgatacaagtagatgccggccagcacgatggtggatacgttgttggacaggaacgcgatgaatgcggaaagcacgacgttccacatgttgccatacgcaccgatgtccgccctggcgaagacggtaatcgccgccacaagcgacagcagcaatgtgatggcgggcaataccagaccgggccacttgctgtccatcttcgaaagcctgatctgcaatatgatgaagccgatgcagatggcgatgagaaacacgaaaaacactacggcaaatcttgtggcgccaatcatgattactctccttgcttgagctgcttgcgatattcgctgatgaggattttggcggtgtcgaagtcgagcttgtcgtcgaccgcgagccgtttgatgagcgcgatatacggctcgttctcgatctgctcgcccaacttgattttctggatgagccggtcgagccgaagccgaacggtggggtaggagacgtcgtactgcgcggcgacctccttcatggagcctgatgcgagcagaaaccgtttgatgaacgtcatatcctcgtcatcgaggttcgacatccacggcgggatcatcgtcgtatccatacctgcctccttcaattcacggcgggtttaataaaattaagtataccataaataatattaaaatcaaatagatatctgtttaaagtttttcgtagattagtttgaggtcgtgatgtaagaatgcgtacgcggacgcgaaggaccggcacatgtcggcacgcatgtagaagcatcggtcaatcggatatgcatcgacagcaccctaaggcattgacggatagccgattcctgtcatgcgatcgcttgacagcatgttgtctgattgactctttgagtgccataattgagatggcatgcgtacgcgtcggactttatggaatgcggggacgatatggttgcggacgatgaggtgcgggcctcccatggtgggcgtcggaatcaaggtctgctgtggtttttcggcgcttccgccacattgggcgtggccgccgtcacggccatcacgtgcgccgtcatccggtacggctggaatgacggggagttctggaagctggtggtgccggcggccgtggcgttggtggcggccatcgtgtgggcggcgctcggcttcatgcgtcgcgccgggcggacgcctgacgttccggccgacgcgaacgataccagcccggccgaatccaggttcgattcggcggccgcccagattctggcgatcgtcgccatcaacgtgtggggcgtcatgttcatcgtcttcgatacgttccagattgacccgtggcggtacgtgacatgggtcgtgcccgtgatgttcctgctttatctggcggtcttgggcatcggcagggcttgtttccgcaaacgacagaaggatattcgcttcccggaggaaccaagtatgacgagcagccgtccatcatacttggcataggcgggcagttggacgatgccgggcaggtcctcgttgtcgctggtctggttgagggcatattgggtgccggtcatggaacgctactggaatctgtcaccctagggtgtcactttccgtgtttacctcgacctgccatgcccctggcgcgaaggttgagaaaaacggcgtcaactttcacgacagggggctacctcatgacttggcaaaatgccggcacaccgattcaggcgctcggactggtgaaacggacagggttcgatgctcgaaccgcctcccgacccgcaaacacgcagactgttctcaataatgtttcgttggatattgatggagcgggcttgacggcgatcgtcggtccgtccggcgcaggcaagacctcgctgctgtatgtgctgtccggattggacaggcccgattccgggcgggtgaccatcggcggtaccgacgtctacgcactgaatgaggaacggcgttcgcggttcattcgcgggcatatcggtttcgtgttccagcaatacaatctcgtgccgtatctgacggtcgaggagaacgtgatgttgccgctctcgctcgcccatcgcaaggccgactacgtgcaggtcacgcagctgctgtcccggttcggtcttcgccagagggcgaagacgacggtaagcgccctgtccggtggcgaacagcagcgcgtcgccctgtgccgtgcgctgctcatgcgtccggcggtggtgttcgccgacgagccgaccggcgcgctcgacaccgcgaacagcgagcttgtgctgcaggtgctgcgcgagctggcggatgcgggctccagcgtggtcatggtcacgcatgacacggatgccgccgctttggccgaccacgtgatcttcctgcgcgacggtcaggtcacccacatcgctggcagactcaccgccgagcagattgccgatggcatacgccgcactttcgtaccggccgggtcgccgccgttggttgcggcggcgcggtctgtcggcccgatgatggtgaacgcccagcctatccaatccgtccaaccgggccgaccggtccagcgcgtggcgtatccgcagcagcggaaggaggctcatcgtggctaggtatgtgctgcgtgtgttccgcgacaatgtcacgggatgggtacccacgattctggtggtcgcagtggtgaccacgctggtgggcatatgcatgaaccaattcgtgtggacctcgtctccgtcgttcacattggccgcgcggcaggcgggtcttgatccggccgagttcggcatggtgtcggtcacgatctatgtggtggtgtcattactcgcgttcttctcgttgacggtggtcggctcggccacggtcaaccgtattcacagcacgttcgcgcaatggcggcttatgggcgccagcccgagtcaggtgcttgccagcatgtggatgctcgtgggtgtggcgagcctgttcggttccctgatcggctctctggctgcagtgccggccagcctgctggcggttcccgagttcaacgccatggctgcggaaagcttcgccgatggattcggctcgttcgcacctcctgcgttcacgccgtcgatggccgcgtggctcggatccctgctgttgggtgtggccacgtgcatgttgggcgcgtccatcccctcgctgcgcgcagcgaagatccgtcccatcgaggtgattcgcggcacgggagccatcgggatacggcacggttggcggtcttgggcgcactgggcacttggtttgattgtcatggcggcggcgctggcattggcgttctccggcatgggcacgccacgggcgctcgcgttcggccaggaggcggggcagacattcaacagcgcgctgtgggccggcatcatcgcctcgttcggcatgtacatccttgtcagcatgctgattccgattctgttgggcatcggacgtgtcgtgtgtcgcctgtgcgggtccgcgaccggcgtgctcgccgcccgttccgccgaggcgaaggccgccagcaacacgaacacgattgccccgctcgcccttgccatgggactgtcggtcaccctgctgacctgcgcgcgatcctatggccggatactcgccttgggcggccatccgaagagcctgaactacgcggactcgctgctgctcataacgatgctgtgcatcgtgtccctggccaccagcatggcggtcatcgccctgtcgaaccgcagcatggtcgccgaccaggcattgctgcgcagcatcggcctgtccccacgtcgtgtgatccgcatgtatctctggcagagcctgcagctggccgccggcgcggtcattctctcgctcatcccggtcgccgtcagcgcaagcgttttcgccgcaagatccgcggcgctcgtcggcatccccgtggccgaaatcccatggccgggcgtaatcggcatgggcacggcctgctggctggcattgttcctcatccagttcacgcagattcgccccgcgctacaccgcagcgtggccgacacgatacgcacatgctgacatgcacgcaacatcatacaaaaagagccacaatgggagccatgaaaccgcaatccgcgcaggccaataaggtcacggtcctggccgtgccactggtcatcgccgtggtcgaatgtgcagcgatgctgtgggagcatgcgatcggagcgccggccgacaccatgtatacgtttgccaaagatccgctgggattggctctgctgctggcgatgaccatagccagcagtgcgatactgcttgtccgttactggctgccagccgttgccttggcgcttgaagcggtattgttaatagttgcctcgtactggcggttggactcaatcgtgatgattcagacgctcgtcgcctgctatgcgttcgcccggacagcgaggggacgcgggctgtgcgttggaggcatcggcatgatgctgtcgatgaccgcgtcggccatcatggtgcatccggacgttctcgcgaccgaatgggtgagtcgagtggtaacgttggcagccgtgggaggcggcgcgcttgcagtacgtggcaggcaacaggccaaggaagccgaacacaaagctgccgaggaatgccgtcgggcagccgagctggccttccaacgcgatgccgcaatacgccgttcgcgcatagccggtcaactacacgacagtgtgggccaggatctgaccgtaatcatcgcactgtctgagggtctggccggcaaaaccgatgacccacgcgtggaggatgcgctgcacggcatcaacgaaatcgcacgagagagtctgggcgacacgcgcaaagccgtccgcgcactgaccgagttcgatggagcggcgaacggtgacgatacgcacacccaagaatcagaccagcattcatgggatgacattcggccgattctcgcgcacgcacgccggctgggcatcgtcacggtgttcaccgagactggtacgcgcgccgatgacgaagctcaggctgatttgtgtttcgatgtgactcgcgaagccatcaccaacgccatacgtcacggacagaacgtggtgcatatcagcatcgcctggaaccacagcgagaacggcaccgtcgccgtgattatccgcaatgacggcagtcccgcgcgcaaggacgcgcgcaaggatgacggtactgggctcgtccgtctattccaccgcgtcgaatcggcaagcggcatcttcgaatacggtccaaacgaagacggcgaatgggtcgtcgaggcgaccatcccgtccaacggagtgaacgaaaaggaccacaccgcatgattcgtataatgctcgtagacgaccagcgtttcgcgcgacttggcttccaactcatgcttgacgatgcttccgacatcgtcgtcactgcccagtccgctgacggccgatccgccatcgagacgctcgaacagctcgccgttcagcatcgtccattgccgaatgtaatcctcatggatgtgcggatgcccggtatggacggcatcgaagccactcgccgcatcaccagacgctggcccaccatcagcattctcatccttaccacgtacgacgaggacgattacgcctttggcggtctcgacgccggagccagcggcttcctgctcaaggacgtcaccaagcacaacctcatcgacgcggttcacgccatcgccaacggtgacgcaatactcaccccacgaatcaccagacaagtgcttgaacgaggcgttccgcatcccaccagcagccagcgccagcaagaaatgcgcaaagctttcgacgcactcacccctcgccagcgtgaaatctgcgcactcatctccgaagggctcatcaacgaggaaatcgccaatcaactcaccgtcgaacctgcctccgtcaaacgtgccgtgacccgtatcctcgcaactttgggcctgcgcaatcgcactcaaatcgccatcggctggttcaaagcaggcatgtagacctgctatttgctcagcagctcattcaagcggattgttgttacgaatgcgactaccgcacgcccccccccaagacggattccatgttcgacaccccattcggcaaggtgggcttggcggattttagtggtggttgcaacacctgtgtgttttgccgctcttgatggcggtcttggattggtgcgatcgtatcatgctgtgttgatgagttcgagtattttctcggatggtttcctgtagccgagtgttttgcggggccggtcgttgagttcctcggcgaccgcgtcgaggtagtcctcggggtatgcgctcaggtcggtgcccttggggaagtattggcgcaggagcccgttggtgttctcgttggtgccgcgctgccagggtgaatgcgggtcgcggaaatacacctgcatgtccagcgtggtcgagatgcgtttgtgcagggtgagctcgcttccctggtcccaggtcagcgagttcctcaggagcttgggcaggtattgcattttccggatgacggcctgccggacgtgtttggcgtcgtgcccgtcgggcaggtgcaggaggatcgtgaaccgtgtcgagcgttccacgagcgtgccgatcgcgcttttgttggccgcgctgcagatcaggtcgccttcccaatgaccgggtatcgcccggtcctcgacttcggcgggccgctcgctgatcatgatcatgggctcgcggaaacgggcctgcgcgaacccgcctgcccgtgcggccggcgttgggcgcgcccgctcctcagggccttgatgacgtcctttttcagttcgcctttggcctggacgtagatggcctggtagatcgtctccgcgcacacatgcatagcatcattatccgggaaatcggcgcgcaggtgccccgcgatctgctcgggactccaatgcgcccgcaatcctgcacgaatgtatgcgagcaggccgggcaccgtatggatcttcgcgggcttgggtcgtctgggccgtccgcgctcatctgctggggccggtacggctcgtacatgccggtcgcgggattcgtgttgcgcaccagctcgcggctggcggtcgacgcgagacgattgagcgtgcgcgcgatcccgcgcacgctcatgccggccttccgccagtcggcgatgctgatgcgctcgtcctggctcagatacctcgaactgatcttttggggaatgtccacggtggaacgataccagtccaccgatggcttctcgttcctgccgttcgatcgtgtccttccgttgcgccacaccttgccggtgcgtttggacacgcccaccgcccgcgcggcctgcgtgaagttcatgcccgcctccagcagctcggcgtagcggcgccgccgcgccgcgcacatctcgccacgcgtcgcgtactccacgccctcgaacacccacctgtccacctggccctcccatcagtcagccaggcgttgcgacgatcactggaacccgcccttcgccatttttttttggggggggggagaccggtggcggcaagtgtgcgatgggagtcggatgcatcgtccttgcggatgatgcgcaggttcattcctttggccgatggatagtttcggcaaatcgagggagcatggagcaaccgtcatgcgattgcctgacatgatgttacgtttgtggccgctgaagggtgaaatggcggcgacattgcaacgcgcgggtctgggcaaggcatcctacctttgccttcaggcccgcctttcgtgaagggtgattatgccagttatatcggctacgaatctctcgatcgggtacaagggttccccaatcgtcagcaacattaacctgcggttgagcacgggtaggatcatctgtctgcttggggcaaacggcgcgggcaaaaccacgttgatgaagacgctactcggacggataaagcccgtgagcggagaggtcacgtacacagggacgaatatcaatgagatgtccgcggcgatagaccatcccagtttctttccttacctgagtggtagagagaacgtcgaggtggtctccgcgttctggggtctggatgtggacccggaggcggcgttggacggtgtgggcatcaatcgcgcggtgtatgggcggaaggcgaaggactactcgacgggcatgaaagagcgtctggagctgtgcctcgcccttgtgccgcatccgaggttcctgttcctcgacgagccgcagaacggtctggaccccgatggcatagcctccttgtccgaaacgcttcgcgcctaccgggacaaggggaactgcgtcgtcatctccacgcatctgcttcatgagatccagggcgtcccggacgagtgcatcatgattcgtcacggccgggccgtgcaggtcacggatctgaccggggtgaacctcgcggatctgtatcaggggaggtagggtcttgaacgccgtttcccctgttcgcgcgttggtcgcctactactggaacacgtggtatttcctcgccgcggtgtttggggccgtctcgtcccttctgctgggtgcgtggatctcaagcgcggcgaacggaaccccgataaccggagggtattgcgtctatttcaccgccacccagccgttgatctgtctttcgctgctcttcgcatgcgatgccagggtcgcgaaggcgcactacggtggcctgccgcgccacgtgtattccgcgtggacgccatgctcgctcagggccgtgttccgggccctgatcctgacctccgcgaacctgattggcgtactgtgcttcgacgccatcatggtcctgacgggtaccggaatgcacccgcatctggcagctgtcctgtgcttcgtcgtgctgcagagccttgcgacctccctgatctactcgatcgtcgagatcgccgccgatcccagaaccgccggaatcgtctcggccatcctttgctatgcatggattctcctgccgggcgaccttcccgactatgcgacgccctacgtcgcgaacgccctacggaccgtcgggctgaacctgaacggcaccgtgatgtcgccggcggaagcggcgagtcgagcgtccgtcggccccgtgatggtcgtcgtcccgatcgtggtgcttttggttgcctatgtgctgttgagccggttccgtcgcgaaggagtggagaggaaatgaagtccctattgcgtattgagcgtgtggcggtgatccgctggtcgacgctcgccttcgtggccgtgctgctgtttccgttgttctttttgcgttacgggaacacgggtgcggtggtgcagtcggcgatggtgatggcgcttcccgtaaccgcggccggtctcgtcttctcccatgcgagggtgccctcctcgtaccgttccttcagcatccacgaccggctcctgcttcgcttcagcgtgaagtcgctgtcgctcggcgtcgtgatcaacgtctgcctgactttgctgtacgggcttgccgtcgggctcgtcgtcaacgagccgctttcgtcgcgtaccattctgatgcttgcgttcaccgccgtcgtcctttccctggcatgcttcgttctgcgactctatgccagtcctctcgtcgcctggaacgtcgtcgccttcttcatcgtcgccggacttacggtgagttccggcatgttcgaggacgcgccgatgctgtacgccgtcataccaaccacatgggtgttgaacggggtgaaattcgccggttacgtgattccggtcggcgtcgccatcgccgcgataagcgcatgtctgctgttcaaggcggtgaaacgtgtctgaccgaagccgtatacgggtgcactgtttcggatcgtaatcgtccggcagccagctttctcaccgtattccgttgcgggagtgagcctgccgctttccgctgatcccgccatacaaagtcgactccgcacgtcgcgagtcttcgccgaacactatcattggtggcgcagaggtcgtgtgggaatggccgtgacaggggaggggtattgggcaagcttcgggcgccgcgttcggcgcgtggccgtgtgatggcggcggccggcatggtgatggtggggtcgttgggtatccagacgtcgtcgtccctgtcggcgtcgttgttcggcgcgttgggaccaattccggtcagttcgatgcgcatgctggtcgccgcgatcgtcattctcgcactcacccgcccgaaactggctggccggtcgaaaggcgaatggctgggcatcgtaatctacgggcttgcgatggcggcgatgaacgtctgcctgtactcggccatcgaccgcattccgatgggcgtggccgtcaccctggaattcctcggaccctgcgtggtcgccctggccggttcgcatcactggcgcgagggcctgtgcgcggtggtcgcgctggtgggtgtgggcttgatctcgtttacgccgggcggctacttcaatccggccggctacctgttcgcgctgggctcggccgtgtgcttcggcctgtacacgctcttcgccgaccgggtcggcaaggcaggcaccgggctcgacgggctcgccctgtcggtcacggttgcggcgctggccacttcgccggtatccatcactcgcgcgccgcatgtgtcggccgcccagtggggcgtcatcgcagcctcggcggtgctgggagttgcgattccctacacgatggacacgttgtccgggcgtatcacgtcggcgcgcgtggtcggcacgctgttctccatcgaccccgccatgagcgtgattatcgccgcgctgatattgcgacagaccatcaccgcggtggccgtgatcggcgtcatcgtcgtctccctcgcgggtgccctgctggtgtggtcatccggcggcgatgccgtaaacggatgattcttgtcatacgattgcttgacagcatgttgtgaatgcttgagccccgctcataccattcaaatataatggtttttcgcatgattcgttagcgttgacggatcccccaataaggaggtaatcatgtcagatcctcgcgttgaaggcggaagattgtcggtcgcgcccgaggccgtatatacgggtgctctggtgatgttcttcagcaatctcgctatgccggacaccgatccgcagggcaggcccatagtgctgtggttcaacggtatcatcgccgtctgcgccctgatctggggattggcggagacgatgcgcgtccgtaaggaatacccgtggcggtgggcgcgcacgctgttctacgacgtcctgattctcgtcgggctgctcatccgtaattccgattggacccggctcgtcgtgctggtcgcactggtgctatacgcgattgttacggagaaaacggcggcggaaccgcgccggtcctgactgcaagacgatgatgaaccgtcagcgtcacaggattctcgcggtatgcgcacggtggtcgacatcgacacggccgccggcagcgggcgcatgattatttcacgtcgcagacggtgaaggcgaagctggtgagggtgccggtggatttgccgtcggcgaggagctgattgatgtcgggcaggtccttgttgtcgctggtctggttgagggcgtattgggtgccgtcgggcgcggtgaagcgcatgacgggatcgcctttgctgttgtgcgtgcagctgacggtgccgtggtcgacggtgaggggccatgtgtggccgagctggtcggcgctgatgtcctgtgggttgctggtcgcggtgattttcttgctgccgttggtagggtagttttcggggtgttcgatgccgtccatgcaggcggtcagccccagggtcatgatggcggcgaggcttgtggcggtgatggtttggatggcgtgtgtcgtgttggtcatgctggtttcctttgtcgtgttcggtggtggtcggggtgcttgttcgtctgccgtcaatgctggtcggggtgttcctcgatgaggaccatgtagccgtcctccaatgtggggtccatgggatgcgcgtcggcgggcggggtgtcggtgatgacgcggtagcgtacgccgcgtgcggtggtgacggcgttggcgacgatcatgccggccggtggcggggtgttggatggctgggtgagccagacacggcccgtggcgtgttcggtgaggtgttcggtcggcccgtcgtagcggatgcggccttggcgcaggacgaacacgtatgggcaagtctgggcgatgtcgtcgaggatgtgggtggacaggatcacggtgcggtcgccgccgaggccggcgagcagcgtgcggaaacgcatgcgttcctcggggtcgagtccggcggtgggttcgtccacgatgatgagccggggatccgccatgagggcctgggcgatgccgacgcggcggcgcatgcctccggagaagccgccgatgcgccggtcggccacgtccgtgagcccgacccgttcgatgagctcgtgcgcctggcgcatgcgctttcgcgtgtcgtcgatgcctttgaggacgcccacgtagtcgaggaattcgagcggggtgagctgcgggtagggttcgatgtcctgcggcaggtagccgagcgtgcgtttgagcgcacggcgggtcctctcgtccttcagatcgtggccgtccatgagtacctggcccgatgtggggcggatgatgccggcgaggatgcgcatgagcgtggtcttgcctgcgccgttcggcccgatcagaccgaccatgccgtgcggcaggtcgcaggtcacgtcgtccagcgcgcggggcttcctcaggaagtccttggtcaggtggttgatggagatgaacatgacgtcttctttccgtgtgatgttttttcggtgggggttccgccggtgccgttcagcgcgttgtgcgcgggtgtgccgagcaccatccacccaacgccatgagcagcatggcgacggcgagctgcgcgatcagggatatggccgcgttggcgggcgtgccggtgaccgcgaggatgcctcccgtggccgggtagacggggccgagcccgaaccatccggcgccgacggcgtcgccgatcacgttgaggatggtgccgttga

SEQ ID NO: 775 - DNA, 7172 bp, Unknown
  R14_18m  MAG No. k141_1910
ccctgatttggccaagcgtgcggccgaacttggcatgcctgcggtcggcatcaccgaccatggcaacatgcatggcgcctacgagatgtacaccaactgcgtggccaatggcgtcaagcccatcatcggcatcgaagcttatgtgaccccggaaaccgcacgtcaagacaaatcccgcgtgcattggggcactgaagcccagcgccgtgacgacgtctccggtggtggtcttatcacccacttgaccatgtgggctgaaaacgacgaaggcctggtcaacctcatcaaagcttcgtccgtggccaacctcgaaggtcgcgtcatgcgttatccgcgtatggataaggaggtgctcgccacctattccaaaggcgtgatcgcctcctccggctgcccctcgggcatcatccagacccgtctgcgtctcggtcagttcgatgaggccctgcgcgccgctggcgaattccaggacatcttcggcaaagacaacttcttcatcgaactcatggatcacggtctgcccatcgaaactcaggtgaccggtgacctgctgaccatagccaagaaactcaacgcaccactgctggccactaacgattcccactacgtacacgccgaagatgcccaggcacaggacgccatgctctgcatcaactccggttcccgtcttgacgatccggaccgattcaaattcgacggcaccggctactacatcaaaaccgccgaagagatgcgcgaactgttcaaggaccatccggacgcctgcgacaacaccctcgccatcgccgaacgctgcaacgtgatgttcgacgaccacgaagacggcgcgttcatgccgaaattcccctgccccgaaggctgggatgagacctccctgttccttaaaaaagtcgaggaaggtctggagaagcgttacgacggcaacccgccgctcgacgtattgaagcaggccgactacgaatgtggtgtgatctgccagatgcagttctgcggatacttcctcgtggtcgccgactacattcagtgggccaaggaccacggcattatggtggggccgggccgtggctcggccgcaggcgccatggtcgcctattccatgggcattaccgagctcgatccgctcaagcatggcctgattttcgagaggttcctgaaccctgagcgagtgagccttcctgatatcgatgtcgacttcgaccctgaaggtcgtgcgcgagtcatcgaatactgcggcgaaaaatacggcaccgataaggtcgcccagtgcgtgatctatggcaccatcaaaaccaagcaggccttgaaggactccgcccgcatcatgggctacgagttctcggtcggtgaaaaagtcaccaaggcgctgcctcccgcggccaccggcggcaaggatatcagcctgcatgacatcttcgacccgacagccaaacgctacgccgaggccagggaattccgagaactctacgattccgacccggacgccaagcgcatcaccgaagaagccaagggtatcgaaggcctgatccgacagaccggtgtacatgcctgcgccaccatcatgggtagcgcgcccatcaccgacacctcgccgttgctggaacgcaccgatggcaccatcaccaccaccttcgaataccacacgtgcgaaacgttggggttggtcaagatggacttccttggcctgtccaacttgacgatcatccacgacaccctgaagaacatcgaggccaacggcaaacccgccatcgactacaccaagattccgctcgatgacgccgaaacctacaaactcatgtcccgaggagacacgctcggcgtgttccagctcgattccgacggcatgcgttcactgctgaaaaccctgaagcccgataacttcaacgatatttccgcacttatcgctctgtaccgaccgggcccgatgagtatggattcgcacaccaactacgccaagcgcaagaatggcctgcagaagatcacgccaatccaccctgagcttgaggaacctctgaagcaggtgcttgacgagacctatggtctgatcatctaccaggagcaggtgcagtccgccgcccgaatcctcgccggctattcgctgggcaaggcagacgtgctgcgtcgagccatgggtaagaagaagcccgaagtgctggccaaggagaaggtgccgttcttcgccggtatgaaggagcatggatactccgaagaggcctcccaggccgtgtgggatattctggtgccgttctccggctacgctttcaacaaagcgcactccgccgcatacggtctgatctcctactggaccgcatatctgaagacgcactacccggtcgaattcatggccgccctgttgcaaggtgccgccaccaacaaagacaagaccgcactgtacttgggcgaggcccgccgcatgggcatccaggtgctctcgccggacgtcaacgaatcggtgtacgagtactcggcagtcggcgacgtcgtccgattcggtcttggtgccatccgtaacgtgggtgacaaggccgtggccgatatcatcgccgaacgcgaaggcccgcgcggcaagttcgtgaacttcatggacttcatccgccgcgtgcccctgaccgcgctgaaccggcgattggtcgaatcgttgatcaaggccggtgccttcgactcgattgacccgaaccgtcgcgcgctgttcaccgtgcacgaggccgccatcgactcggtggtgagtctgaagcgcaaacaggcggagggccagttcgatttgttctccgatgccgaggatgggggagcggaggccatgggcgacgcttccgtgaccgtacccgatcttgaggaatgggacaagaagaccaagcttaacttcgaacgcgaaatgttgggcctgtatgtgtctgaccatccgctctccggtatgcagtcgattctcgcgtccctgcgtgaaatgtccatcgcgcatctggttgatcgagccaaaacgatgggtgaaggacagcaggtcacgttggctggtttggtcaccaatgtggaccggcgcgtatccaagaagggcaacccctgggccatcgtgaccatcgaagacatggaaagctccatccaatgcatgttcttcggcaaggtctatgaagcggccgccgccgaactcgccgtggacgccatcgtacagattcgtggccaagtggagttgcgcgacgaaaccgtttctctgagagccacggaaatgcagattccgaccttggaagccgaggatgaacgtccgttggtcatcacgctgccgccggtggcgttggagcgccaacgcatgatgcaactcggtcaggtgctcgctaatcatcctggttactgcgaagtacatcttgcggtgctggatgagaagggtaacgctcaggtgctcacgtttggcgatcgtttccgcgtcaagcgggatacttcgttgtttgctgagatcaagattctgtttggccccagctgcttgcctgccgcctgattggctggtttcgcccctggcctctccctcacctggctttgctgggggagggctccttcatcagagggggctaaggcatgtgccaccatacgatgtgcgcgactattgtggaacgtatgggcatggagatggcggatactggtaacaacgatgacgagcaacaatggattgccgcgatgctggaacggctgtctcattcgcagttccgcgccaaattcgctttgaccgacaaagaccgagcctatgcccgcaccaaaggcaaggcgaccatcgatcgtcatgcgcgagaaatgttgcgagaccgcataggcgcagccgaaccgaagaacgacggcaggcagacgccatggcgcggccatccggtattcaccgctcaacatgctaccgccacatgctgccgcggatgcatcgaaaaatggcatcatctgcccaaaggccgtgaactcaccgaagcggaggtaaaccgacttgccgatttggtcatggcatggattgagcgggaccttatcaatcatccggttcggtgaagcaccccgcatcctcagtatgcctgtataccttcaatagttatgagccaacagccaacacaggcctcgaaaaccgtagacgcaaggtattggcgaatacggcagaacgccgaacgttgcctatggcgcgttcggcaataatgcgacataatgtctattcaagaagagctgacgaagtgtcaactctaccccaaggaggcggaatatgtactacagcagcggcaattatgaggctttcgcacgcccgaagaagccgtccgacgtggacaacaagcatgcatacatcatcggtaccggactggcggcattgtctgcagcctgttatctggtgcgtgatggtcagatgcctggcgagaacatccacatccttgagaaggacccggtacccggcggcgcctgtgacggtcttgatattcccggcctcggctatgtgatgcgtggcggccgcgagatggacaatcatttcgaggtcatgtgggatctgttccgctcgattccttccatcgaaaccgagggcgtcagcgtactcgacgagtactactggctcaacaaggaggacccgaactactcgctgtgccgcgccaccaaggacctcggcaaggacgcggggctcaagggcaagttcggcctgtccgacaaggcttcgatggaaatcatgaagctgttcttcaccccggacgaagacctgtatgacaagccgatcaccgatttcttcgatgatgaggtgctgaactccaacttctggctgtactggcgcaccatgttcgccttcgagaactggcactccgcgctggaaatgaagctgtacatcaaacgctacattcatcacatcggcggactgccggacttttccgcgctgcgtttcacccgctacaaccagtacgagtcgatgattctgccgatggtcaagtatctggaatcgcatggcgtcgaattccgctacaacaccaaggttgagaacgtggaattcgcgattggcgggggagccggccccaagcgcgagcacaccggcgtaggccaggacaccatccaaaagattcaggccacctccggtttcttcaagcgcaaccctgccagcacgcccaccaagaagcttgccgtgcgcatcgacgtggatcacgagggtgataaatcctccatcgacctgaccgagaacgatctggtgttcatcaccaacggcggttgcgtggagaactccaccatgggttcccagaactcgcccgccgcatggaacccagacctgaagcccggcggcggctgggatatgtggaagcgtatcgccgaccaggacccgagctttggccatccggagaagttctgctccgatccgaatgccaccaagtggatgagcgccaccatcaccaccctggacggcgagattccgccgtacatccagaagatttgcaagcgcgacccgttctccggcaaggtcgtcaccggcggcatcgtcactgtgcaggactccaactggctcatgagttggaccctgaaccgccagcagcagttccgcgaccagcccaaggaccagctgtgcgtatgggtctacggcctgttcccggacaagcccggcaactatgtgaagaagccgatgaccgaatgcaccggtgaagagatttgcgaggagtggctttaccacatgggcgtgccgaccgacaagatcgaggcgctcgccaagcatcacgccaacaccgtgccggtcatgatgccgtacatcaccgcgttcttcatgccgcgcgcggccggcgaccgcccggacgtggtgcccgatggtgccgtgaacttcgcattccttggccagttcgccgagaccccgcgtgacacgatcttcaccaccgagtactcgatgcgcaccggtatggaagctgtctacacgttgctcggcgtggaccgcggcgtgcctgaagtgtggggcagtgtctatgacgtgcgcaacctgctcaacgccaccgtcaaattgcgtgacggtgcaccggtcaccgatatgaagctcaacttcattgaaaaggccgtggtcaagaaggtgctcaagaaactcgacggcaccgatattgccaccctgctacgcgaataccacgtaatctgacatccatccggctcccctcaaggtgaggggagccagcacgcgaagcgtgactgggggagttgctcacaacggagtgttaagagaaagacaaaaacatgactgattctgatccccagttaatccgccacgccaccatcgacgatctggacgcgctggccgccatggaattcgaatgcttcccggccgccgaggccgccgaccgctcgtccctgcgcgcccgaatcgagacctatccggaatgtttctggctattgattgatggcgagatcgtcatggcgttcatcaacggttttgtgaccgatcggcgcgacttgaccgatgacatgtacgaggatgccgcgcagcacaaccctcaaggtgactggcaaatgattttcggcgtggatactgcgccgaagtatcagcatcgcggttgcgccagtacactcatgaggaaagtcattgaagacactcgtgcagccggccgtaaaggcctggtgctcacctgcaaagatcggttggtcggattctatgcgcgattcggatatgaggacgagggcatttccgattccactcacggtgacgtggtctggcaccaaatgcgcctgaccttctaatccccctttggcttccctctttgatgctgggtcgtttaaaaaacagtccggtggactgtttttttagacgaaggcgagacgatagtcgagccataagggcgcgagctttgctcgtccgtaattgcgggtgagctgtccgcgtgatcggactgaggggagttgaacgtggaatgaattgttgcgacacgccggtgaacatctgatttcgttacgtgagcccataaaaagccggcgtatcctgatggtaacggcgtgattcaagctgatttcgacacgccgagcgaagcctgtcgtttcaacgatttgggcttatcttcgtgcgcccgatttgcgcgagtccgtgaatgcgtgtaagttatttccttgctgccgctcagcgagtggttctcctccggggagctgcgaggtgggtgagtggtggtggtttgagaactcaagagcgtgtttgtactacttctttatagtcaatgattgccagttcattc

SEQ ID NO: 776 - DNA, 5660 bp, Unknown
  R14_18m  MAG No. k141_1978
ataacaggttgctcggtctaccggtcgtctgcggctcctccgcagttgttgaggccagtcgttgcgagcccacagcccatattcaacgtggttgttgtgtgggcaatagtgtatccccgcgaaatcgctatttgcgttacgaagtccatatagtgctccaagttgtccacctatagagaccgaatatcggacggcatatgagacactgtccgattcgcggaagatttgagcaccttacgattgccggcggggaaggcagggagtagtaatgaaggatgtgagcgaacagaagaaaaaaagtgcgcccgaagcgaaaggcgcaacggctgtacgtaaattccacacccactccattccgctggacatggaagatattgcacgcgattgggaaaaaccggtggtggacgccggtatcgccgccaaagccagcgtgattgtacgggtcggcatgctggacttgggagccggcaccggctccttccgcgtgcgtgaaatgatgcaccgcatcgcctacccgctgggcgtgcacgtacgcgccgacgtgaacctgacggatatcgaggccacctgcacggatggtcgtaaccgcatcaccgaagtcgtggatttgccgagtaccggcgtgaacaccgaacgtatctggctgctggaacatttcgccgactggttctccgtgaatctcggcaaggggtcgatgtatcacgtcgattcgcaactgtccgatggcgtggtcaagcatttggacgaacgtgacgcttcgcagtattctgctgatctggccaagcgcctgcgcgaacgtgccaaggccgaggctgaggcggccaacggcagcgtggacgaggcgctggatcttgcgttgaaaaccaaggtactcgtgacctccgtggccaagtccttggatgatgacaatgaagaagcccaccgacttttggcggacagcgcggaagtcactccggtcgaagacaaagcggccgaagagaaggcctacgacgatgccgaagtgtttaccggtgactccaatgagtcggttgaatcggcgaacgcggcgaacggcgcaaccgccgaaagccctgctgcaagcagtacgaagcgcaagaatcgcgtacccaaggaatacgccgaacacttcaacgagcgctccgacgaagagaaggccaagggcggtatcaccgtgcggcaggcgcacgagcggctcgatctgattgagcgtcgcaagccgctgtacaagccgtggttctccggtctggcctccgccctggcctgcgcggccttcgtgttcctgctcggcggcggcccatacgacatgatcggtgcgttcgtgggcgcgggccttggccagtggatgcgtcgccggctgtttgcataccatctgaaccagttcttcgtcacctttgtgtgcgtggccgcggcggcgctcgcctgcaccggcaccctgcgactcatcggcattttcgacccagtcgcgctctcgcacgatacggcctacatcggcgccatgctgttcgtgatccccggtttcccgctcatcaccggcggactcgacatggcgaaaatcgacttcccctcgggcatccagcgcgtggcgtacgtgctgtgcatcatcctgatggccacgctggcaggctgggccgtggccgtgatggtgcacctgcacccggaaggctttgaaccgctggggcttgacccgtgggtcaacggattgctgcggttcgtggcggcgttcgtcggcgtgtggggcttctccgtgctgttcaattcgccgcagcgcatgtgcctggccgccgccctgatcggtgcgatcacggacacgctgcgcttggaattgcaggacttcggcatggctcctgagatggctaccttcatcggcgcgtttctggcgggcattctggcatcggcgtggcgttcatccgtgcgacgtggctggctaccgccgcacctcggctacccgcgcatctgcctgaccgtgccgtcgatcgtgatcatggtgcccggtctgtatatgtaccgtgccatgtggtacctcggcagcttccagaccatgaatgcgctggactgggcgttccgtgcgttcatggtgattatctgtctgccgatcggcttggcgatggcccgcgtggtgaccgacaagtcctggcgctacgacatctgaccgtcatcttggctcccctcaggtggggagctcggataaaacagcgtctcagtatggaaacggtggaaggtgcttgagcccttgtatccactaccatcaggcgaagtgcgttgcggccgtattcacggctgtgacggtctgtatgacgccgctccggcgtcaatcgcatatcagcacgcatatcagcacatagttctgccatggcggtagccgcttggcgtcatgattggggaggtgtcgcagttggccaacgatttctggattctgctggccatggtcatctattttgcggccatgctgtccatcggattcatctactccgaacgctccaactcctcctccaaggaatactttgcgggcgggcgcggcgtggggccgtggctcacggccctgagcgccgaagcctccgacatgagcggctggctgctgatgggcctgccgggcctggcctacttcaccggcgcggccgacccgatgtggaccgccatcggcctggcgctcggcacctatctcaactggaagcttgtggcccggcgactgcgccgctactcggtagtggccggcgatgccatcaccattcctgacttcttcgccaagcgtttccatgacaagaagggcgtggtctccaccatcgcggccgtgatcatcctggtgttcttcagcgtgtacgtgggcagctgcttcgtgaccgtgggcaagctgttcgccacgttgttcggtttcgactaccacgtcatgatgatcatcggcgcggtggtcgtgttcgtctacaccgtggtgggcggctacttgtccgtggtgatgaccgacttcattcaaggcatgctcatgttcttcgcgctcgcggtggtgttcatcggcaccgtggccagcgcgggcggcatcgacaacaccgtggaattcctgcgtgccatccccggctacctgtccggcacgcaggtggccgcgcccaagctggacccggccaccggccagcagctcgtcgaggcgggcaaggccgtgttcggcgcgccctccgactacggcatcatcaccatcatttccatgctggcgtggggcctgggttacttcggtatgccgcaggtgctggtgcgcttcctgtccatccgcagcgtggaagaagtgcgcaagtcccgaatcatcgccacctcctggtgcgtgatttcgctgggttgcgcggtgtgcatcggcttggtggggcgcgcgatgatgcccaccgaactgctgacctccaccgatgcggagaccattttcatcgtgctggcgcagaccctgctgccgagcttcatgtgcggcgtggtggtctccggcattttcgcggcctcgatgagctccagctcctcgtatctgatcatcggcgcttcggccatgggcgagaacatcttccgcgggctgctgcaccgcaaggccaccgacaagcaggtcatgatcgtggccagggtcacgctggtggtcatgttcctgttcggcattctggtggcatacgaccagaactcgtcgatcttccaggtggtgtcctacgcgtgggccgggcttggcgcctcattcggcccgttgatgctgtgctcgctatactggcgtcgcgccaacaaggccggcgccgtggccggcatgctgtccggcacggcggccgtgctgatctggcacaacctcgtcaagcccttgggtggcgtattcgccatctatgagctgctgccggcgttcatcatttcgctgctgttcatcgtggtggtttcgttgctgaccgccaagccgaacgagcgtatgctctacgaattcgaccactacatggacgatccgctgcccggcaccctgccgtccggcaccgtgctcgtcgacgagcccatggaagccatggagtccgaggtccgcagcggcaaatgacacgtgcctgctgtgcggtcggctcgtatggtagaggagtggcttttttgtggttcggcaggaaccattgaggccaaaacggacttcgaggggctgatttgacgttctggagaggtctacttccgtttcaaggggctgatgcctgagtagacgcggctccaaaacggcggaatggcgttggcgtaagggcattgatacacgtgatctagcggatgatcagccccttgaaacggaagtagacctccggcggaggccaaatcagccccttgaaatgggttttgaataccgtagcgcggtgcggacggtgcggactgactctaccgggcttattattcctgcgtcgtcggaataattggcagcagaggctcgaatttcagccgtttgtacagcggaatacggcgtagctttcggacatcgctaatttgctgggtggtttgccgcatcgtgagctggaccgttttgcccgtaacctcctgtatcctctcggcaactcttcgggcaagggcctcttctcccgcttcgtcgccaatatctaatttggtgacttgaatgtacttccagccagcgtcttcgatcatctggcggcgtctcgcgtcattcagccattgcccggcatgatgagagccttcgtattcgatgcataccttgaattcagggtatgcaagatcgagatatatgggtctggtgttgtttcctacgaatattggataattcacctgcgggcaatccagaccgtatttcaagagaaccaaacgagttcgtgtttccatggaggaatctgtgcccgcgcgcgccaaaagcagggcgcgacggcatttgttatacccgcggaacaaatacgaattggtgccattctctttgtcggctcgcacctgggcctcggcctcatcgagatacagagaaagggcgtcgatggttgttctgcagagccttcgatctcgtcgcatcatggaatcagcgagaacgatgagttcttcaagttcgagatacgcggagaacatggcccatgtgcaagctggtgaagtgcatgtgaattgtccctcgattatgaccgtgtctagtgggaaaggccatacaaccactttgacccccacaatgtgccgtttgtcattggcgtgtggaaccgcaacaatggttgtagttgcaaggcctctgtgtttgcttgatatgcggggtacttcaattgacaaaagctccaatgctgttgtcagggcatagggtgggtgccatgcgcttcgtcgttgaacatctgcgcacgtctgcattcgttgatacttctgcattgtcagctcggtcaatgccgttgagctacccatgatgatcactccttcgtgatgttcgctttgtcctcgcagtgtagggtccggctaccggccctgtctaccgtcccaatttttcggtggataaatgtggataagtcggtggataaactatgggcgttcatcgcagttgcaggcatcccgcaattacatggaacgtaggggtttgcaggcagccagcgggaatcgccgccgacggtgcgattcagcttgaacgaatctccatggcgttcatgcaaaggtggcatgatggcgggtatgagtagcttggtgcgtattgtcaatgccggtgttccggggtctcagga

SEQ ID NO: 777 - DNA, 8081 bp, Unknown
  R14_18m  MAG No. k141_2032
cagccacactcaccactcgtggcgctgataggcgattctggtggtgtcgaccggccggtcgagcagctggatcaggccgcaacgggcgaagccggagctttcgagcacgtgctgcatggccttgttattggggtgggtgtcggcgcgcacgttgccgtagtgcttcagggcccacctgatgcagtcgcgggccgcgtggcgcaccagaccggatgcggcgatgcggtggatggtcacataggtgtcgttgtccagccaggcgccgtcgattttggcgtaggtcggatccttgcccgggcacagggcgaactgggccagaatgcgttcgtggccattgcaggtgtcgaccagcagcatcgtacgctggttggcgatgtcgtcttcaatcaccgattcacgcggaaattcgttgccccactgggtggggttgccgttggcggccatcaacgcgcgtgcgcgtgcgtagattttctgcatctgcggcagatcgcgcatggtggcgtggcggaaacggcggcctgtcgccttgtttgcagcgttcgactgagtcacttctcacctctccgacatgccgggttgccggcacggtgaccggcgactaactgacggccaacctaccatgccgtaggcacaagaaatcccgtccgcgttgcatgacggacactaataaacaatggcttccgtccgcaggagccggacagtccagccgagttgaggacagccaccctcagtcggcttcgcccccggctcccgccagcgggagccgaatcagaattgaatcgaatcagacgaatcagacgaccttgcgctcgaacgggtcggagctgatgccttcctcaaggatctgcttggcccattccttggcggcgaacaggctgtggtcgcgatagttgccgcagctcttctcggtggtggcgggcacgtcatcccatgtggccttgtatgcgatgaactccaacgattccttcaacgccttggccacatcctcggtggagtgggtgccccaggtcagcaggtggaagccggtgcggcagccgaacggcgagcagtcgatgtagccgggaatgcgttcacgcagcagcacggcgatggtgtgttcgatggtgtgcaggccgccggtggggatggcctgctcgttcggctgggtcaggcgcagatcgtaattggagatcacgtcgccgtgagggcccgtttcggtgtcgatgtaacgcacgtacggcgccttgaccttggtgtgatcaagctggaatgattcgacgacgggcttttcggccttgtcttctgccatgctgttgcctttctacttgctgagtgttcggtcatgaagtatcgaacagtcatcgtagtcgcgccagcccaagaacgcccgcaaatactccgcgggtcgctataggagattgttatgacgcactcccggcattgaacgaggcgatggtttgcatgaagcgctggccgtagaggtcgagcttgtgttgaccgacgccgttgaccgccagaaattgcgcgttggtaaccggcttgatgcgggccatgtcgcgcaaggtcttgtcggagaacacgatgtacggcggcttgccgatttcctgggcgatggtgcgtcgcagttcgcgtagcttctggaacagcgattcctcgtcatcgtccgggatatacgagcccagcgcatcgccgggaacattggcggaatcggcagtatcagccactcccccgctccgaccggaaccggccgccgccgacttgcgttccacccgtttgatctcatagtggaagtcgggagcggcggtttcggccgcccgcgcaccgaacatgacgattggcatacgcccttcggcgattgacaggtacccgtccgtggccatctggctcaacacgtcgcgcacgcgagcctcgttcacgtccttgagcatgccgaaggtgggcatccgctccgggttcagccatgccagatcctgtgcccgcgaaccgcgcaggatcttgacgatcttgccggaaccgacgcgctgccccacgtcatgcacgcaacggctgatcgcctgcgccacgcgggtcacgtcgatggtctcgaacgtgctttcgcagttcgagcaggcaccgcatctgccggactgcgaagagtccgccgcaatgtcttcacccgccgcggaaccagcattcggcgacaattcctgaccgaaataccgggtcatataccggtgcaggcagtcggtggtgcggcagtagccgaccataccgtccagcagccggcgcttggactggcgaacgatctcctgctcttcgggagtcaatcgctcgttctcataatcgttatccagcaaccgacgccgggtgacgatgtctgactcattccacagcagcgtgcatcggctgggctcgccgtcacggcccgcgcggccggcctcctgatagtaggcttcaatggattcgggtagattgtggtggatgacgtaacgcacgttggacttatcgatgcccatgccgaaggcgttggtggctacgaccaccggcaccttgtcggtgatgaagtcgcgctgggccacctcacgcgcgtccggcgacatgccgccatggtaggcgacggccggatgccccatctggttcagcgtgtcggcgagcgcttcggtggtcttgcgggtggcgcagtagacgatgccggattcgtccggatggtcggccacataccgcgccacccatgcggccttgtatttggtctccagtttgaccacatcaaaatacaggttcggccggtcgaatccggtgacggtgacggccggattccgcaatcccagcagtcccacgatgtcccgacgcacccgttcggtggcggtggcggtgaacgcacccaccggtggacgctgcggcagcccggcgatgaaatcgccgatacctaagtacgacgagcggaagtcctgaccccactgggagacgcagtgggcttcgtccacggcgatcagcgagatcggcgtacgggcggcaaagtcgcggaatcgcccggtttccaagcgttccggggccacgtacagcagtttgatctgcccggcggcggcttgggcgaacaccatcgcctgctcgtcgggagtttgagtggtgttgatgaacgcggccggcagaccgaggtcgttcagcgcatcgacctggtcgcgcatcagggaaatcaagggagatacgaccagagtcacacccgggctgagcgcggcgggaatctggtagcacacggacttgcctgcgccggtgggcatcacgcccaagacatcgcgtccggcaagcaaagcctcgacaattccttgctgtccgggcctaaacgagtcatagccgaagtatcgtgtgagcgcctccagcgccgcctgatgtgctgtcataaacgaccagtgtaggccgaccgcggatggatttcatcgtataacggaatacctcgtaacgatgtacgtagcccttccgtattattatgcgtcaagaaacgttattcccggcatatcacacgatatgccgctttgagagaactaagacggggcattttatggccaacaatacattttccttttcctctcctgacgatcaggagacggcggtgctgcagcctgtggccgccgatgggctgttcgcagccgcggccacaggtaccgccacgccacagcaaagcgacaatggcaccaataaccatgccgacaatacagcctatgtgggtgaacatgttatggcatctaccaccgctaaatcacatggcaaggccgcacggattgccatcataaccatatttgcagtgttgcttgccgcattaatagcctatttcttcgtcggacgttggtacttccaagacaaggctgcgcccggtgttcatttgggcaatgtctctgtcatgggccagacccgcgaagaacttgcgaatactgtgaagcagcagctgaataacaccacagtgacgttcaccgccgaaggcaacagcgtcaaagcctcgctgaaggaccttggcgtcaccgtcgacacggataaaaccgtagatgcgctgttgaacgcgaagaccggcgacgtggccaagctcaatattttcgatcagccgcatatcgctctgaccgccaccagggacaaagagaccgccgaacaattcgtcaccgccggcctggtcgatgaggccgaccgagcgcagattgccaccgttgtctacaacaagagcaccaagcagttcgattacaccgcgggtcaggatggcaagggcccggatatcaatgttgtcaatgctgcagtcaaggaggccgtcgcgaccccgggcgaaaatgcgacggtgccggtcaagctacagactgcaaagaatccgattgatgacgcgagcgcacagcaaacacagtttgacgccaatgccaagcttggcctcaaactgaccgtggacaacggcgtgaacaagagcgtcaccatcccggccgataccattgcctcattcctcaagcccacggtgaataaggcgggtggcaccatgagtctggtagtcgaccgcgatgccatcaccaagtacgtcaccagtgacagcgtaaccaaggaactgactgttcccaaggtgacacgcgaggtctacatcacgccgaaagacgaaggcggcgtggaaattggtgccgataagacactcggtgtggatggtattgaagtgactggtgccggggacgcccccgaacgtctggctaccgccatcgagcagaaccagtccactgattccactgtggctgtgaaagacagcccatatgatgtcaagcaggtcgaggtgcctcataacttcgatacggcaaatggcgataagtgggttcatgttgatctgacgaaccagactgccactgcatatcagggcaccacggtggtcaagaagttcaacatcgcttctggcaagcccaccgccgatggttccatgctgtccgataccggcacgttctacgtgtatctcaagtacgaatcgcagaccatggttggcgaaggctacaaccagccaggcacgccgtgggtttcctactataacggcggcgaggccctgcacggtgttcctgcatacatgtggggcgagcaccccatctatgtgcagcagggtatcccaggctcgcacggctgcatcaacatgcaggtggccgacgccaagtggatgtacgactttgccaccatcggcactcgtgtggtcgttgatggcaccacaccgacttccggtcaggcgttgcgcccggctggtgcggatgccaccggatggcagggcggcaacgccagctgattcgatccatgtttaatcgataacggaaaatccccgacccttgtgggccggggattttttgtaggtaccaatcgatagcgagtccgccgataagcgtggtggcaccgtcaatacggtgccaccagtaccgtcagtacggtcagatacgatccaatgcctgcttgagatcggcgataaggtcgtcggcgttctcgataccgaccgaaatacgcaccagattggcgggcacctgcagggtggtgccggccacggaggcgtgggtcatggcggcgggcacctcgatgaggctttccacaccgccgagcgattcggccagtgtgaagatctgcgtgtggtccacgaagtgcttggccgcctcggcaccggccgcgagctgcacggagacgatgccgccgaagccgccgtgcatctggcgggcggcgatttcatgacccgggtgggactcgaggcccgggtaccagacgcgctcaatcacatcagagggctgggattcgagccattcggccaccttcagggcgttggcactgtggcgcttgacgcgcagatccagggtcttcaggccgcggatgtccagccaggagtcgaacggggagggcactgcgccggcggcgttctgcaggaaggcgaccttctcacgggtctcctcgtcgttgaccaccacggcaccgccgaccacgtcggagtggccgccgatgtacttggtggtggagtagaccaccacatcggcgccatcggccagcgggtgctgaagggcgggcgaggcgaaggtgttgtcgaccgcgaccttggtgccgtactcgtgggcaacttcggcggtggccgcgatgtcggtgatgttgagcagcgggttggacggggtctcgacccacacatactggtagtgcttggaggccaatgcggtttccacggctttcagatcggtgatgtccaccacgtcgaggcccacaccccacggcacgaacaccttggagagcaggcggtaggtgccaccgtacacatcgttgccgagcaggatgttgtcgccgggcttgatggtggagcgcagcagcacgtcgatggcggccaagcccgaggagaagctcagcgcgtacttgccgccttccacggcggcgagctgctcgtcgaagctggtgcgagtggggttgatggagcgagagtagtcgtggcctcccctgaggcccaacacgccatcctgcttgaaagtggaggtggcgaagatcggcgtgacgaccgcaccggtggtcgggtcgggctcctggccggcgtggatggcgcgagtggcgatgtcggtattggcgaacttggcgttgtattcagcggacatgatattgggttcctttcgggattgttccgtattcgaaggtaaaacaggtgcggttagttagtgcggatgttggtattgattcttttgatagctagttatggagtccatccgcagctccctcatcagagggagttccgttaaggtactgctcggcgagggagggcttgctggtgcgttccacgatgtcgccgtagccgttggcacgcatccagtcgtcattgaagatcttctccagataactgcggccggaatcaggggcgagcaccaccacaatctggttctcgtccaaatcattggcaagcgcgtacttgatggcgctggccacggccatgccggacgagccgccgaccagcaacgcctcctcgccggccagacggcgggtcatttcaaaggcttcggcgtcggatacgcgcacgatgtcgtcggtgatgttccggtcgaaagccttggggtagaagtcctcccccacgccctcgatgtcgtactggtggacttcgtcgcgtgaggaagcggagtagatggagccttccgggtcggagccgatgaccttgaccgcgccgttggaggcttccttgaggtacttgccggtgccggagatggtgccgccggtgccaatgccggccacgaagtgcgtgaccttgtggtccgtagcctcccagatctcggggccggtggtgtagtagtggctcagcgggccgttcgggttgtcgtactggttcgggcggaagccgccgggaatcgtgttggccagtcgttcggcgacctggtagtaggagcgcgggtcgtccgggccggcgtcggtcggtgtgacgatgacttcggcaccgtaggcgcgcagcaccgcgcgcttggattcggaaaccttgtccggcagggtgaaaatcgtgcggtagccgcgctgctgggcgaccagggccaggccgacgccggtgttgcccgaggtgggctcgacgatcacgccgccgggcttcagctggccggactgttcggcggcgtcgatgatgcgctcggcgatgcggtccttggaggagccgccggggttgaagtattcgactttgacggcgatggtggctttgacgccggccgcctgcgggatgtggttgagcttgacgagcggggtgttgccgatgagttctgcgaggctgttgtggatggtcatgtgaagtccttcgttgctggggttgtgggggttttgctgcgttgcgttcgtgaaccgacgttcccagacgaatggactgtggctttggtttgaaaatcgagtattcccgctcactgtacggtgaatccgaaaagtgaaccggtttttcatgttaaccacggctcgcgcattacacgattacgcttgtgccatcggatacatgaaaagtatgcggcagattcgccgcgattcgaatgctccatctcaagttatgcgtcactgaccgctcgcccaggggcgtcggttagcgacaacaacatgagataatctgcatgcctcacaccatagcacaacccgcgacaagcgcgtgtcgccggcgg

SEQ ID NO: 778 - DNA, 26086 bp, Unknown
  R14_18m  MAG No. k141_2584
actcgccctgctttctcatcgcgtccgcgtgctgccgatggatgcagccagcttggtgaagatgccggagaacaccattctgtttctggatgcacgcgatgatctggcgaccgccaaaaccttgtgccgtctcatccacgcctccggcctgtccacgccaatcgtgctggtgctgaccgaaggcggcttcaccgtggtcaactcccagtggggcattgcggatgtggtggtcgccaccgcttccccggctgaagtcgagggccgattgcgattggtctccgagcgcggcaacgctcccgcagccgcagcggccggttctcccgccgaatccaccaccacggtggaagatggccagattcgctccggcgacctcattgtggacaccaacggctataccgcctccctgcatggacgccccatcgatctggcatacaaggagttcgaactcctcaagtacttggtccagcaccccggccgcgtgttcacgcgcgcccagttgctgcaggaagtatggggctacgactactacggtggcactcgtacggtcgacgtgcatatccgtcgtctgcgcgccaagcttggcggcgaatacgaacacctcatcggcaccgtgcgcaacgtgggctaccgattcgacccgccggagacggataaggaaactgccgccgcacagcaggccgccaaagcatcctctgccgccatcggcaccgatgacgatacccccgatctcaacaccgccgcctgacagaccagcagcgccacaaaccatcaatcatcgacattacgccgcttaggtccatacgatgagagaaaccaaatccgcgcgtctcacgcgcatgcatgacgaatacgacattctgcgccaggtgattccggcacccgcttgcgcactgcatttctcgaatccgctcgaattgctgatcgccaccgtgctcagcgcccagaccaccgacaagcgtgtcaacacggtcaccccggaactgttcgccacctaccccaccgcccgtgacttggcggccgcgaacccggcccaagtcgaagacatcattcatccgctggggttctaccgttcgaaaacccagcatctcatcggactggccacggcactggacgaacggttcggcggcgtggtgccgcgcacgatggatgaactgaccagcttgccgggggtcggccgcaaaaccgcgaacgtcgtgctcggcaacgcgttcgatatccccggattcccggtcgatacgcatgtgatgcgcgtaaccggacgactgcgttggcggtcggattggcggtccgcacaccctgatcccgtgaaaatcgagaaggaaatcaccgcctgttttccgcccgaagagtggacgaatctcagccaccgactgattctgttcggccgggccacctgccacgcacgtacccccgactgcgccaactgcccgctgtccgacacctgccctagctatgcgccgcccgccggcaagagcacgtccaagcgctaactcatacctcatcatggtgaattgcggattctaggctgaatccaccgctagactgaaaaccatgcagcacagcaagcggaacaatacatggtccaagtgggggatttttctcggagtcgccgtggcactcggcgcactcgtggttgcgggatggacgttcatgcaaaaccggttccagccgggatcatccctcgatgccgatgtgaccattggcatcgacgatatgccgcaatccttggatattcggtccgattcctctgcggcagccgagcgcctgctcgtcgacaatgtgtatgagacattagtgaccgtcgatcaagacaacaagattcagccgggactggcgacaagctggaagacttccgatgacggactgaccgtcaccctgacactgcaatcgggcgtcaccttctcgaacggtcatacgttggacgcctcggacgccgtgtggtcgttgcaacagaacgtgaccaacaaggtggcggacgtcgacgaattgggcgatctgacgtcggtcgccaatccgaacgccaccacggtggtcattacgcttgccaagcccaatccgacgctgctgcgagcgctgtccggcaaactcggcattgtctacgattccgagtcgtccagtgccgattatcaacgcaaggccataggttccggaccattcaccgtggccgatttccagcctggccattccctgaagctggcgcgcagcgatacctaccatggcaccaaagcggccagcaatatcgttgaatttatgcaatactccgacgccgatgcgctcagcaaggccctgaccgacggcagtctcgatatggcggcaccggtttcggcttcgacggccaccggtttgaacggcaaggatggcctgaccgtcaaggagggggccactacggataaggtgctgctggcctacaacaacggcatcgattcgctgctctccgacgaacaggcgcgtaaagccttccgctatcaaatcgacgcagccggcatcgcctccgcccaacccgacgcagccggagcattgggcggccccatcagcccgctggaacccggatacgaagatttgaccggactgtatccgcatgacgaaaaccaagctgggcagatgttctcctacttcggtgcgcaatatctgactacggtgaatctggtggttcccgaagaataccggtcgttggccgaaaccatcaagcagcagatcgagcggcagccgcgccccacggtgaaccttgaagtgctctccgatgaggattatgccaaacgaatcaaggacggcaaatgggaactgaccgtgatgagcatggacggcacggatgatgccggcatattcgccgaccccgattccatgttccattacgaccataccgaagcgcaacaggcctatgcggatgctcgcgccgccactaatgacgccgattatgaggcacgaatgaaggcgtacgcccggctgatcagcgaggatgcggccagtgattggctgtatacccgcaaatgcttcactgtggcgtccaccaaggtctccggctacccgacctcgatgatcaatcgccgcatgccgctggccgggttgacggtgaagtaggcaaccttcagtcacggacgggctacgcccgatagtccttggctcactatcgttcgatcgttcgtacctcgcctgcgaacagcctactgggctgtttactgtacagttcggcttgtcatgcaacgtgcataaactttggctttatgactgaaggcaaatccatcatcaacgccaacctcaccccgctgcccgacaaggtcggtgtggacggacttgaggacaagtggcgcgccgtctgggatgaagacggcacctacaaattccgcaatacccgcgaccgcaaggccgtctactccatcgacaccccgccgcccaccgtctccggttcgctgcacgtgggtcacgtgttctcttacacgcacaccgatgtgattgcgcgttacaagcgcatgcgcggctacgacgtgttctacccgatgggttgggatgacaacggcctgcctaccgagcgccgtgtgcagaactactatggcgtgcgcgtggacgtgtctctgccttacgacccggacttcaagccgccgttcgagggcactgatggcaagaagatcgacgccaaggatcaggtgccgatttcccgcaagaacttcatcgagctgtgcgagcgtctgactgctcaggatgagaagctgttcgaggccctgtggcgcaagctgggtctgtccattgactggtcgcagacctaccacaccatcggccagcacccgcggcgcgtggctcagaaggccttcctgcgcaaccttgcccgcggcgaggcctaccagcaggacgcccccggcctgtgggacgtgaccttccagaccgcagtggctcaggccgagcttgagtcccgcgaatacccgggcttctaccacaaggtggctttccgctttgaggacggcaccccaatctacatcgagaccacccgccccgagctgctggccgcttgcacctcgctgatcgccaacccgaatgacgagcgctacaagcagtacttcggccagtacgtctactcccctctgttcaaggtcaaggtgccgattctggcgcacccggccgccgaaatggacaagggtgccggtatcgccatgtgctgtacgttcggtgatgtgaccgacgtcgagtggtggcgcgacctgaagctgcccacccgcccgatcatccagcgcaacggccgtatcgtgatggataccccggactggatcgaggacccggccggccgcgaggtctttgccgaaaccgctggcaagaccacgttctccgcccgcaagatcatcgtcgacaagctgcgcgagtccggcgatctggacggcgagccgaccccgaccaagcgtatgacgaacttctacgagaagggcgacaagccgctcgagatcgtcacctcccgccagtggtatttgaagaacggcggtaccgacgccaagctgaacgccgagcttatcgagcgtggcaaggaactcgagttccaccccgacttcatgcgcgtgcgttatgagaactgggtgcacggcctgaacggcgactggctgatctcccgtcagcgcttcttcggcgtcccgttcccgctgtggtacccggtgaacgcttccggcgagccggattacgatcgcccgatcaccccgagcgaggatcgtctgccgatcgacccgaccatcgatgtgccggaaggctacgacgagtcccagcgtgatgtgcccggcggcttcaccgccgaaaaggacatcatggacacctgggccacctcttcggtgaccccgcagatcgtgacccactgggccgagccggacgaggcctccaaggccctgttcgcttccaccttcccgatggaccttcgcccgcagggtcaggacatcatccgcacctggctgttctcgactgtggaccgcgcgcacttggagaacaagtgtctgccgtgggcccatgccacgctgtccggctggattctggaccccgaccacaagaagatgtcgaagtccaagggcaacgtcgtggtgccgaacgagccgatcgagaagttcggcgcggacgccgtgcgttactgggccgccgccgctcgcctgggcctcgatgccacgtacgacatcggccagatgaagattggccgtcgactggccatcaagctgctgaacgccaccaagttcgcgctggccatcggccgtgaggacgagaaccatcacgtgggcgctgccgccgagacctcgtggaacccgatcgatgtgaccgaaccgctggatcgcgccgctatggccaagctggctttggtggtgcgtcaggccaccgaggcgctggaatcctacgagcattccaaggcgctggaagtcatcgaatcctacttctggcagttctgcgacgactacatcgagctggtcaagaaccgcgcctatggcactccggacgagcacggcaatgtgccgtccgagaaggctgtgaagtccgcccgcaccgctctgggtctgggcttggacgccttcgcacgtctgctggccccgtacctgccgtacgccaccgaggaagtgtggagctggatgcacgccggttccggttccgtgcatcgcgccgcctggccggtcgtggacccgtatgtcgaggccgccaccggtgcttcccccgagctgctgacttgggccggcaaggccgtggagcagttgcgtaagatcaagtccgaggccaaggtctccatgaagaccccaatcctgtctgtggcactgtccgctgcttcggaaggtgtgaacgcgattcacgccgccttgggcgatatcgcgcaggccggtcgcgtggtcggcaagttcgacttggtggccaagcacgccgaggaatccgccgccgaagacgcgcccgaaaccgaggtcgccgtcgaagccagcgagctcggtgagccgccagccaagaagccaaagcactgagcgttgcgcacaacaacagtaggtctcacggcaatgccgctcgttccgagcctacgggaagcccaccgggcttcccgcttaacggctcggccagccaagaagccaaagcactgagcgttgcgcacaacaacaaaagaggggaacctcctattgaggttcccctcttttgttttttgacgttcggatgacacgactgtgggacggcacgcaaatatcccgcattgtaagctggtggcccagaatagcgtgggccaccacgcgtgtcaaacgttttatatacgcggcgtcccacagaccgaatcaacagatccttggaatttagccattcttcaaactatagttagctctgacttacaagagggtgtgggacgccgcatcgaaaaagccagtttttgatgcggcgtcccacaccgataacgcactttacgcgtattgggcacctgtcgcatgcggattttcccgcatacaccatcacaccgtcggaatcacgatgaggtatcgggtttcggcggttttttgttgcgtattggggctatcgagctgcgcgacggcctgcgccaagagcgtgccagcatcgctgatctccacggtctcattgatcagcgcgctcatgtcatgcttgagcagcgtgccgccagtgccaaagccgaacagtactggagcggtgtcaagattgttgccggaatcgccagtatcgctcgacttggctgagtcgttcgttcccgaaccatcgctcttggacgaatcgaacttacctccaccaccgatggccgaagtaagaccacccgcatagttcatcacatcgccagcagacatggacatggtgtcatcgaccagtgaggccttggaatgctgcgactgctgctgctgttgcgcggctttggcctgcttacgggcggcatcggccttacgcttggcttgggcggcccgggtcttgccgtagaacgattgcgattgcgaatcgaccaggccagtcagtgcctgagcctcggtcaccggaccggaagagacatcaccggacgagccatcgccatcgctgccggaagccgaggacgcgaatccttcgaactgatcggagaatcgcaatacaatctggcgcaaggccgtggctttgcccgtatgctcggaggcggtggcaagcgtgctcatcgcggcatcgaccttggattgagcgtcggcgagttcatcgctaccgttggtttcggcgatggcttggctctcgtaagcggtggcgcccgaagacgtgccgccggtcagggcgctcaaattggccgtgtagacgtccgtgtatttcatcgaatacggaatcattgcggcggagagctggctctggccatcggcgtattgcttggagcctcgagtggcttcctccgaagcctcggcggtcagatcatccaccagtccggtggtgccttgctgctggatgcggcgaatcacctcatccaacgcatcgaccgcaccggcatgctgatgtgcggcactgacgttgttcaccgcgttggccaagtcgagtacggcttgtgccaaaggcgtatccccggacagttcgccggccgtgcccatcaacgccggcaactgggtggaggtaccaatcgatccagacaggtgcgtggtatatgagcccacatacgcggccatatagtcttcaaacgtccgcttatgggcggtttcgcgttcggccactacggacttgtccagcgcacgctcattatcgcgcagggtttgaagctgctcgatgagctgttgatgctccccggaaccggcgtcggtcagtgaatcgaccagtatggcggcagaggcgacgagttgggcgacatccgtatcggcagcaggctgtgcggcggcattcgcggcatcgggattagcaccaaccaccggactgctggaattggaaggcaatacggcgagcgccacggaactcatggagaagtctttggcgttcatatagcagctgaattccaagccggttgcggcttttccagctgcggcgactacggtattggaaccttgcgtggttaccgtaatggagttgtcagcggaaacatcatcggctacctgcgtaggcacggtaaaggcgacaaccgggatcgtacggttggcctccttggtttgcggcttaatatcgatatacacgccgatcagtccagatgcgccggcaacctcgtttgcctcgacgtttggaccgtcaagcgagtaggtgacgctgactttccatggcagggtggcggcggaagcggggatacgagaaaccttggacgtgccggaattactattggcggaatcggtatcagtggaaccgctattgccggaatcggcactggcgccattgccggcgccgcccttccctaccacataccaacggaccggctccccttcggcatcggcgacggcgtacatatcacttgccgtagcgagcaccggaccgtaatcaaccggagtcggacgagacatccaagcaccgccgagaatcgaagccacgcacaatgcgcaactgaccagtgcggcaccacatctcatctacgtatcccattcatacagtcggccactatgggcattccattcccgtattaatgtagtcgctgccggcaacttgccctatagacgaatatccgaaaggtgcccattcgctgcgggcgaatcaggcgaatacgtcgagtacgcccgggtcgccaccggcatcggcgatgcgctggtggcgcttcttggcttcggtaaccacgaattcacggtacatttcggcaatttccggatcaagcccggcatcgatggcgatgcggtggaggcgttcgatctgatagtcctcacgcttggtgtcttcgggcgcgaatccggcgttggctttgagcacgccgacctgcgaggtggccttgaaccgctcggccagtaatgcgatggccgccgaatcgatgttatcgatggtttggcgcagcgctttgatgcgcgccaccgcttgtgcggtttccgggtgggccgccgcctgggcggagtcgatggtggtcctttgccagccgctgctcgtttcgctcatagattcgaggatactcccgattgcggctttgcacgatgcgcaaagtcagatatctcagaagtcatagtcgccgtaggggatatggctggcatccgcatcgccgaacatggccgcaccattgcccactcccaaaacaatcgaacccattgatacatctttcatctcatatatcgtcagcgtgcatgtgaacgttgacggcaatactacaactgcaatgtgatagttgatgtatttgcatcatatacggcaagggctgcgccccgtatcaatcggggtgcagcccttacactattgttcagcggtctggtcagttgccgttgaccgcgttgccggtgttggcctgctgcacgatggcggcgaggaagtcgcggttggtggcggtcttcttgaggcgcggcaccaacgtctggtaggcctgctcgggctccatgccgcccagcagtcgacgcagacggtagataatcggcagttcctgcgggttggtgatgagctcctcgcggcgggtgccggaagcgttgatgtcgatggccgggaacagtcgcttgtccgccagctcgcgggacaggcgcagttccatgttgccggtgcccttgaactcctcgaaaatcacctcgtccatcttggagccggtttccaccagcgcagaggagatgatggtcagggagccgccgttttcgatgttgcgggccgcgccgaagaacttcttcggcgggtagagggcctgcgcgtccacaccaccggacaggatgcggccggaggcgggggcggcgatgttgtaagcgcgagccagtcgggtcatggaatcgagcagtacgaccacgtcctggccgagctccacaagacgcttggcgcgttcgatggccagttcggcgaccgtggtgtgatcggaggccggacggtcgaaggtggaggagatgacctcgccctggaccgtgcgctccatatcggtgacctcttcggggcgctcgtccacgagcaccaccataaggtggacctcggggttgttggcggcgatggagttggcgatgttctgcagggtgatggtcttaccggccttcggcggggagacaatcagaccacgctggcccttgccgatcggggaaacgatgtccatgatacggccggtgagcttgttcggggcggtttcctgcttcaaacgctcctgcgggtacagcggcgtgagcttggagaactgcggacggttgagcgcttcttcaacgctttggccgttgatggaatcgatggcctgcagtggcacgaacttctggcgttggttgcgacgatcgccttcgcgcggggcgcgaatcgaaccatggacggcatcgcccttgcgcaggccgtacttcttgacctggcccatggaaacgtacacgtcgttcgggccgggcaggtagccggaagtgcgcacaaaagcgtaggagtcgagcacgtcgacgatgccggccaccggcaccagatcctcctgcggctcttcgcggcggctatcacggtcattgcgatcgctacgattatcgcgatcatcatagcgacgatcatcatcggcgttgtcgcgatcacggccacgcatgcggcggttacggcgatcgttgcgatcattacggttatcgcgatcgttgcgatcgctacggtcgcggcggttacgacgcacaaactcgtgatcgtcgttctgctcgccgtcttcggacgtttcctcgtgcttctgcgtgggcagcgtggccaggatatcgtcgaggtcacgcacggtttcttcgctgttttccgcagtgcgacgacggcggcgaggctgctcgtcctcatcatcacggactcggcgaatcagcggaacttccacgtcctcatggcgctcgcggcgacgctcggtaggcgctgcatctcccaaatcgagcgtggccagcagatcgccggcctcatcggccttcttgcgcggcttgcggcgagcgaaatcggactggtcgtcatcgcgacgatggcgggccgcacgcggttcggatgcggcatcatcggcggccttacgacgggtgcgtcgcggttcggtctcgtccttcttggcatcgtcggccacgggaagcggcaaatcgagctgcggttccgtggaggccggagccggagccggcgactgggtggccacgtcagcattgtctgtggtattggcctcagcggcatcggactgcggagccttgacgaccttggcggttttggcggccttgggagcgcgcacggtcacaccggccggcggctctccaccattgcgcgccgcctgcagggtggcgagcagctcgggcttgcgcatggtcgacgtgccgcgcaggcccatctgtttagcgagctctttgagctcaggcagcttcatatcctcaagattctggctatttgccactggttgccctttccataccgaacagacccatgcctatccaggcgttaagagtgattattgcggttgcaccgctcatgaatgttcgctgcgtctctgagttttcacgaacttcgtttactgtacaacgccaactcgaccaacgcaaaacggcccgccgaaaaccaaaaaagctccctctgtgacgagggagctcaacaaggtttattcacttttcttcgtggtaggacttttcggtgttgacggaccacacgttcttcttggacgtcttgccggtcttgatgttgccgacggcctccatggcggtggccatggagtggtccatgttgttgtagcggtgctggccgttgcggcccacgcagtagaggttgccgaagccgtcgaggtactcgatgagctcgtccatgtgctcgtaggtgtcgaagtaggcggggtacgccttcttgacgcgctcacgatgggagtcgatgacctcgtccgggccgttgatcacacgcatgcgggtgagctcggagatcgcgaacttggtgacgtcctcctcgctcatgttccagaacgagtcgccctcctcgcagaagtactcgaggccgacccacacggtgtcgtccacgttcttgaccaggtacgggctccagttgttgaagatctgcagacggccgaccttgtagcccgggtcctgcacgtagatccagcagtccggcacgatcggcggattgccgagggtggggatgttggtggtgttcttgagcttcaggtgcttgaccagcaggcccacggtcacgaagtcgcggtacggcaggccgttggccacctcggtcatatcggccggggcgggcttggaatcagcggcctcgggatcgtcgccggccgcgtcgatggcgttgaccaggtccttgaccggcatcgaggagatgaactggtcgccggaaagctcggtgcggttgccctcggaatcctcgtacaccacggaagacacggcgccatcggtctggcggacctcgaccaccctggcgtcggtcagcaccttgacgccggcggcctcgcaattggactcgacggtctcccacagctggccgggaccgtacttcggataccagaactcctcgatcagcgaggtctcgacctccgcgttggagcgcttcctggggctaagcttctggaaggcgttcttgagcacgcccatgatggataggcccttgacgcgctgggcaccccagtcggcggagatctgggaggggtggcggccccacagcttctccgtgtagccctcgaagaacatcgaatacagcttgcggccgaaacgattgatgtagaagttctccaggttgtcttccggcagcttgtggaacatggacttcaggtagctgaagccggccaccatggtgagcttgaagcccatggccttcaacgtgttggggctcagcgaaatcgggtaatcgaagaagtggcggttccagaagatacgggacacgcggtggcgcttgagcatcaccttgtcctccgtctccggatcggggccgcccggctccatgtcgtggtcgcggccgagcttcttgtcatcataggagggtgcgccctgcaacggcagaacggtcttccaccaatccatgatgcgttcgtctttggagaagaaacggtggccgccgatatccatgcggttgccgttgtgcttcacggtgcgcgagataccgccgaattcgcgggtcccctccagcacggtcacgtcatagttttccgcgccgccatccttgacgagttcccatgcggcggtaagtccagccggaccgccgccgataatcactacggattgcttgtcggtcattatgctccttataaacgcaaaatcagagacagtttactagaagccccggaatcgcacaccgaaagatgagcgaatgcttacagaattctcccgatatacgaccgatgcgccgtcttccatcagcagaaaggcgacgcatccaatcgtgaggtaggggtattcggcaacgctgcgtcacgcacagcgcggcgaatcggtttggtcttgggctaattcgtcagcgacgaaccttccatagattcagcgagattcctgcaagtgcaaacagcatcatcttctatcaaccgcaagcaaacaagacacacgatggcaaggttacgagtttgaacttttgctatgcgttgtatgaacaatgcgcgacgccccgccgtaagatgacggaatgccgcgcattgtcaatacaggctgtatcagacgattgcctgtcagtgaatatcgtcgggaatgtcgatatcggttttctggacttcctcgacgttcacgtccttgaacgtcacgatgcgcacggacttgacgaaacggctggaacggtagacatcccatacccatgcgtcagtcagctgcacatcgaaatacacgtcctgaccagcggaacgcacgttgaaatcgaccttattcgccaagtagaagcgacgctcagtctccaccacataggtgaacagcttgatgacgtcacgatattccctatacagcgcgagttcggcgtcggtttcgtaattgtcgagatcctcggcactcatgcttgtttactcactcactttccgtatcgcgtttgcggccgcggcccagcgtacgccaccatgcttcctttgagggcttgcgttccgcctggccgtacggccagttgctttcctcttcgagactgtggcgcgtgttcttctgcgtatcgtcgtggtgcccggcctgtggctcgactggctgtgcggccgccggcgtctgggcctgggactgcacgtcactcgtcgtgacggcggctgcctcaccacgctgtgccggctcgggttccggcttgttctgctggatggcgatggaatgctcacgcgcggacagcgcttccttgacacccgggttgtcctcaatcaagtgcataccaaaagcgtcaagcgaacgaatcgggtcgtactcgtcgaccaacgtgtccatgacgataaggtcctggtatttgttgttttcgacatcccacaacgcgtcgcgcgaggtgccggacggcacgaagccgagcgactggtagaccgaaatcgaacggctgttcttttccggcacgctcacccagatgcggtgcatgcccaggccggccggttcgggcgcaaagccgtaagtcatcacacgcggcatggcgtcacgggagtagccgcggccacggtactcacggcccaagatgatctggatgcgggcggacttggaccagccgtcgatgtcgatgaggaaaatcatgccgatgacattatcggtgctggccgcatcgagctgaccgtcatcgtcatggtcggcgtcagtcaatacggcccatgcgatggtgcggcgggattccgggtcgcccacgccggattcggcgggtgcctgaccggcttcccaggcttgggagcggcggacccatgtgtgtacgatggcgcgttcggtgaccgcatccttgccggtgatcttggatgcgccatagaaggcatcaagttcatccaaacgagccaggtcctcgacggtggcggggcgcaggtgcaccatttcgccacggattggcggaatgacgatgctctgtggcagatcgcgcttcagttgcgcttcggtagccatgctcagcgtctcgttggttgcggtcatcggtatacatcccccggttcggcttgtttcggctcacggtccagtgccgaacatatcttactcgactgggtgaacgctggaaatgctctgagacgactttcttacagaatcaataaaggctcccgctggcgggagctgtccaacgaatttgaactggaggatttccctacaaataagtgctcccgctggcgggagctgtccgcgaagcggactgagggtggtcatccgtacatggcgaccaccctcagtctcactccgttcgacagctcccgccagcgggagccagtgaatctaatcagcccttgatcttgcccatgacgaccttggtgacggccttggcgtcggcctgaccgcgcgtggccttcatcacggcaccgatgatcacgcccatcggcttcatgttgccgctcttgagcttctcgacgacatccgggttggattcgaacgccgcgtcgacggccgcctcgatggcaccgttgtcttcgacgatcttgtagtcgtgcttcttgacgacttcatccggagtgccttcgcccttaagcacgccttcgacggtctgcttggcgagcttgtcgttgagcttgccggaggcgatgagcttctcgacctcggccacatcggccggggtgatcggcagctcttcgagggacatacccttggcgttggcttcgcgggaaagctcgcccagccaccacttgcgggcaccggcggccttggcaccggccttgacggtttcctcaatcaggtcgagggcgtcggcgttgaggatgtcgcgcatctgcagatcactcaggccccactcagacttgaggcggttgcggcgctcacgcggcatttccggcatctgggccttcatctcctcgatgtgctccttggtgatgtggagcatgacgaggtcggggtccgggaagtagcggtagtcgtcggcatcggacttcagacggccgccggcggtggtctgcgaagcctcatcccagtggcgggtctcctgcagaatctccttgccgtcgtccagacgggcggcctgacggcggatctcgtactggatggtcttctcgatgccgcggaacgagttcacgttcttggtttcggaacgggtgccgtagggggcgtccgggctcggacgcagcgagacgttcacgtcggcgcgcatgttgccctgctccatgcgggcatgggagatgttcaacgcacgcacgatgtcgcggatggcacgcatgtaggcaccggcgatttcgggagcgcgttcgcccgcaccctcgatcggcttggtgacgatctcgatcagcggcacaccggcacggttgtagtcgaccagcgaatgatcggcgccttcgatacggccgtcggcgccacccacgtgggtgttcttgccggcgtcgtcctcgatgtgggcgcgctcgatcggcacgcggaagacggtgccgtcttccagttcgacgtccaggtagccattgccgttggtgggcttgtcgtactgcgagatctggtagtcacgcggcatgtccgggtagaagtagttcttgcgggcgaactggctccactcggcgatttcgcagtgcagggccaggcccagcttgatcgcgtaatcgacggcggtcttgttgatcaccggcagggagcccggcaggccaaggctcaccggggtcagctcggtgttcggctcgccgccgaactcgatgtgggccgggcagaacagcttggtgttcgtggacagctccacatgggtttccagaccgaagaccacatcgtacttcttggtggcatcggcgtacttcatcagtttttcagccatgatgttgtttctttccttccgatgctcacttgcctagaccgtcaagccacggggtcttgaggtcgttccagatcgggccgttccagctgtcttccagcgcggcttcgagggccgcagccggcttgtacatgacttcgtcgcgctgctgcggggcgatgaactggaagccgacgggcaggccgtcgtcggacaggccggccgggatggacatggcaggcacgccggcgaggttggccggaatggtggcgatgtcgttcatgtacatggccagcgggtcgtccatcttctcgccgaacttgaaggcggtggacgggctggtgggggccacgagtacgtcggccttctcgaaggcgttgtggaagtcccggatgatcagcgtgcggaccttctgggccgaaccgtaccaggcgtcgtagtagccggcggacagggcgtaggtaccgaggatgatacggcgcttgacctcgtcgccgaagccggcctcacgggtgtaggccatcatgttggcggcggtctgaggcacgccggtcggcggcatcacgcgcaggccgtagcgcatgccatcgtaacgggccaggttggagctgacctcggacggcatgatgatgtagtaggcgcccagcgagtagccgatgtgcggaaccgagacctcaacgacctcggcacccatctccttgagcttgtcgacggcctcgttgaagcgggcctcgacgccgggctggaagccgtcgccgccgagttccttgatgaggccgaccttcatacccttcagatcgcgcttggcgccttcgcgggcggcggcgaccatcgggcgcgggccttcggggatggaggtggagtcacgcttgtcgtggccaccgatgatctcctgcagcagtgcggagtcgagcacggtgcgggagaccgggccgatctggtcgagcgaggaggccatggcgatggctccgaaacgggagacgccgccgtaggtgggtttgacgcccacggtgccggtcagggcgccgggctggcgaatcgagccaccggtgtcggtgccgagggcgatcggtgcctcgaatgcggcgactgcggaggcggagccaccaccggaaccgccgggcacgcgctcggtatcccacgggttgtgggtggtttggtaggcggagtgctcggtggaggagccttgggcgaattcgtcgaggttggtcttgccgagaatcggcatgccggcggccttgagcttttcgatgacggtggcgtcgtacggcggcacccagccctcgaggatcttggaggcggcggtggtttcgatgcccttggtgacgatcatgtccttgatggcgatcggcacaccagccagctcaggcagggcggccttgtcttcggcggacttggcgtcgaaggcgtcggcctgctcgagagccacatcgccggaaaccttcaggaaggccttgatagacggctcagcggcttcaatcaccttgaggtgggcttcgacgagctcgcgagaggtgacgtcgcccttcttgatggcagcggcctgctcggcagcagacagtttgacaagagttgcggtttcgttgctcatcgattactcctcgcttcccaggattcgcggtgccacgaacatgccggcctcggtcttcgggccaccggcgagcgcctcttcctgcgtgagcggggtttcggcgacgtccgggcgcaggtaggcttccagcggaaccgggttggcggtcggcggcacatcgtcggaggcgacttcctggaccttgttgatggagtctgcgatgacgttcagttcgccctgcagacgggtgatttcctcatcggtgagcgcgattcgggccagatcgcccaaatgcacgatttcttcacgtgaaaatgttggcatggccataactatatgagccgtatgtgacacgcagttgtcgggaagcctcattttcccgcctactggagcccttcagcgaatcagaagctcaagccggtcgagcatttgccccgctgctggcttcttcggcggggcaaaaccgttgccggaccgcaagttcaccttactgagacgactcgcagcagagcaaaaccgcgagctgaccgatgaaacgccccgctcagccatcccagcaaaacaaaaccgcggtccaaccaataaaacgccccgctgagacgccccgcagcgaggcaacgccacggcccaaccgcaaatgtgccccactgaagtatctgcatggccaccctaataagctcacaatgagcccaaacacacctacatcgaacatatgaacgacaatcgccctgcgcccctcgccagttatccacattttgcatacccacccaaaagaatccacataatcagtccaatacggtcagatgcctgataatcaggcaaaaacacacatctaggcaccgaagctagaaccacataaccccagacagatagacaccatgttcaccattggcataccgtcgaatcatgaaacatcacaaagcagtggacatactcatcacgaaggctgaagcaacgcaacagtgcgcttatggaacaaccaaggcacaccgctcggcgctggctcggcgcgtgcaggcgcgcgaactcaaacgtgtattccccaacatgtacgccgcttcggaatactgggattcgctgcaacccgacgaacgtatcagacatattgcacgaactcttcataacagacatccggattgggtgttcgccggggtcacggcagcggccatccacgattttgaacaccaatggcatcttcatgctggcaccatcactctcgccacaacatcacgaggccccaacgccagcagtgcaaaggtcaaacgcatcttcacgtcaagcagcacgccagaatatgccaatggactcccggtgaccagcaaagccagaacggtggtggattgcgggctgtccgtcgacttccgatttgcactgcccattatcgattcggcgctgcgcaacggcgtcgccatcacggacattctgaatgtgtgcagcactatgcgacgtgattgcacgccgatattccgcctactgcattatgccaatccggcgagtgagaatggtggcgagtcacttggacgaggcaccatcatcgcaggcggcctattagccccagaactgcaacaaaacatcaccgacccgcaaaccggtgctctgtatcgcgtggatttcctctggcggctacctgagaatcggcttatcgtgggcgaattcgatggctatgaaaaatatgtgaacccggatatgaatgaccgcaagggtgttcgtggtgcagttcaagcggagaaagaacgggagacggcactgtaccgggccaaagtcgacaccattgtccgattcacctatgaggaggtgatgcaacaacatcctttactcaataagctgcgggcagccggcatacctcatgctggaacagtgatgggagctggttaagcgcagtgaaccacggtggtcaaatccatggggtcagagtcaccagaaccatggtcactgcagaaccgccaaagccatagccatgacaaactgccaggaccatggccgaaccggcagaaccgccaaagcagtaacccgcgttatttgatatccgatatccgcttttccggtgatgatgagaccgccgatccatgcggcggcagcccaggcgatgagaatcaggccggactgccaccattcgggaatccagtagtccggtttaacggcttcggccagtgtggactgcgcggagctgctgatgcctgcggcgagcaggatgccgacgatgccggcggcaaatgcgaattaatgccgcggcgatggatttggtggcgtagatcatgcctctaatgtggcccatattgggcagatgcggcaggattgtcgtcgcatggctacacgcctgatacggcgtgttgggcaatccatgcgtgcatggccacggccgccgcagcgcctgcattaatggagcgcacggaaccgaattgagagatgtagaccacatcgtcggccaattcgagggccttctcgctcaatccggggccttccgcaccgaagagcagcaggcaccgcttggggaaggtataggtttccatcggcactgcgccgggaatgatatcgagggcgatgacgcgggcggcttgaagctccttgatgcgcgcatcacaagcatcgatttcggccagcagctcatgaaggtgcttgttgtctccatccacagccacatcatgcgcatggatggcggcggcaccggccttggctcgttcataggcgatttcaccggcgatgcgatgatgccagctttccaccagttcggcgatggaggggtggtgttcgacgtgctggtacagttcggtcatcaacgcgcccttgcgattccacttatgtggaccgacaatgtgtacgcgcttggcctggaaggcgttggcggtgcggaccatggaaccgatgttgaaatcgtgggtccagttttccaccgcaacttcgaagtcatgacgccctcgagcgtcaagatcggccttaatggcagcgacggtccagtagcggtaacgatccaatacgttgcggcggtcgccgtcgttcaacagcaccgagtcgaaacgaccgtcataattcggagaagtcggatcgtcgggacgaggctcgccgggatgggtctcagaccacggcccaaggccgatttcacggaattccggttcacctgaagctttggcagccaaagaaatctggttgggtgcgtgcaatctttctcctcgataacgctattcaccggttcctcttagtcaacttcgcggctcagcccggctgactttatgcgagggaagtcaaaggtggatttaccgcagttcggattcgtcgaagacctggatgaaggggagcgtttgctcgtcgccggtggaggggttgaccacattgatgtctttggcaccgccaccgaccagcgaggcgatggccacgaccttggcacccagctgctccactatgccaaagtcgaggctcagctcattgccgttgcgcagggtgaccagcgagctggtctgcacgtacgacttttcggacagccaagcatccaacagcaccacacggcggccttcgatggaggggcccttgatggacgggtagacgaagtccatcacgaatccgtctaggtcctcgccacgagaggcggcggcctggatcatggcggacaccatgggcacagatgctgcggtcaaggcaccaacagcatcgaagtcatcaaccgaatagcccgcatcttccaaagcgtcaatcagtacatggcccatgacggtggcggcatggtggtcgaaagtcaccgcggcaagttcggagaacggacggcccaccacatgctccctcagcaaggtggctagctgctcacgcggctccagcatggcaaagtcattatggctcttcgcgacggcgaggtccggggtaccagtggggcggaatccagattcagtcatgactccagactatcgcctgaggcagtcagatgagtatcaccttcatcggccggcaccacttcaggggcggacagttcgctcacattgcctttgtctgattcgatgatcggtacttcctcgatgatcttggtcggttcgattttttgcagcttgcgagcggtgggcaacacacggcgttccaagctggacgcgaacttgttgtaggcgctgaccgtcttggtgatctgggtgcccaatttgatggcataatcacccaacgtggagaaccgttcgtaaagttctcgggacaaatcgaacagctgcttggcgtcatcggtgagcgactgctgctgccaggcataggccacggatttcagcacggcccacagcgtgaccggcgaggtgagcgccactttgcgagagaacgcatcatccatcagtgtggggtcggcttcgagcgcggcctgcaacagcgcctcattggggatgaaggccaccacaaaatcgggtgccacatcaaaggcattccaataggccttttcgccgagagcacgtacatgctcgcgcaacgccttggcatgggctcgcagcaaatcatcgcggcgggcaatatcctcggggctggcggtgtccgggatctcgcaggcacgctggtaatcggcataaggcactttggcatcaatcggaatggtcttgcctcccggcagatgcacgatcatatccgggcgcaacgtacgtccatcggcatccgtgaccaccacctgaatgtcgaaatcgacatgttccagcaatccggcggactcgacaatgttcttgagctgggcctcgccccacgcgccacgcaccttgttgttgcgcaatgcggcggacagggaactggtttccttgtccaaacgggcctgctggtcgttgagccccttgagttgggctcccaatgcgcccatttccctcttgcggccctcttcgatctgcgtgaccttgttctgcaaggtatcaagattcttggccactggcgcaagcgcctcgagtaccttgctctgttctttcaaacgtgcttcctgttcagcacgcttggcctcggcggcctgagcatccgcctgacgcttccgttccgcctccgcagctgcacgctcacgttcctgctgaatgcgaatctgctcagcctgctgcgcctgggcaagttgtgacttggcgaaagccaattgctggttcacgccttcaatctgagcctgtgcggcagcattgcgagcactgagctcagcattctcgaatcgcgcattctccagcgaggtcttggtctcctccagctcctcgcttttgacgcctcgagccatctcctgacccttatggcgccccagcacgaagccggcgaagaggccaagccctgcaccaaccactagcacgacgatgacgataaccacggttcctatttgctcaaacatggtacctagtatgtcatcgatggtgaatgacggtaaatttttaccgaattcgacggtttcaagccgttaaacggatgctcagcagcccacattggacatttggactcatcgcagtcgagcatcaaccgttattgcgctgtgtcacacccgaacgccggatgtccttccatgatttgccagcgcgcgtcatcatgcggcagaactcgtcacgatttgacgagacgtgcgatggccgcggaagcctccgcaagtttttcatcagccacctcgccgccctggaccgacgcctgccgcacgcaatggttgagatgatcgtccagcagcaataacgccacggatttcagcgccgagttcgacgccgaaatctgtgtcagaatatcgatgcagtatttgtcatcctccaccatctgtgtgatggcgcgcacctgcccttcgatacggcgtaatcgtgcgatgaccttggccttgtcttcgtcataaccatgcatcgcaacccccctgatacttatccgtcagctgaacacaccccattatataccctctaggggtatagggtatacactgttgttcagtacatcaggagtgggaaggaacagttatggagttcagcatcttctcgaccgtcgcggcgctgatagtggcggccgcattgacatggttggtcctgcgattcttcttcggaacgcagaaggcaacggccggggccatggacgcttccggcgaacgccaatccgcaacaatcactgtcaagggcgggtactcccccgccgtggtgagcatgcgtgcgggtacgccgatcacactagccttcgaccggcaggagaccggcgaatgcacctcgcatgtggtgtttgctgatctgggacttgacgccatgctgccgggcaacgccaccaccgacgtggaactgccggcgttgccgccgggcgagtatccgtttgcgtgcggcatgaatatggtgcatgggatgttgaaggttgagggagaggacggctcggatgagaacacgccccttcctcatcctgatgcttcgtatacggcacctaccgccgtggatgcggcggagggggagcgccgggaggcggctgaacgcgccaatgagatcaaggcgctgacgaagctggtgattgtgggcgcggtactgacgttgccggtattcgccgtcaccatgctgcatatggccaatcccacgctggtgccgcattggatggtgaacccgtggttgcaggccatcctgatcacgccggtgatgttctactgcgggcgtccgatccacacggtcggcttccccgcgttggcgcatcgctcccccgacatgaactcgctggtctcactgggcacttcggccgcctacctgtattcgctggtgacctgcatcgccccgtgggtgttcccggaaggctcgcgcgaaccgtatttcgaatcggttggcgtggtcatcaccttggtgctggtcggccgccttctggaaaccaaggcccgcgaaggcaccggcaaggcggtgcagtcgctcatcaaactgcgcccgcgcaccgcgcacaaactcaacgccacttccgcagacaatgtggacggcatcgaatggcgcaatccggcgtatttcacggacaccgacatcgacgccatcgccaccggcgacctgctggtcgtcaagaacggcgagcgagtgcccacagacggcatcatcgtggccggcgaggcgcatatcgacgaatcgatgatcaccggcgaatccaagccggtttccaaaaccgtcggcgatccggtaaccggggccaccgtgctgctcaagggcgactgcgtgatgcgcgccacccaagtcggcgcggacacggtactctcgcagatcgcggcgatggtggcccgcgcccaggcgaccaaggcgccggtgcagcagctggccgataagatcgcccggtatttcgtgccggcggtgatgatcatcgccatctggacgttcgccatctgggtgtcactgggcccggtgccgcaactggcgcatgcgctggtcaccgcggtcagcgtgctgatcatcgcctgcccgtgcgcgctgggactggccacgccgctgtcggtgacggtctcactgggcttgggcgccaccaacggcgtgctggtcaccagcgccaaggcgctggaacaggcgcgtcgcatcggcaccgtggtgttcgacaagaccggcaccatcacgcgcggcgtggtggacgcggccgccgactgggacaagccgagctacgagcaggacacagtcaaggaaggctcgcgcgaggccatcgcggcgttgcgcgcacgcggcatccgcacggtgatgctatcgggcgacaaggccgaggtagccgggcgcatcgcccgcgaagtcggcatcgatacggtgatctgcgaggtcaagccggacggcaaggcctactggatcgccaaactgcagcgcgaacgcgacgaggccgccg

SEQ ID NO: 779 - DNA, 5838 bp, Unknown
  R14_18m  MAG No. k141_2621
acatgggccgtgccgggtacgattttcagtcgccagacaatgaaaaaccgcgattggaaagaggcatggagccatgtccaaggaaatcatacagttcgaccaggccatgttcgagagcaagctcgacgccatggtgcgcgaaaaggtcgagcggatcgtcaacgcgatgcccgacgcttcaggcgaacgagatcgccaacgccgcgagatacgagcgttccggctgatggtggccgaccggtgggtgggaatcagttgagattattcttgggtgcctgtaggtgcctcgtggaaaacgagcgtaaccggcaggtttcccaaaaatcgaaaaccttggaacaaagccaaaaacagttggctaggattatcatgcgaggtgcgcatgataatggtagccatggctccaagtgtctcatgggcttgagaccggcgatggtgcgattgcgggaatggcgcggagagccgtggactggctgcggccgatagccgggaagccgagccgcagcgtgaagcgtcatacgagttgtctcgcgatggccaacgcgccggcaacgaccatgagcgccgagaagacacgcaaaagagtccttttgcgttctctttccggtttttggatccaatcacgacgtatatcaggaccaatccgacggccagcggcaccaaggccagcggaaacagcggtttttccatggcatctcatctcgaatgctgtggttcagatttttcgatgttcggtttttctgcgcttactgacaagagccatggagcagcatgccgatacgcacagattcactatgcaggtcgccgccggcagtagccgtatgaacggctgactgtagaaatcgaggacatctggatccatagatcctgagtatatttcaaaaaccggatatgatgcgagagccggcgccgaactcacgaggaacagtatccaaatgacgggcaatctcaggatggatactgttcggcctttccgatggacttctttcgagaacatgaaaagagcccaagaggtcactgcgattaatgcacccgcgcaatacaacagaccagagaactcgctacgcatgattccgtcctcacttcagtcgcaggtaatttggcttatcgatcttctggctggttcgagattaccatacctgacatggcagtcgaattgcccgttgtctattggcagagcatccgactgttaatcggacggtcgctggttcaagcccagccgcaggagccagacaaaaacccggaacttcggttccgggtttttgttacccgcccccccgaaactcctttatcaaggaatcatccataagggatgccgcagcagacggtctccaaggcactacaccgtgctcatccccatggacgacggcaactggcacgtcaccgtgtactgtcccgcctcgctggacggcccactgctcgacaaggattccaacgaattcgacacggacgacgtgaaactcggcgacaagtcgtacacagttgccaatccattccacctggatcacgcacccggaacagacggtttcatcttcggccctgacaccctccgacgatagcgatggactaaccattcaaccgcacgcgtaggaggagcgcattccaaccatgaatgaatgacatatagacgtcaagggcttgcggacatcgtgtccgcaagcccttgacgtctcaatccaacgaaatatcgacttttacccgtttgtcggattcaggctttcgcgcaagtccggcgatgaggagggccaccagcagggggatcgtcgtcagtgtaccccaggaaatcgagaacgtgtcggcgatgtagccgcacagcggggtgacgaccgcggtgaaggccatcaatacgagcgatcccacggagaacgcggtcgcgcggatcgaatcgtcaatgctctcgtgcaagctgctggagatcgtgttcgccacgtacatctgcgcgcaggagaacacgaagaacgccaggatcctcaccgccggcatcggcgtggccgcaagcaccaccgccgacacgatgagcacgaggatcgcaatgtcgccggaacgtggatgcagccgcagcatacccagacgactgccgacgatctgcgcgatattagtgaacactaggccggcgaactgccaccagaccccggtctggtggcccatcagcagcagctgccagaacgtcagcaccgacaacgtacccagattgaacaccaccatattccatatctccggcttccgcagcagcacggccgcggccgccacggtctgcctgacatgatccaacaccgtcagcgaggtcccggactcgcccggctcggcggatccatcggattcgacggacgcctcggcctgccgttccgtcgtcccgctcccatccgtcgctgcggccttggtgcgcgatccggccctcatcagaccgagaagcgggatgatcgccaatacgtagaacaccgtcgcgcccagccagatcagctgggagtcaagcaggaacagcacggcaccgaccgcaccgctgcatatcgtgcacgcaccgatcatcgccgacagtcttgacaccaaggtcttcatacccagcgagggatcgtgcttgcgggcgtattcgatgtacagcgaggacgccgcgccgctttcgaccgcggccccgatgccggccagcacgttggccaggcacagcacggcgaagttcgcggaccagaacagcatcaatatgaatcccgcgacgcggcacaacacgccgatgatcagcgtccgttcccgggaccaccggtcgaacagcacggacgtgggcagctcgctggccgattcgctgacgtcgaacaccacattgacgatggagatcagcagcaccgacaggcccacatcatgataggccaccatatagtagaccgaaaaacatccggtaccaagataaataagcgcattatacaaacaggcaaaccgaaccatcaatcattcccttacataaacaaagaaccggtatacgtgggactgtctctcgaagtgtgtaactggccttaactggccggtcgtgtggccggtcggaaaggctggtggacgatgtgtgctgggacaatgggaaacatgacaccgacgaagaagccggacgcggaaaaacgcaacgccgagcgggaggcagcgctcacattcgtgcgcatggccaaggaaaaaggactggacctgacagggcccgacggactgctcaaacagttcaccaaaagcgtgctggagacggccctggacgaggagatgaccgagcacctgggccgcgccaagcacaagaaatccaaggacggcagggccgcgaacacgcgcaacggcaccaccgccaagaccgtggtcaccgattcggtaggtccggtcgggatcgaggtgccgcgagaccgcgatggctcgttcgagccggtcgtcgtcaggaaacggcagcggcggctgcccggggtgggcgaggtggtgctgtccctgtatgccaggggcctgaccaccggcgagatcagcgcccacttccaggagatctacggggcggacgtgtccagggagaccgtcagtcgcatcaccgagcgggtcgtggccgagaaggacgaatggtgctcgcgtcccctggatcgtgtgtacgcggccgtgttcatcgacgcgaccgtcgtcaaggtgcgcgacgggcaggtcgccaaccgcgcgttctacgtggccgttggcgtggatctggagggcgaccgcgacgtgctgggcatctgggcgtcgcccgccgcggagggcgcgcgctattggctgtcggtgctcaccgagctgaagaaccggggcgtggacgatgtgttcttcctgatctgcgacgggctcaaaggcctgcccgacgcggtgggcgcggtatggcctctggccatcgtgcagacctgcgtggtgcatctgctgcgcaacacgttccgccacgcgtcgaagaaggactgggacgccatcaaacgcgatgtcaaacccatctacaccgcggcggcggcccgcgacgcgatgctggacaagtgggaggcgagatatcccgcgatccgcaggctgtggatggacgcgtgggaacggttcataccgttcctggactatgacgtggagatccggcgcgtgatctgcacgaccaacgccatcgaatcgctcaacgcgagattcaagcgctccatccgcgcccgcggccacttccccgacgagcaggccgcgctcaagtgcatgtacctgaccgtccgctcgctggaccccaccggcaagggacggatacgatggagcgcgcgccggaagcccgcgctcaacgcctttgccatcaccttcgccgaccgctggccaagcgagggaacacaacaatgaaaacgccagttacacacttaacgagacaggcccgcgtctgggccggtggccggcgatccgctggtgccgctggtgccggtactggttgaagtcgatcccgatggatctttttgcgtcgagccggtgccggtgccgttcgaaccggtctggctgccgccgacgccttggctggtcgggtcctcggtggtcggattctttgaggtgccggtgccgttcgaaccgttggcggtgccgtcggttttcgaatccgaggcgccggcgccggtcgaacctgaggtgccgttggcgtcgaagtcggtggagggggcgtcggttttcgaatccttgctggtttccttcgaatcatcgccggtgcccgtctggggcagagcgttgttctgatcgggggtgcccgttcgcgtgccggtgtcgttgcgcgcgggcgtggtcgtggtgggggatacgagattgtccgtgccgcgtccctgcgtggccagcatcacgacgccggccgtcaccgccacggcgagcaggccggacaccaaggtgacgatcatggcggtgtgcttcgaagcgcggaagcgggacttgcgcagctcatcgaccgagtacgtcctgccgttcgcccggctgaacacgatttcacgcggtctgcgtgtggaggaagcatcatcggcggtcacgcccgtcgccgtatcgggctcgtcccgaacgtcggtccggctgccggccgttcggggggtgccgccatcggcatcgccgttctcggcgtccttcgtgatcccgttgccggaggacgaggccgattggagtttttcgccggaggcggtgagcacgttctggtagatcttggtggccacggcggagacgacgtaactggccgccgctccgatcaccgaaccgccgatgccgatcttcgatgcgagcaggaacgaggtgacggcggcaagggtgcccgccacgatggatgagagggagattccttcaaaaaacttcttcacaatgcacgaccgtagggtgtcgggctgacaggttgcctgagactcgatggaagcggggcgaggcctacacgagaccttcaaaatcggccttcgtgcaggtccgacacgccctgcagcgcacacacgtgcgtttcgcgtcgccgcaggccgcgggacatcgtcaattacgatgcagcgactgcccggtcggtctgatcaccgacatcagtacggcggcgaaaatcaaagcgaaacccaccagtgagctccacatgatcctctcgccccagaacagcgcggagaacgtgacggcgaacagactttccgtacacatgatgattgacgcctgcgaggcaggcacgtgagccagaccgatgttctgcatgatctgggcactcatcgtggcgccgaggaacagatagagcacgctggccactactgagggtgccagccagctggcgttcggcatgggttcggtgaacaacgcgccgatgatgaacaatacgccggcaacgccgaactgcacaaaagtgacggcgatagggtcgaa

SEQ ID NO: 780 - DNA, 17181 bp, Unknown
  R14_18m  MAG No. k141_2749
gcccatagccaacgcaagaatctcccgtatgttgaactcccagtagccgtcatcgacgggtctcgagctggggagtttgccccggttgagccagttgctgatccgcttgcggctgacctcgtacccgtagtttcccttgagccattggctcatgcctgccggtgtcttggtcaggtgtattgcctcggcctcggcttggctttgctcgcgcagctcctgcacgttgatgggattgccgcacctgcacaggcgcagcgcctcgcccttcgcggccatcacttcgcgtctgcattcggggcagacgccgattatcctgcgggtgcgcggcctgcggtcaaccttggcagagcgtccatggtgcctcgacctgctggctgccgcagtattggcatggttcggtggtgatgactgcacacgttgtactgtagggaaccatgaaagtcgtattgcaacgagtgtccgaagcgtccgtggacgtggtcaatgaattgggcacgctggatcccacgttcgagccgcagcagattggcccgggattcatgattctggtgggcgtcaccgatgaggacggcgacaagcagatcgcctggctggcccataagattctgaatctcagggtgttcgaggatgcgcagggcaagatgaaccgttcgatccaggacatcggcggcgagattctctccatctcgcagttcacgctgttcgccgacgtgcacaagggcaatcgcccgagcttcatcaaggccggcaagcccgagcatgccgatttcatgtggatcaagttcgacgaggcgttgcgctccgggggagtgccggtgaaggaaggtcgtttcggtgcgcatatgcgggtcgggctggtcaatgacgggccggtgaccatcgtcatcgacaccgagcatgacatgcctgacggaacacgctgaattgcgatagtaatttgacatcatatcccgttcccaccaatatgttactaaagcgctttagtcttctgcgggcgagggcgcatgtcgatatgtttcccatgaacgggcagcacaatgatgtggccgcacaagcggcagagataaggggagtgaacagcagatgttcctgaaacctgaacagcaactggagcggtgcaagcgcatagtgcgccagcgcgtggaccctcatatccacccatcgatcgcacagcttgcggtggagtcctttgacattcccggagagccgatgcccactgacgagttcttcgagaagctcaatcgaggtgacatcgacttcaagccgtttacgctcggcggtgaatggggcaccacatggggcacggtctggttccgcctgaccggtaccgtgccggccggctacccgaaaggcaagccgctggagctcatcctcgacctcggctggtacccgcactcctgcggcggccatatcgagggcctcgtctaccgtgccgacggcaccgccatcaaagccgtacacccgctcaactattgggtgccgttcatggatgctgagggcaacgcgcaagtgccggtcgccgaagacggcagcttcaccctgtacctcgaagccgccagcaacccgctgctgctcggcgtgcctccgttcattgagaccgaactgggcgaccatgccaccggcaagccggacgagccgtacgtattcaagtccgccgatctggccgaattcgatgaacgctacgagaactactccgtcgatctcgacgtggtgagctccctgatggaattcgccgacaaacagtcgccgcgctactggcaactcgccaaagcattgcagcgttcgctcaacgcctacgacgagcgcaaccccgaatccgtggaagccgcgcgcgcagcactcgccggcgtactggccaagccggccaatgcctcggccatgaacgtcagcgccatcggccacgcgcatatcgactccgcatggctgtggccggtgcgcgagacccgccgcaaggtggctcgcaccgtatccaacgcattggcgctgatggacgccgaccccgacttcaaatacgcgatgagctccgcccagcagtacgcctggctggaagaggatcatccggacatcttcaagcgcatgaagcggcgcattgaagaaggccggttcatcccggtcggcggcatgtgggtggaagccgatggcatgttgcccgccggtgagtcactgatccgccagattgcatatggccgcaaatacttcaaggaacatctcggtgtggagcccaagggcgtatggctgccggacagcttcggctacaccggcgcatggccacagatcgcccgccgtgccgggtacgaatggttcctcacgcagaagatctcgtggaacgataccaccaagttcccgcaccactcgttcatgtgggaaggcaccgacggctcgcgcatcttcacccacttcccaccggcggatacttatgccgcttggtgcaaggttcaggaactcgactacgccgagaagaacttccaggacaaggatctctccgaccgctcgcttctgctcttcggtttcggtgatggcggtggcggccccacgcgcaacatgatggagcacctgcaccgctacgagaacctcgaaggcgtctccaaggtgagcatcgaagagccgaatgacttcttcgacaaggcgcatcagcagcttgcagagaacgccggcccagaaatgcccgtctggaagggcgagctgtatctcgaactgcaccgtggcaccttgacctcgcaacaggacatgaaacgcggctgccgccaagaggaatcgctgttgcgcacggtcgaatacctgggcgcagccgccgtgttgtccgatccggagtacgtctacccgcgcgaggagctggaccgcatatggaagacgctgctgctgaaccagttccacgacatcctgcccggctcggccatcgcatgggtgcaccgcgaagcccgcgaggactatcgccgcgacctgaagcgtctcgctgaaatcgcccaagacatgtgcgccgtgctgcgcaaggccaacccgcaggccgacttgctcgccgaggcccgcatcagccagttccgcaatgacggcgcgtcttggcatgccaaccgcatcaacgaaccgaccgacgcgctttccgtactgacccagacattggacaacggccgtgtactgctggccaacggcgtactgtccgtcaccatcgaggccgacggtacaatctcgtcactgcttgacgaggagcatggccgtgaactggttccggccggcacccgattgggccaatacgaactgttgaaggacgaacccgccgtttgggatgcctgggagatcgaacgcgaatccctgctcatggcgaatgccatgaccggatcaatcgaatcggtcgataccgaaaacggtgcggcacgagtccgcgtgcgcaccgccgacgatgacaccgtcatcaccaccaccatcacgctgcgccccggttcacacacgctcgatttccacgccgatatcgactggcatgagcgcgaacgtttcctcaaggtcgccttgccgctgggtatcgtggccgaccaagcaacatacgactgccagtatggtctggtccgccgcccaatcgtcaaaaacaccgcatccgacgaagccaagtatgagagcagcacgaaccgcttcgcccttatcggcgacgccggttacgcggcggccgtcatcaacggatcggtgtacgggtccgatgccacgccgatctccgggaacgccgccgaaggtcgtgactcgggcaccatgttccgactgtcgctgctctccgcgccgaccttccccgacccgcgcaccgatatcggctcgcacgagttcgactggtccgtggtggccaacgccacggtgggccgtgcgcttgacgccgcttgcgcactcaacgcaccgacgcttcatgacatgcccgacttagcgccgctcgcctcgatcgagtcagcaaacggcaccgtggtgttggactggataaagctggccgacgatggctccggagacctgattgtgcgcgcctatgaggcggccggcggcagggccgatgccacgctgcacgtctgcccggcgctcgcaggcgcttcggtgcatgagaccaatgtgctggaaggcgacgatctggccgccgacctgccggtcgcgctgcaagacggcacacagaacgccgaaggcgccacactgcacttcggcccgttccagctcgccaccctgcgcatcacgcgctgaattcccgtctgacgcttctgcctccttgtaccatgaggggacagaagtatgtcgtattacggtttctccaattaccatcactcccacccctaccaccagacacagcaaaggagaattctccatgtttcttctgcccgatcagcagttggagcgctgcgaccgcgtcatgcagcagcgcgtcaaaccgcatatccacaccacactcgccgcatgcaccttgcgttcgttccacaatcccggcgaaccggtgccctccagcgaatttctagccaaagtgcgcaacggccaagtgcccttcgaacctttccgcgttcccggagtctggggcaccacatggggcaccacatggttcgaggtgaacggccatatcgacatggcggcggtcaaaggacgaaaagtcgaactcatggtagacctcggctggctcgatcaccgcggccccggattccaatccgagggacttgtctatcgtgccgacggcaccgccatcaaatccgcgaacccacgcaaccactggattccactcgtctacgcggacggcagcagcaccgtagaactcgatgaacatggcgacttcaccgtctatatcgaagccgccgccaacccattcgtcgaaggccccaccccgttctcacccaccgaactcggcgaagaggccaccggcacctgtgatttcccatacacactgagtcgtatggacgtcaccatcttcaacgaagacgtgttcgcctactacatggatctggaaaccgtctcctcgctgattcgtgagctcaaggacgacgacccgcgctactggcagctcgccaaagcactgcaacgctccctgaacatctacgatgaacgcgacttggaaaccgtgtcggcagcccgtgcggcgctcgccggcgtactcgccgaaccggccgcctccagcgcaatcaaacacatcgccatcggccacgcgcatatcgactccgcatggctgtggccggtgcgcgagacccgccgcaaggtggcccgtaccgtatccaacgtgctggctttgatggacgaagacccggacttcacgtatgcgatgagttccgcccaacagtacgcatggctggaagaggagcatcccgacctgttcgcacgaatgaagcggcgcatcgaagagggccgcttcatcccggtcggcggcatgtgggtggaatccgacaacatgattccttccggcgaatcattggtgcggcagatcacgttcggccgccgatatttcaaggagcatctcggcgtcgcgccgcgcggcgtctggctaccggacagtttcggctacaccggctcttggccgcagatcgcccgccgtgcaggattcgactggttcctcacgcagaagatctcgtggaacgacaccaccaagttcccgcaccactcgttcatgtgggagggcatcgatggcacgcgtattctcacgcacttcccgccctcggatacctactgctcgtggatgagcatgcacgagctgatgtattcgcagcgcaacttcctggacaaggacctctcccgtaacgcgattctgctgtacggcttcggcgatggcggtggcggccccacccgtgagatgaccgcgcgcatccgccgcgaccatgatctcgccggcgcgccgaagatcgaattcggtactcccgaccaactgttcgaccgtgtgcgtaaggatatcgtcgacgatgcgcaaggggagaccccggtgttcaagggcgaactgtaccttgaactgcaccgtgccaccctcaccgcccagcaggacatgaagcgcggctgccgccaggaggagacgatgctgcgcgtcaccgaatccctgtgcgccgcggcccgcatcaagaacccggactatgtctatccgcgcgaagagctggaccgtatttggaaaacgctgctcctgaaccagttccacgacattctgcccggttcggccatcgcatgggtacaccgtcaggcgcggaccgaatacgcgcgtgacatcgctcggctgaacgagatcgcccttgaagccgggcgcgcgatcgcagccgtggaacccgatgacgcaaccataaccgacgccgtaatcgccccatattcccgccaagcctgtgagacgtgggtggtacgcccggcttcgagccgagccgaagcgggaaccgcatccatggctcgggtcgccgttacccatgacggcgatacgattgtgctcgacaacggccaactgcacgtgcgcattgaagccgacggcaccgtttcgtcaatcgtcgatcagcgaaccaatcgtgaactggtgcccgccggcacccgactgggccgctacgaaatgctcaaagacgaacccttccactgggacgcctgggatattcaacgcgatgcgttcctcaccgccaacgcgctcagcgaggcatcgattgcaagcgtggacgaaaccgccaacggtggggccgtcgtgcatgctgtcactcgcgcgaagggcgttgaaattcgtacgggcattgccttaaggccgggctccgccacactggacttcaccgccgatgtggactggcatgccgtcgaacagttcctcaaagtggatatgccggtcaccgtgcaagcggtgaacgcgcaatacgaatgccaatacggtctggtcgaacgccccatcaacaagaacacgcgcagcgatgatgccaaattcgaaagctgcacgcaccgcttcgtgcggatcgccgacgccgactatgccgccgctgtggtcaacgcctccacctacggctccgacgtcagccccatccacgccgatgcggcacatggcaccggccgcggcaccatggtgcggctctcgctgctgtccgcaccgctgtaccccgacccacgcaccgaccaaggcgcacactccttcgcgtggtctctggtcgctgacgccgatatgaatgcggtgctggacgaagcggcgcgacttaacagccccgtaataggggagttgcctgatatggcgccgctggtctcgctcgccgacgccaccggcgtcatcgtattggactggatcaagctcgccgatgacggttccagcgatctgatcgtgcgcctgtacgaggccgccggcggcaatgccacggccacactgcgccttgacgccgctctctccgatgccaaggccagcgtgcaggaggtgaatctcatggaggagccggagctggatgccgaactgccgcgcgcgctcgccggtgacgaaccaatgcctgccgacggtgcgatcgtttcgttggcgccattccagctcgccacgctgcgtattcgccgataagggatattgggcctaggctcgatattttgggtcgcgcccaaccgtaacggaaccggaacagaccggctctgccatacggttgggcgcggcccattattgtatgagaagagggagagcgatcccgttgggcaaatatcaatgcgacacgcgacgatgaattcgttgcgtgcatgtttcgattgtgttatgtttttactaaaccgatttagttaacaggttcgcgactggccggaagctaaaacggtttagtctcagcgatgagaactgaataaaggttgtgataccacgtcaatcaccgcgacgggtgactgtgctggagcacaacgattaggtttctccgtccacagcagggcgggatgaaaaaggaatcaaaaggaaaggaaaacatcatgttttctatgaagaagatcctcgccatcgccggtgccggtgcgatgctcgtatcggtggctgcctgtggtagcggaactgcgggggatgacggcggcaagaaggagatctccttccagacctggaacctcaagaacgacaagtacaccccgtatttcgaggcgctgatcaaggcctatgagaaggaccacccggacgtcaccgtcaagtggcttgacgccccgtccgatggttacgaagacaagctgtccagccaggctgcggccggcgaactgccggacatcgtcgacggcggcaactccatcctgtacggtcttgccaaggccggcgcgctgctcgatgtctccaagcaggctccggatgcggaaaaggactactacgaaggcgcatggaagtccgtgaccatgcagggcaatggcatcgagaagggtgcctacggcctgccgtggtatgtcaacgatggcccgacctactggaacaccgagctgatgcagaagtgcggccttgatccgaacaagattccgaccacatgggatgagtacttcgccgccggcgacaccatcgtgcagaactgcaaggatgtctacctgggcaccacgatgggttacaacaccgaagatctgatgaccgcaggcgtcaagtccttcatgaacgatgaccacagcaagtacaccttcaatgatgaggccggtgtcaagcagatcagccgcttcgttgagctgtacaagaagggcggcatcccgccggaggccctcgactcctcctggagccaggccgccgatctcttccagcgtggcaacctggtctccatggccggctccgcctactccgctgacggcttcaagcagaacgctccggacctttacaagaacctcgcagtcggcccgcgtatcagcaacgacggcaagtccgcttccgtggcctacgagatgctcggcatcagcgccaactcgaagcaccccgacgttgccattgacttcgcccgattcgtgaccaacgagaagaaccagatcgagttcgacaagaaggcctccgtgttcccgtccgccaaggggggtctggatgacgactactacaagagcatcgacgaaagcacccttgagggcaaggctctgaagatcacgctcgaccaggtcaaggacggctacggctctcgtccatccgagttcaccgacaacaacggctccaagaacttccagcagcagatcgccctcgctatgcagggcaagcagaccgccaaggaagcccttgacaagtccgtcgagttcgcaaacgagaagctcgcacagtgagcaacgcggcactcgccgctgacaggtcggaggcccgcacggcctccgaccggcctgaaccgatgaacctcaaccacggcaagaagcagaatcgtagcttcggcaccatcattgccccctacctgtttgttctgccagcgttcgcgattgtgtttgtattcatcgtccttgcggcactcaacactttcaggcttgctttcaccaactccacactgctccgtccgggaaccttcgtcggactcgaaaacttcatcaaactgttccatgacgagtacttcctcacggcactgctgaactccacactctacgtgatctgcgtagtgccgttcatggtgatcctcccgttgatcctggcctatctggtcaagggcaactcccgcatcatgggcttcttccgcaccgccttctacatgccggtggttatgtccgccgttgtggtgggtatgatctggaccaacctgctggattccgccggtctggtcaactccgtgctcaaggcattgaagatcatctccaagccggttccattcctcaccgatcgatggggcgtgctcttcagctcgatgttcgtgacaatctggctgggcctcggctactacatggtcatctacctgaccgccctcgccaacatcgatgaatccctttacgaagccgcctccctcgacggcgctggccctgtccgccagttcatctacgtgacaatgcccggcgtgcgctccacgatgatgctcatcatgatgctgtccaccatcgccgcattccgagtcttcaacgaaatctacgtgttgaccaacggctccgcaggccccggcggcatggatatgacgatgtcgatgcttatcaagcgcgaaggcaccggtatccaggcccgcactggttacgcgagcgccatctccatcgtcgtgctcgtcatcgtcggcgtcatgctcatcgtgcagcagatcgtacaaaagcgaggtgaggactgatgaataccaacacgcataaggtcaccgtcggcaaagtcgtccagtatctgattctgattctgatgttcctgctgctcgtcggcccgttcgtctgggaactgtccctgtcgttcaagggcaagggcgacaacgtctacgccgtgcctccctacctgatgccgaagaccccgacgctggacaactacatttccgtgttcaagcaggtcccggtattccactacatgctcaacacgctggtggtctgcctgatctccatcttcggcaacgtggtcttctccacgatggccggctacgcactgggacgcctgaagtggcgtggccgcggactggtgttcaccatgttcatgggcaccatggtcatcccgatcgaaggcgtgatgatctcccagttcctgatcattcgctccatccacctgcagaacacactgctggcagtcgcactgcctggcctgtgcggcgccatcaacatcctgctcatgaccaacgccttcaaatccattccaatggaactcgaagaggcggccatggtggacggtgccaacctatggcagcggttcttccacatctgtgtaccgcaggtcaaaggcacgatgaccgttgtcggcatcttcgcattcgtcggtgcctggaacgacttcctgtggccgttgatcgcgatctccgatgaaagcaagtacaccttgaccctcggcatgaaccgactcaagggcatgttcatccaagatccgcgactgatcgccgccggtgcgctcgtctcgcttatcccgatcatcgtcttcttctgctgcttccagcgctacttcttccgtggcttggaacagggtggactcaagggctgagcggactggaaaaaggaggtactccaatgaaattcggagtcaactacacgccgtcgcatggctggttccacgcatggctcgacccggactgggacggcatcgacaatgatctcaagcagatcagcgaactgggtatggaccatgtgcgcatcttcccgatctggccgtatctgcaacctaatcgcacctggatcaacaagaagggcgtggcggatgtgcgccgcatggtgcacatcgccggcgagcacggtttggatgcctatgtggacgtgttccaagggcatctgtccagcttcgacttcttgccttcatggctggtcacctggcatgcgggcaacatgttcaccgatgcggacgccgttgcggccgagcgtgaactggtcaagaccatgaccgatgagctgtccaaggaacccgcgttcaagggtctgaccttgggcaacgaggtcaatcagctgtctgacaggccgcatcccacgaagatgagcgccacggaccggcagatcgacgcatggctggacgcgctgcttccgaccgccgccggtgaagggcacaacgcgctgtacagcgtcaacgatggcacctggttcatcgatgggcacccgttcactccggtgcagtccgccaccaagggtgatatgacagtgattcactcctgggtgttcaatggcatcgcgcaaggatacggcgccaccagtgaggagtgctcgtcgtacgcactgtacctggccgagctggccaaggcgttcggcaaggattccgagcgcccggtgtggctccaggaagtcggtgcgccggagaatgtgctggaaaccgactacacgccggaattctgccgcaagaccgttgaacgtgccatggattgccggaacctgtggggtgtgacgtggtggtgctcgcacgatgtgcccgccagcatggaagacttcccgttcttcgagcactctctgggcttgttcgacgagcaaggccagctgaagccgatcggccgtacgttcggggaactcgccgcacagtaccgttccgcattgccggctcagccgaagaccgtcgccgtggtgattgatgtggatgaggccggaaacccggtgaaccgcagtgcgctcggcccgggaggctcggtgtgcgacctgtggatgaagctgcaggtggcgggccagcgcccgaccatcatcacctcgcaggtggcggccaatcaagaggcgctcgcgcagcgtggcattctggaattgcacgctgacgaacacccctatgccgcccgttactacactgcggtttcggacccatcgttcgaaacggctgattaaaccgatatccggttgtggaatcatctactctttgttccacaaccggatattttcaattgcagtgcgcacaattgcagtgcgcagggcaaaacataagacccggtactcgccgaagagcgagaagaacgagaagacaatatacgagaagggggagcgctcaatgagcatcaactgcgccgcagtggaccgactcattgattcgatgagcttcacgcagaaagttggccagttgaaccagcgtctgctcggttggaagtccgtggaacgcaatgctgcgggacggctggtggcctcggacgagctcaagcaggagattgaccgatggggtggactcggcaccctgtacggtctattgcgagccgacccatggtctggtcaacattggggtaacggcatacgccctgaggagcggactgaggcgattgccgtggtgcagcaaactgtgctggaacgtggcgcgcacggcatcggcgtattacttagcgaagaggcgcctcacgggcatcaggcgctgggcggcacggtgctgcccaccaatctgggtttgggcgctacgtttgacccgcagggggtgcaggaagcggaagctgcggttgccgcagaactggccgccagcggcattcatatcgcattggtatccggtttggacatcgcccgtgacccacgctggggccgttgcgaggaatgcttcggcgaggatccgctgatggctgcccgcatgtgcgaggccatcgttaccggcatgcagggtgagcatcgcagcaaggtcggccacgggggagtggccgtggtgctcaagcatctggcggcgcaaggcgaggccgtgggcggccgcaacggacagtccgccgtactgggcccgcacgatcttcatgaaattcatctgccgccggtggccgccggtgtgcgcgccggtgccttgggctttatggcagcctacaacgatatcgattctgtaccttgctgcgccaacccgtggctgctcaaggattatctgcgcgaccagctcggtttcgacggcatcgtgatggccgatggcctggccgtggatcggctcgaagacatggccggctccattcccgcggcagggcgtgccgcactgctcgccggcgtggacgtctccctgtgggatgaaggattcacccgcctcgaagaatatgcggatgacgaacaggtagtggccgctgtcgacacggccttgcgccgggtgctggaactcaaagccatgttcggtctcttgcccgaagacggtgccgataccgccgcaattgccatgccgagcgccgacgccatcgcgcaggccactgcggatgggcgtgagcaggccaagcgcatggcccgcgaggcgataacgctgatcaatgatggccagtctgccgccacgctcgacgatatccgcagcgtcatagctgatgctcaagccggccctgtgattgtcgccggcccgttcgccgacgatttcggctgcttcctgggcgattacaccgcccctctgcccgccgatgaacagtcaagcgtctaccggcaattggtggcacgtctcggggaggaccgggttctcttggccgccaagccgagcgatgcgccggccgatcaatgggcgcgtgcgtcgaccgtggtattcgtatgcggcagcaccagcgaacgcagctatgacagtgaattcgacgacaatggcgcggcgaaggccgtaaccgaatacggtgccacctgcggcgaaggcgtggacttgtctgacatccgcctgccctggcgtcaggatgacatgctaggcgaagtcgcggcattgaccaccgctccaattgtttcggtggcggtgtgcggtcgcgcgcatgtactgaccgatgtgctggaacgctccgccgtgacgatctgggccggatatgccggccaatatgggccgcaggccgtagccgacgtattggttgacggagccgacatgtctggccgccttcctgtgaccttacccgcatatcccgcagccattcccgttcgatacaatgaccgccaaagtgccgcgcatgtctacaaggatgcggcggaaccgatattgcgcggcttcggctatggatccggttcgctggcggcggtgacgttcagcgagatgcacgccgatacgcaatcgcatccaggtgaagtgctggtgcaggtgacggcacatgctgacgatcacggggccgcgggtgccgtgaatctgttcgcgcatgtcagcggcggccgccgcatcccacgtttggcaatgcttgtcgattcggtatacatggacttgaacgcgggagagcgtcgcgatatcgcgttccacgtgccgtgtgatcgtctgcgggatgtcggtgacgggcaagttcaggtgacctgcacgctggatggagattcgacgcatacggtcacggcgacgctgccgggggaatattaggggggcatgtatgaatgtggggtgcgaagcactggaaccgcatcacacccccggatggagcctgaaaccgcaaggcatccatcctcgcaacctgcaagtctgcgggttgtcacccgatagaggaaacaacaaaggagattatatatgtgttgctcacaaggtagtgaagggcgctcgtccatcggacgcagactcgccgccgtcgcggcgggcgtagtcgccacagcactgatgctcggatgttcgctggccatgggaacggttgcgaacgcccaggagggggattcccccgttgcggcgtcgcaggagggtaacggcaacaagcatttcatggtgtattaccgcgcatggcgtgacgtgaccatgaaaggcgtgaacaccgatttaccggatgacaattggatctccatgtacgacattccatacggcatcgatgtcgtcaatgtgttcagctacgttcccagtggccaggaagcggcggcccggccgttctatgacaagctcaagagcgattacgcgccgtatctgcatgcccgaggcgtcaaactcgtacgaggtttggattacagcggtgttatggtcgacggtttcaagacgtggattgctcagcagggcaaaaacgtcgatagcgcgaccgaatcggattatgacgcgtacgccgatcatgtcatcgaaacgtacatgacctcggttggcctcgacggtcttgacatcgatatggaaactttcccggatgccgcgcaggtggcgatttccgatcaggtcatcacagccctcgccaagcgcatcgggccgaagtcggataacccggaaggcacgatgttcctttacgacaccaatggcagctacactgctccgtttaagaacgtttctgattgcttcgactatgttgcctaccagcagtacggttccgattcgaaccggacggccaaggccgctgccacctacgaacagtttatcgactcgaccaagttcgttcccggcctgaccttccccgaagagggtgacatgaataaccggtggaacgacgcgaccgaaccatacctggacagtcatttctatgatgtggcctcatactcgtacgaccacaatctcggaggcatgttcgtctacgcgctcgaccgcgacggacgcacctattccgacgatgatttggcacacatcaaaccgtcgaatctgatttggacgaagacagccatcgcacaaagccaaggcatgagtctggaaaacgccaagcaggctgccaaccacttccttgaccgtatgtcctataccaaggatgttccagccgaaacgcgccaaaccgtggcagtggccaccaacctgtatgaggtgaacaaggcggtgctcggcgcggattggaacgacggatacagcaacacatatgatccgacgctcgaactttccctgacctccatcgacaccacggcacttaccggtgccatagccaaggcggatgcattgctagctgacggcgcaaccgataccgatgtgcggacaacgctgaccacggccagaaacgcggcggtcactggcctgaccagcaagctgtataccggagctgacgttgtctcctggacggcatcgctcaacaccgcaatcgcagatgcaacgggcggcaagcccaagccgcaacagccaggcacaggcgaaacggacaaacctagttccggtgacgcaacacacaacaagccacagtctgcaactggacgtctggcaagcaccggttccgatggcaccgtcgtgctatcggtcgccgtgattatgacgctcgccggtatcagcgtattcgcagtccgccgccgcggataacaccggttcgaatgaaccgaaaaacagtatttgggatacggcgcgatatgcgaagcgccgtatcccatggcccacatcggtagggacgaagtagtacgcagacggttgatctccggcgtaagccggaagaagtcaaaggagattatagatgagattgtcactaggcgatcccgctgggtgtacttctgcccgggctcaacacaggaaatggctgtgcagcggtctggccgcggtattgtcgatgaccacgctggcggcgttggccgcaccggccagcgccaccggcacaatgccatgggggtgttcctatgtttttgtcaactccttggggagttgacgtgtcgggattccggttggctgtcgtgggcgcgcttcgccctgccggtggcgtccggcgtcctttcccgtgtggcccgattcaggctacgagggctggctcctggtagaggacgccgtttttgagcatgctgtagattacgtcgcagcgtcggcgcgcgaggcagatgacagcggcgttatggtgcttgccctgttcgcgtttgcgcttgtagtaggcgatggacggcgggtgtttggcggacgcgacgaacaaggactgccacagcgcgttcctgaggcgtttgttgccccgtctggagggtctctcgcccttgatgctggtgccggactggccggtggccgga

SEQ ID NO: 781 - DNA, 14425 bp, Unknown
  R14_18m  MAG No. k141_2906
atcaacggttcggccggacatgttgaccacgaccagcagcttctcatcgccgagggtgcgggtgaaggcgtagacatgcgcgtcatccgcatcgagcagatgccagtcgccggccgccacgacaggcatgtcgtggcgcagcgcgatgagctgcttgtagaaggcatacaccgaatccggatcgtcgaattcgccggccgcgttgatcgccgcatggttgggattgacggagatccatggctccttagcggcatccggcgcagtgaaaccggcatagacagagccgtcccattgcatcggggtacgcgaattatcacgaccgcgcgcggcgatacccgccaacatcgattcgggcgactgcactttggcttcctcaaccctttgacggtaagcgttcagggactcgaggtcacggtactggtctaggcgcgtgaagtgggcgtcggtcatgcctagctcttcgccctgatatatgtacggggtgccgcgatgcatgtgcagcatcaggccaagtgccttggccgaacgcacacgagattcctccgaggagtcatcaccccaacgagaaacgacgcgaggctggtcgtggttaccagtaaacaggcttgcccagcctgcattcttcacggccgcttgataaccggccataatgctcttgagcttcggcaggtcaagtggcagtggcttccatttgacgccttcgcagtcaaaatcaacgtgctcgaataggaagagcatgtccagctcgccgttggcggggtcggtgatgtattcgttgcgctgtgcggtaacgccgggagcctcgcccacggtgaggaagccctcacggccttcgaacacttcacggcgcatttcggccaggaattcgtcttggcgagggccgtccgcgcagaacggattcgggttggaatagccttcctcacccacgggcagatcgtccagctcggaaccgtactcgccgggcagcttgccagacaggtccgtgcgcttggaaatcagcgtaatcacatccatgcggaagccgtcaacgccgcggtcaagccaccagttcatcatgtcgtataccgcgcggcgcacagccggattttcccagttgaggtccggctgcttcttcgagaactgatgcaggtagtattcgccacgctcagggcaatactcccatgcagaaccgccaaagtaggagccccactggttgggctcggcaccgggctcgccggcagtggtgccgggacgggcgggacgccaccaataccagtcggcgtgctcatcatccttgtttttggacgcttcaaaccaggtgtgttcatcggaagtgtgattgacaacaagatccatcacgatcttgagcccgcgcttgtgggcctcggccagcagctcatccatgtcgtcgagtgtgccgaacagaggatcaatgtcctgatagtcggaaatatcgtagccattgtcgtcttgcggagacttgtataccggggatagccacagcacatccacgccgaggtcggccagatagtcgagccgtgacgtaatgcccttgagatcgccgaggccgtcgccgttggtgtcttggaaggaacgcgggtaaatctggtaaacgaccgcattggaccaccacggatttggggtggcaccgttggtgcggatggaatctggaattactgtgcgttgtgaagtggtcatcgttggctcctccattatttatggtctacattgcctgttgctcatagtctaaaaagcgctgaattacatttccattggggaactgcgttggtgtgccggaaacaaaaactgcaaagagccggaaggcactgctacggctcaattctcataagctgcacatgctatttagcaacatatgggccctttcgctgtttgtggtgggtgactgtgccgtggggtgatgttggtcgggtaggttggaggcatggatgcctctcacctgttcaccgccgcgcttcggctgcggtcgccttggagggtcgggtctgcggacttccgtgacgccgacggcgacgggcgggagccgcacatcacgatcggcttcgagcccggcagagggttcatgctcctgttcgaggcgtgggtgtggctatatcgcctgtgctcgtggatgatgcactcgaggctcgaacctatgaaggagctcgcccgcttgttccgccgccacttcgccaccataatctacctgacctgcggcagctcacatattaacggttcttctgattgcgacgcgcaagagcaacttcgggcgcgcttggattgcctgcttgaacccactggtgcggggatagatgatttagttgacacgcctgcgggaatctggtggggatttcgctggcacaccggatttcaagcaaaccccgcctcgggaaccgctccggacttcggcgttggcccggttcgtatgtcaatcgattgccgtctgaaccgggacagaatccgctgtcccggttcgcgatttttgtccttttttacaaacagggacaagccaatctccgcagttcatatgctccgtaatacaaaatcggcggaatagagccgatcccggaatcaacatgttgtcccggttttcacataaaacgattgacattcataccgggacaatgaaaattgtcccggttcgtgaaaatcgcccgaaaccgcgaaccgggacagcggattctgtcccggttcgcgcgtcaaacggttgatatgtggaccgggacaagccagtggcacggcgacacagcagatgcgctcaattgcaccgtaagccgtacggtttcgtcactttttcattcgcacaacgagcaaaaccacatgacctttgtgcgccaccgccacatcaaccgaccgtcgcctttattgtggcggtttccagtatggcaacaggacagaagagcctcctccggtgagagccggaggaggcttgggtggaagcggacctttacttcacagagtcctgcaattcaggactggcctacggccagacccaacatgacctcgcgagtacgcgacctatccggccgcccgggccgggaaacagcccacggggctgtttccttaatcggctcgtctcgctcgacgcggtgaagtaaagcagcgcctgcgctgttttacttgaccgctcccctcatcacaccaccgacgacccacttttgggcgaagatgtagacgatgaggatcggggccatggccatcaggtagctggagaaggccatcgggtagttggtggcgaactgcgagctgaagacgtactgggcgagcgggatggtctggttcgactggtcggtcaggatgatcaacggcaggaggaagtcgttccaggcccacagtgcggtcaggatggcgatggtggcgttaatcgggctcatcagcgggaagatgatggtccagaaaatgcgccacgtggatgcgccatcgattcgggccgcctcttccagcgaaaccggaatcgaacggatgaagccagtggcgatgaacaggttcgtgcccaggccgagcaccgtgtacaggatgatcaggccgacctggttgtccaggtgcagggagcccatctgcttcgcaatcggcagcatgacgaccgggaacggcacgaacatggcggcgatgaagaagtagtacaggaagcggaagaagcgcttatccatgttgcgggccacagcgtaggccacgaaggtgttggtcagcaaggtgagcaccacggcggccaccgtgatgatcgcggagttgagcgcggccttcgggtagttgaccttggcggaggcgtcggcgaagttgtgccactgccacgaggtgggcagggcgaaggtgccggcttcggccggagtcttcagcgcggtgacgatggtgaagtagagcgggatcagaatggtcaggctcagcacggccacggcggcggtcagccaccagttgatcttgtggtccctgcggaacttggcgggcttgccggacttggacggggtaactgttgcagtagtcatttcttatcctcccctaaatcagatctgttcctggctgcgggagatgcgcagctgtacgaaggcgatgatcgccagcacgatgaagaagagcacggcgtttgcggtctggtaggcgtactcgccaccggtcaggccacccttccagatgaggtaggtgacggtttcggtggaggagttcggaccgccctcggtcaaggcgacgacctgatcgaaggtgccgagcgcgttcttcatggacagcacgaggttgatggtgaagaacggtccgatcagcgggaatgtgatcttccagaacttctgccaggcgttgacgccgtcgatggcggcggcctcgtagatttcgtcgtcgatggtctgcaggccggcgaggtagatgagtaccgagtaggcgatgccctgccagacggcgaggaagacgattgggatccagctgagttgctcattggtcaacagcgaggtggacagccacttgatgcccagcgccttgccgagctcgggcagcgggttcatgaagatgtacttgaacacgtagccgatgaccagcacggagagggtgtaggggatgaagaagacggctcggaagccattcttgaaggcgatcttcgagttcagcagcaccgacaggaacagggcgatcacattaatcagcaccgtgatgagaatggcgatgaggaacgtgaacaggtaggcgtggcccacgcggttgtcttggaagagggcgatgtagttcttcaggccgatgaacttgtaatcgccgtagccctgcgagttggtgaaggaatactttacgccgtcaagaaatggcaggtacaggaagaaggcgaaaatgatagccgccggaaccaccatccagtagtaggcggggtccaccttgcgggtggagaaggcggagaccttcttcttggccggtttcttggcagcggtcttggttgcggttgcgtgtgacatgatgttctcctctcctaccaatcactcgaaggtcctggcttggaccttgtcccattcggtctgcatctggttcaggaagcggtcagtgttgccggaggtcaccatggtctgcaggtagccgccgatgttgatggacgaaggaatgtagtggtcgcagaagtcggccactcggttttcctcgaagaacgggcgcacggtttccagcgcatcgttgccgaagtaggtgtccttcagcggcgtgatggcggactgggcgtcggcgtaggcgtcaagctgatccttctgcatgaggaactcgacgagcttcatcgcttccttggggtgcttggtgttcgcaccgatggtgagcatcacgtcgtcgccggcggtgaggatctgctcgctggcgtcatcggtggccggcatctgggcgaaaccaagttcgatatcggggttgatcagcaggatctgcgggatggcgtaggtgccgagcgggatgatcgcggccttgccttgggcgaagttctgcgtgccctgctggtaggtgacgccggtgtccgcagtggagtaggtgaagagctcggattccttctcgactgcggtcttccacagttcctggaacgtggtcttgccttgcttgagctcggtgtacttcgattcgggaaccagcgtgccggccagggaggcgagcggtgcctgggtggtccaggcgtcggccacggaaccctgcagcgggttgatgccggcgtccttgaaggtgttgagcatatcggtgaactcgctccaggtggtcggcggattctccgggtcaaggccaaccttgcggaacagagccttgttgtagatgtagccggaggcgttacccgcgaagggcaggccatacaggcgcttcttggaggaatcggtggtctgcaccagattcttggcgatctgcaccatgccggggttgagggtgtccacaatgggttcatcggtgaagtcgtagaacacaccggaggcggcgaagttgccgaagctgatgtcgccgttgaaggtgatcacgtccggcacacgattcttgacgaaacgggtgcgcagatcggtctgggcgttggcggagttgttgatgttgaccttgatggtcgggttctgcttctcaaagtcggcgaccatggacttgaactggtcggcggcctcggacttgaactggaagaaatccagcgtgacggtgcctgcggtgctggagccgcagcctgccaggccgaacccgacggcgatcgcgcacatcacggcggcggtgcgcacggccagacgcttcagtctaggcgttgcatgtggggaatcggacagcataattgttgactcctttatctttcttttcctccggcttcggtgccggcggttcttccactttccaaggtaacggttcggccatttcattcccagcgccagcgagcccacttgcgcaagcaacaaaaagcgcggtattttgtgattaactcaataaatacagcgaaggggcttgcatgtctgatgtcaacgcgattccacagtggttttccggatccgagcatacgcatcgcgtggcggcggcaattgcccaatacgggccgatagcccgcactacgttggcacagatgctgggactgagccaaggggccttgtcccgcatcaccagcgatctgatctacgccggggtgatcgaggagcttccggccgaggccggcccgtcaggcaagctgcccgagcgattcacgccaagggaaagttcggatcgtcgcggacgcccgcagacttcgctggtgttgtgttcgaacgcacgcaccttcattggtgtcaaggttcatgggatgtcgattgtggccgctgcggtgaacgcgcatggcgaggtggtgtccggccggcacgaggtgccgatcggggcggatcagtcggctgagtatgtggtgtcggccatcacgcggctggtgcgcgaatgttccgccgatatcgcctcttccggactgccctcccccactgcggtgggcgttgcggtaggtgggcatgtggtcgacgattcgattgtgacgttcgcgccgttcctgcattgggacggggccacggacttggggacgatggtcacagaggcgaccggcctgccgtgcggggtgttcaatgatatcgattctctgctggtggatgcctcctggttcgggccgggtgtcggcgtggatatgttcgccgtggtgaccatcggcgtgggtgttggttattcgctggccgtgaacggcaagccagtgcagtacccggataagagctatggtctggtgggccacgtgcttatcgatccggaggggccgcgctgcaccagcggacatatcggctgttcacaatgcttgactgacgattcgatcgccgaacagtactctgcgattgtgggtcgcgcggtcagttttgaggactttgcgcgcgatgccaagggacgtgtgccgcaggccacgcagttggtgaaccggacgtgtttccggttgggttcgctggtggctacggtggcgaacatcgcgatgcccggacatgtgatgattgccggggagtccgcgtttttggccaagctcggcaccgattcgctgcgcgatggcattcgtttctaccgtcacagccagacccagccggtcaagttcacgatcatggaccacgactggcagctctgggccaaagccgccgccagtcgcgtaatcgtgaagcatattgggtaggccgttcttggctcccctcagagagggaagccaagaacgttgcttcgccacagttactccgccacgaccagcaattacggacttgcctatcggcaaggctcaatcccaccttcgctcagctgtcgcttcgctcaggccgtggctactgacagcctactaggctgtcagcttaacgccacagccttgagcaatactgcctgctgggggtggagggacgggggacggatgccgtaacgctgcagggcttcgccggtcaggactacgccttcctcgttccaccagccgagagtgctctggccgttggccagaccggtcaaatccaagctcgggtcgagcgggctgacgcggtaggtgcgctcggggtcaagtccgggcaggtgcacgggcgcggccggataggtctggctggtggtcagctgggtgaagcggtagatggcggcgtcgcggttcggcatcaccatgccatccaagcgcacggccggatcgttggagtcggcgtgcacgcaggtgtcgatggcgaaccagtcgcggtgcttcttgaattcggccacccacacggccagcttggcgagcgcctcgtccggctccttcaacaggttccattcgatgcccatgtggccgaagaacgccatggccatgcgcagttcctggctggtggcacgctgggtggagtgcgcgggactggcacccacgtgctcgcccatcatcgccggcggcaccagcagcgaggtgtagcgctggatgtccgcgcgctcgaccgggtccacgcagtcggagacccagatacggtcagcgtgctctaggatgccgaggtccacgcggccaccgccggaggagcagctttcgatctcaaggcccggatgtgcggtcttgaggcccttgaagatgttgtagacggcgagggtctgcgcgtgcacggccgggcggccggagcggcgggaaccgggctcggtgacgaacttgttgtggtcccacttgatgtagtcgataccaagctcgccgacaagctggtccatgcagccgtagatgtagtcgaacgcatccggattggtcagatcgagcacctgctgagtgcggccctgcagcggcagtcggccggtggtgggcgaaagaatccaatcggggtggttgcgggccacgtcggaatcggggttgaccatttccggctcgaaccacaagccgaattccatacccttggcgtgcacgtagtcggcgagcgccttcagggacttcggaccatcgggccagacgtcctgcgcaatctgccagtcaccgaggccggaggtgtcgtcgcggcgggagccgaaccagccgtcgtccaccacgaatcgttccacgccggagtcggcggccttgtcggcgagcgccttcagcgtatcgaagttgtggtcgaagtacacggcttcccatgtgttgaggatcaccggacggccgtgcgagaacaggcgcgggtgcagggagcgcacgtaggagtggaagcgggcggcgatctcgttgagaccatcgccataggagccgaacagccacggggtgtcgtaggagttctggccttcgccagggccagcgagcgtcacttcgccgccgaacaggagttcgccgccgccgatcacgccggttgtgtagggcagacgttcggcggacagcacggagttgccgctccagcccacgtgcaccgaataggcgtcgccatgctcgaagccgaaaccgggcacgccggcggtcaggagcagggatgcgtcgaagtcagggcggccggcgagctgcggcttttcgaaacggccgacggtcagcggctggcgctgcggactgcgttcacgtagatggtgaccggtggtggtgaggatttcgccggcggattcgggcagcgggaagccgagctcgatcttgccgatctcgagcggggctccggcgtctgcaccgaacaggttggttacggtggccttctgacggaccaggccgccggggagcagttcgaggtgccactcgacttccacgccctgctcctcatcgcgcgcggtgactatgacgccgggcacgcgggccgggccggtggcgtgggcatggccggccacatcggtgtagctttcgccggacacggcatcgagggtggcttccagcacgccgccggtctcgatgttggtcacggtgaacttggggaagagctcgacgccggcgcggcgcagcaccacgcgctgctcgccgatccagctttcggcctgggtgggcaggatagacggccaggcggtgtcgtcgagcgcgccggacacgcgctgcggcttcagggcgtcataggcggccagcagggtgtcgggcttggccagcgggcggccccagtggacgatgtgcggcaggtcgctgccggcaaacaccagaccgatcgccacattggcggcgggctgggtcaggtagacggcggtgagtgcggtgccgtcagcggcggcgccggtgaaagtggaggtgttctcggccatattgtctccttcgacgtgtgtggatttgcattgcactactggtttcgatggtagaagaaatggaatatgttgccttggtgccgcgtgttggttgcgtgaggtaagtaatgcgtccgtgtctatcgccgctgggcgaagaaatcagtcaggatggactgacactcgccttccagcacgccgccgtgcacttcaggactatggccgatatgcggatcgcgcggaatatcccaaatcgaaccgcatgcaccgagcttgggatcccaggcaccgaacgcgatggtgccgatatgggtctggatgcaggcacccgcgcacatcgggcacggctcaagtgtgacggccagcgtgcaatcggcgagattccaagcgcccaaggcttgggccgcctgacgcatggcgatgatttcggcgtgggcaagcgggtcgccatcaacctcacgcgtgttgtatccgcgcccgacaatctggccggccgcatccagcaccaccgcaccaaccggtacgtcaccagcggctgcggcctgaccggccagttccagtgcgcagcgcatcgcctcgtcatattccataccaacgagtgtatgcctttttctcatatcgtctcatgatgtgcataatcggccgcaatcttaacgttttcttcatggttcccatatacttttggtggagaaaaaatacgaaaaggcggcaacatggcggtatttgagctcatcctatgcatcattgcggcggtggtggtgagctcgtttgccagtcgcttcgtaccgaaggtttccacaccgctggtccagattgtgctgggcgtgctggttacgtatctgccgtttttcccggatgcaaagctcgacccggaactgttcatggtgctgtttatcgcgccgctgctgtatctggaagcgcacgaaatcgataagtcggcgttgctgaaaacgctggatctgagcctatcgctggctatcggactggctatcgtcacgatggcggcggtcggattcactttgcatgccgtctggccgtccatcaccttagcctcagccttagcactcggcgcggcactcggcccgaccgatgcggtggccgtcagctccctaggtaaagaagcctcgctgacgcagcgtcagcgcagcgtgctgaaaggcgaatcactcttcaatgacgcttccggcatcgtcggcttccagttcgctctggccgccgccttcactggcgaattcgccgtggggcaggccgccggcgaattcgtgatctccttctttggcggcaccttatttggcctggtgatagcagcagcggccaactggctattcgagaccgtgcgatccctcggttgggaaaccaccaccacacgtattctgatggaactgttcctgcccttcctgctgtatttgggcgcggaggaattcaatgtgtccggcattctgtcggtggtggccgctggcctgttcatccgattcgaccgtaccggcgtggggccgaatgtggcacgtacgaatatcgtttccacttcagtatggggtgtgctgagtttctcgctcaacggtgcggtgttcattctgctgggcatgcagctgccgcgcgccatgagggccagctggtctgacccgtatatcagcaataccgtgctgatcggcattattctgctggtcactctggtggtaatcgcgcttcgattcttctggattgcggccatgctgcgcgttgcgcgagatacaatcaccggccagcgccgcaaaatgacacccgaacgctggcgctcggccgcagtgatgacctttggcggccccaagggaaccatcacgctgtcattgatgtttaccatcccgtattacattgccggcggtgcgccgttcccgatgcgtgacgagctgattttcattgcgtcaggcgtgattatcgtgaccttgctgctggccaacttcctgttaccgctattggccccgaaccgtggcaaggatcccagcgcggaaatgattccggtgaccatcgatgtgttacgcgccacggtggaggaattgaccggacgcatcacgccagagaatcgccgtgcgattctgatggtaatcgaccaatacaccaagcgcatcggacgattgcagcagcgcatcggcgataccgatcctcagggattcgagcaattgcagatcgaagcgctgcattgggaaaaggaattcgtgcgcgaccgacttgccgacaccaaggcgcatccggcggcggatacggccacgcaagagctgaacgtcgaagcctgcgagcgcatgcttgaccagattatgaatacgctgcgtcacacttccactgatccgacttcggggcatgcggtatcgcagattcgcggtcgcttacgcatgttccagcggcagatgagcaattacgccaaacgcacggtgtccaagattcgccataccacaccattggtgagcgaggatcagattttcgcgcgcacccgcgaactgcaggtcgaggcgattcatcatgttatcggccggcttattgacgagatgggccaggatacgtacaacaccgagcattgttcggcgctgttgctggattatcgtcgcgctgaggcttcattgcaggcacgtccgaatatgagcggcactacggaaaccatcacgcaggtcgaggacgtaaagcgcgagagctacggtatcgaactcggtgtgattcaggacatgtacgaagccggcgacatcaaccgagcccaagcccgctccctgaggcgcaacatctacgttatgcaggtcgatgccgattccggcatctagtttccttggctcccttctctgaggggagccaagttggggattgctatttccgtgtgattctcttcagtatgtgcagtagtgcttgcagtgctcacttcgcccatgggagaacagtctatgaccgagtcagccacaagcgccctcgatgtccgattgctgcgacggccgcgccaattccagtgatggcggctgactacagcacgccagaagtaatgtcgttgtcaagtagccactggcgcaaatcggcgaactcctcaagactcacattgtgatccagaccgtggtagctcttggttttcagccacgtatgctcttccagccaagcggcggtggcgaacagttcgtatttcgggattacgccatcgttcttgccgtacgtatagaacacggggatatcgtaatcggccaggcgagagtcggcgggggccgtgccgggcacctgaccgggtgtgttgaagccggacagggagacgacggcccggtaccgctcggggttgatgcgcaacaaatgcacggcgaccagtccaccttgcgaaaacccaagcggcaccacgtcacggtcggcgggaatgttgtcggccacccatcggtcgactgctgtggcggcggcatacgcgtcgtagtcacgatcatcgccgataggcagggcatcgtggaaccacgcgtagttgccggggtcgggactgccttcacgggccggcgcaagtgtcagcggcccgcgcaatgccacgaagtcgttatatggagcgatgaggcgcatgatggccgccatgtcttcttcgctggatccccatccatgcaggcacaggaacagcggatgcgtggcatgctggtcgaagccgccgcgcgaggtgacgctgtgttccacggtgagtggctcgccaaaacgtccaggcacagtggtggattcgcggccgatcagaggctggctggcattcgcttctttgctcataccaatccaatatagaggtcttgcgcgctgtgcggaaaacgatggaccatgatttcagtcacattgggtaatccgcgccgaatcgccttgggactttccaggggataccggcaatctgtcaggcattaccgctgtttgcggctgcggtgtctgcggctgcggtgattgtctcaagttcaccgccccactgctgctgcagtgcggtcatcttgctgccctcgccgaacaccatccagcgtttgccgttcagcaatcgccaatcacctttcgtttgctcattatcagcgtattggctcagcagttcggaaatcttgctttcgataggtgcccggctgatggctgcggacgattccgattcaaaggacacgaaggccactctcggatcagtgcacatctgtacggtggtgatgcctggcaaaccgcccgcatcaagcccctgccatccttctttgcacgcgccggcagcttgttctatgccttgctccatctgtgcggtatcttcgacgggtgccttgtcgttcgactgctgaatcagtccttccgggaacaatacgcccatggccacgccgataaccaagcaaactatggcgcacaccagtgcgatgatgccgcccgcgcccactcccccgtgagtggc

SEQ ID NO: 782 - DNA, 15753 bp, Unknown
  R14_18m  MAG No. k141_2956
atcaaaaatcgcctgcgagcgtggatctaccttgtagagaaactcgggatgccactgcacggcccacaggaagtggcttgccggccggtacagggcctcgatcacgccatcgggcgcgacggccatgacttcgagaccgggggccacatcacgaaccgcctgatgatggtagctgtttactgcaatctcagtctgccccgcgaacaatgaagccaggggagtgccggacaccaaggaaacgctgtgcccgaacgcatcgtacggcggattcatatggtgttcgatatcgctcggatgctggcttggcaaatcctgccacaacgtgccgcccagtgccgcgttgatgaactgaatgccgcggcagatgcccagaatcggcttgtcccaagccattacagctggcagcagaatcgattccattcggtcgcgctcaggagagagcacctcgctacggccggtggcggaggccgctgcaccaaccatcggtcccacatccggcccgcccgtaaacagaaacgcgtcaaaccgttcggcgcattgcgcaagaatgtcggcgtcatcggtcagcggcaacatgacgggcgtaccgccggcccgcattatcgcctccatgtatccgggcagcatccacagactatcgcgcccgtaatccatcagcggagtcaccgcaatgagcggtcgattcgtggtcatgcctgcctcttttcgcccaagtgtcgctttcgtcgttctgccgcaaatcgcttgatccagtggccaataatgccgccactgtaccgaaccaatgtaaccggtcggccaacattatttcgtcagccagtcgcgacgagattgcacaatgtgccaatgatgggggcattcggtgcggccttgtcaatgttcgggccattgcacgttcggtggggaaagcatgcccccgtccgcgcatcgtgatgaacgagtaaggttgacggggagggagaatcacatgaaccaggcatgcgtacgcaacgacaccatcgacgcgggcaaccatcatggccgaccgcaataccggtcgttcctgcgatttctgacatcgcaggaacgcaacgtcatttggctgttgctggccgtcgcttttcttccggtggacggcaccacgcttggcctgtacgcgccgttctggtcgccaatcagtccggcgctgttcgccgtgtactgcctatgcaattggcggcaactgcgcatcgcagccaaccggtacctgccaatgttcctcctaccggtggtctgtataatcctgtccatcccgggatggctgaagttcggcatccacctcaacgccgcgttcatgagcatcaccggattgctgggcgtgctcgccactttgggtgcgatcgcccttgcgttcgacatcaaacgcattccgtggcgtacgccattgcggattctcatcgcatcatactgggtttccttcggagtgggcgtcgtgcaatggctgtccatccgtctgcgcgccaaaccgttgaccgactatttctcgcacctcatgtaccggcaatacatcagcgacaactcggtgtggggcggcggccgtccgcagttcctgttcgccgagcccagctatatcggcatgcacctgttcggcatactgcttccgctcatgtggctcatgcgcgggcgcgaccgcatctacgccaaacggctgcgtgacctcatcgtcacgtatgccgtcggcgcggtgctcatgcaagccggcaccagaatcgtcatcgattccgtcgtggcgttgctgatcgcccttgtggcgcgcaccgattggcatgacggcgcacgccgcgtccggggcatgctgcagattctcggcgcatgcgcactgggcctgctgggtgtgctggcggattccagactctccgccatcgcggagaacggggccgagggagacggctcgttcttcgcgcggatctaccaaagcctcgatccgatatgcggattgctcacccatccgtggacgctgctcaccggttatggcgcgggcaacatcatcaatgcggtgtgggccggcgcggccaaagccggacggctgctggacggtcttggtatgaacggcggcgcggtcacgggattcgcggccggcgtgaacgcggacacggtgtggacgatgtgcgcgtataccagcgtcatcgccgaatacgggctgatcgggctggccatgctggtcggagcctcgatggtctgcatgacgcgcgggaggacggtatgccgtggcggtgcggatggcgcatcgtccgacgggctggcgcacggtgtttgtgtcaccgacgttgccgacgttgctgatgttgccgggggcaatagtggtgatggcgttgccggcgcgggttcgggcgaatccggcgtctggcacaagaccgtcatctgctggctcgtcctggtcgcatacctgtacatccaatgcgagaactatgcgttcgccgctctgccgctcctcgtgttcgccgcctcgaaggtgaggcgcgagcgctgattcctctcgggccgacgcatcgacgcggcccgagatggaccaaaatccagaataaacgacatttgccgctgttccgtttttcgcccaaggcgtatctcttcccgtatcttgaggtgcatcatgtattgtcgcggctaactaaccggcgaaacgcggcatgtttcgcattttgggcgaaaagcccaaggcccacaggaggtattgatgacgttcgttgcacggtcggtgcgctatgtgctcagaaaacgagtacgaaccatagtgctccttatagtattgaccatcataacggcgagcatgctatccacgatcgcggtttctcgggcagctcaacaggccgccggacgaatcgagaaggaagcggtcggcgggttcgtgctggccagcaacctgcagggcagcatgctcacgcctcgcggaggtggcatggtgcgtcccgccgacgtgcgcaggatcgcccaactgcccggggtcgattcgtatatggtccgtcagaacgccaccgctgatctcgtgggggcgaatgtggcgaaggtccccggcggcgatgattacgatgcgaccaaggagcagcaattcggcaacgccgccaacgtcataggcacgaatgattcgtcgaaactcaacgtgttcacgtcgcgcacgctcggcatggccgaaggacggcatctgaaggcctccgacaagtacacgtcgatgatccatgaggatctcgccaaagccaacgggctcaaagtcggagacacgctcacgctcaaggccaacgcctacgacgccgacaacgaatcacattcgacggcgaccgtcaagaccaccatcgtgggcatattcaagggcgacagcgccagaaaggtatccagccgagcggaactcaccgccaacaccatctacaccgatctggataccacacgcgatctgtaccagtacaaggacggcaaggaaatataccaggacgccaccttcgtgctgtccaagggcgttgacgtggagaagaccatggatgccgcgaagaaactcccggtggattggaacaactatcagattacgcgcaacgaccagtattcgtcgagcatgctgcatgccgcccgcggcgtgcgctccatgatgcgcggcgccctgatcggcgttaccgtctcggccgtgctcgtgctcagtctcatgctgctgctgtggatgaacgaccgccgtcaggagatgggcatactggtgtcccttggcgtcggcaagccctccctggtcgcccaatacctcaccgagatggtgctgatcggtctgccgtcccttgccctcggctggctgtgcgcgcagggaatggcccaatggctcggcaccacggcgctccattccgtgaacgcctccgcggcgaaggagctgagcagcatggggcaggtcggcggcgaccttgaatccagcatgtcggtgcgcaccctggattcgctcacggtgtcggtcgacgggaccgccatgctgtacgtggcgctcggattattggcggtgatgctggtgtgcgtcgcggtggcgtgcatgccgatgctgcgcaaatcgccgcgagacctgtcggagaatcgatgatgagcatgaatgtgtggaagcgtgccacgttggcgatcgtacgcaagccggtacgcagcggcatcatcggtctgctgatgctgatggtcttcacgagcctggtggcgcaggtcggagtctcgacggccctgcgtaccatgtccgacggcatcggcgcgggcatgggcatagggtttaccgtcagcgccggcgagaatcccatcagcgccgaggaggcgagccggttctcgcgtatccccggtgtgacgaagactgcctatgcgacgaagaccttggcgcaggtggatggcgcgcgcccggtcatgcctcggcagggcccccgattggactccgatctggccatgcaggtcagcgtgctgggcaccaccgattcctcattgtccgaggaattccagagcggcctgtaccgcctggagcagggccgccatatctcgggcgacggcgacaatgtgctggtccaccgcgacttcgcgctgcagaacggcctatcggtcggctcgacattccgtctccggcaggaggggcgcaacgccacggtgcgtgtggccgggatcttctccggcaacgtgcaggcccaaagccccctgccctcggacacttccgagaacctcatctattcgggcaggcgagtgacctccgctctgaccggaaacgaccagatcggcatgatccgatgcctgtcggataatccgcaggacctgtccgcggcggtcagtcaggccaagaccatggccggtggcaagtacgacgtcaccgacgattcggcccggctctccggcgtcctgcaatccgtgcagacggtgcgtgatctggtgcgcatggtgctgctgtccgtctgcctcgcggacgtactggtgctggcgatggcgctggtcttctggattcgctcacgcatccatgagataggcacgcttctggccctcggcatcgacaagatgcggatagtcgcacaactcgccatcgaaaccggactcatggcggcggtcgccgccctgtgttcgctgggcaccggcgccatgctgtcgggatacgtgtcttcccgactgttgcgcgattcgggcgtcgcgccattggaatcgttgcacgtggaggccttgccgcctgagcagacggtgctcatcctgctgctcggatgcgcggtcatcgccgtggcccttgccgtgtcatgcgccgccgtgctgtccaaatccccgaaatccattctttcctctatgcgttaggagtcaccaatcatgtctaactgtctgcaactggaccatgtcgattacgcctacggcgcggcgaagatccttgttctctcggatgtcagcgcggatttcgaatccgggaagatgtatgcgatcaccggcccgtccggcgccggcaagagcacgctgctgtctctgctggccggcctggacgccccctcccggggagtggtccgcttcgagggggaggacatcgccgcatcgggctatgcgaagcaccgtcgggagcacgtgtccctggtgttccaggaccataacctaatcgactacctcacccccgaagagaacctgcggctggtcagcaccaaggccgatatgaagatcctcgaggaactgggtttgagccgtgaggaatccaagcgcaacatcatgcacctgtcgggcggccagcgtcaacgggtggcggtcggccgcgcgctggtcgccccgggccgcgcgatcctcgcggacgagccgacgggcagcctcgacccggagatgaccgacgaggtgattcatctgctgcagcatgccgcccatcagctcggcaaatgcgtaatcgtggtgacgcattccaagcgtgtcgccgactccgccgatgtcgtgctgcgtctcaggagcaagaaactgacccgggcgtgacccacctgggccgggcggcacccatacaccgcttcggcatttcggcaccccggcgaccgggcactccggtatcccggcccttcggcattctggcacccccgcgctccggcaccccggcgacccactcgcgttgccggggtgccgtattcgctctgcgccataatgtgcgtgataatggaatcatgccagtgatgaatgatgaagtgcccggcgaggttgaaccgcaccccgattgttggactggagtaatccagattcgatgatcggaggtgcggttcaaaaggcccttttttgtgtcggattacgaaccgcgcgtttcaccgcttgccgttgtagatctcgttgtcgatcacatcggcgaacacgcggttgacggccgggcgcactaccttcagcgacggcgtcaggcacttgttctcctgcgtgaactgcgtgcccagcacggcgaacttgcgcacggattcggcacgcgagaccgtcgcattcgccttgtccacgtactgctggatctcctcgcgcaccgcggcgttcgtggcgagccggtcgaccggcgtctccgtggacaggccgtgcgcgggcagccaaatggccagcgactccgggtcaagtgtcaccagcgcgccgatgaacgggcgctggtcgcccaccaccacgcagtgctccacgatcgggcacttgacgatctcctcctccagcggaatgggggagacgttcttgccgccggcggtaataataatgtccttgattcgaccggtgatgatgatgcggccggcgtcatcgatctcggccaagtcgccggtcctgagccagccgtcggcggtgaacgcctcggccgtcttctccggcagattgtggtagccgcggaacacgttcgggcccttgacctgcagttcgccttcgtcggaaatgcgaatcgaggagccgggcgcgggctggcctacggtgccgatcacattgtcggtcacgcgcgtggcggcgaacggggcggcggtttcggtcatgccataaccctgaatcatcggcagaccgatgccgttgtagaaatgcgccagatcaagcgaaagtggtgcgccgccgcaggccacatacttgatcttcgggcccagagcaccgcgcaccgtgcggtagacgagcgtttcatacttggcgcgctcggcgatctcggcaaacgtatgctgctcgcccgcctgctccttgcggctccagacgcgcgcagcctcggcggccttgacaaacaggcggcccttccagccggcaccggccttgtgcgaggcggcgttgtacaccttctcgaacacgcgcggcacgcccagcaggtaggtcggttcaaacgaacgcaggtccggcagcagggacttggtgtccggcagataaccgaccacgccgtcatcggaggcgatggaggcgtactggataaatcgtgcgaagcagtgggccagcggcaggaagagcagcaggcgcggatggtcgtcgagaaccacctcatgcaacgcctgcgaggcggcgatggtgatggacacgaagttcttatgggtcagttcggcacccttcgggttgccggtggagcccgaggtgtagacgatggtggccagatcgtcggcgcgcacggtggccacgcgctcgttcagttcctcgtccgaaacagccacgcccagaccttcgagcgcgcccagtgcgttgccctcgatcatgagaatctgcttcaaggcagggcagtggtccttgaccgagtcgagccggtcgaagcgctcgcgattgtcggcaaaggccagcttgaccaccgaatcgttcatgatgcgctgggcctgcggggcggagtcggtgtcatagatcggcacgcttaccgcgcccaccgcggccagtgcgaaatcgagaatgccccattctagacgggtggaggaaaagatggtcaccgcgtcgcccttggcgatgccgagcgcgatcaggcccttggcggccgagaccacgcgctcgtggaattcgccggtggtgacgttctgccagcggccggggccgattttcttggcggcgattaccgtgtccgcgccggtgcgggcaaggcgatcggtaagtagggagtagatggtctggttgtcgcggatttcgatggattcgccaggcgtggtgtagtggtcaagcataagcgggccgtgtccttacgtgcgttgcatgatggctgttgacaaaatcgagccattctgacaagttaggttacgctggcgtaaggttgcgcgcgttgtgggcaatggagaagttgtctgtctggttttgtggattgtatacaacaccgtgtctaaccggtttgctctacggttatgaccgtgtccatttcgggagccatcgacttcctgcaggacaagtacgcgctgagcccggccctgcagggtctggtcatcagctccatcatgatcggcggcgtgatcggcgccggctcctccggcttcctgtccgataagtacggtcgccgccgaagcactggtcgccgcgcaaaagcagcactaggccgcgtttgctgcgtctattggcgaattgatcatatgggtcgtctgcgtgcagacgacccttttgcgttccgtcggcttctgacaccgtagaaacgtgctttctcggcttcgaggggctgattttgccttatccggaagtctacttccacttcgaggggctgatgcccaagtagacgcggccctaaaacggcggaatgacgttgacgtgtagctgtttatacttccgattacatggatgaggagcccctcgaagcggagatagacttccggcaaatgcgaaatcagccccttgaaacggaagtagacctccggcaaacgcaaaaattagcttcctcgaaacggataaatgcacgtattgggtgtagttgatgcttcagcccctgatatcgaagcatatttcttctggttggcgcgtctagcatgcgcactccgcaatcgaaaattctgtggcctctctcactttaaaagtctggcatgtgcgagggcgttcgcttaaggtgaatgggattgcgcggaatgtggagcgcagggtcatgaccatgcgcgtgctgcagatccagctgcgctcgctgaccgccatggatatcgtggcctacggcggtgcggcggccgacattggtgtggctctatggcagtatgcgcataccaccgcagccgccgcaggagccagcaccgccggctggtcgccgatcatgctcgccgcccacctgcccggcgcattcgcctatctggcctacggcctgcaatacctgatgccgttcggtgcgggcttccgctcaccctcgccggactgctgctgattgtgctgctgtccgccgaattctttattcccatgcgtcagcttggctcgttcttccacgtggcgatgaacggcatgacctccaccaagcgcatcttcgctctgctggacaccccggagcccgagcatggcacggcgaccctgccggccaacgattccgattccgctgacgacggtctgacggtccgcttcgaccacgtcggctattcctatgatgatgccgggcacggcgactccaagtccgcatccgcaaagaccgataagcaaggtgaaaccagccccaattccgccgtcgctcctgcgctcaccaacatcaccttcgccgcacggcccggtcagttcaccgccattgttggcatctccggttccggcaagtccacggccgcctcgctgctcgccggtacactggccggttaccgaggttcgctcacactgaacggcgtcgaggtatccgatttgtcaggcgaaacactggccggagccgtcactgtgattggtgccagcagccatctgtttgcgggcgcattgcgcgagaatcttctgatggccttgcccgatgacgagattcctgattcgccggattccgtggactcccgtctgtggtccgcgctcgagcaggcgcgcattgccgacttcgtgcacgcacagccgaacggactgggcatgccgattgagtccgatgccgccaacctgtccggcggccaacgccagcgcatcgccatcgcccgcgcactcctgcatgattcgccggtatttgtgttcgatgaggcgaccagcagcgttgacatggaatccgaagagctgatcctggatacaattcgcgaattggcgcaatcccgcggcaagacggttattatgatcacccatcgcatggccaacgccgaatacgctgatcaagtggtggtgctcgaacacggcaagtcggttgagaggggcacccataccgagctgatgacggcggacggcgtctacgccaagctgtttaccacgcaggcagatattgagaacttcggagaaggccatgctcggcgtgtgctgcaggttggttcccgcaagcaggagctgtccgacgacagtcggactgagggtggcgcagcgcgcgtaagcgcagaggcgggtatgacggttgaccgcctgcagtcagctttgccgacggcttccgttggcgggagtgagcaggcctcggctgagactccggctggtgttgcaaatagcgattcgtcttccaaaatgagcacattccaagtgatcaggcgactgcttaaggaagcccgacctctggcaggactgatggcagcggcctccaccgccggcaccatcggccatctttcggccactttcctgcccgtgttcggcattatcgcggcatttgcacttaccggtaatccggtgtggggcatgggtgttgcgcccgccgtcatcatgatgattatctgtgctcttctgcgtggcatcacccgatacattgaacaatatctgaaccacaatgtggcattccatctgctcgcactcttccgttccaaggcgttcgccgcgttgcgcagactggcgccggccaagctcgcgggcaaaggtaagggcaaccttatcgccatgctgaccaccgatgtggaactgcttgagatcttctttgtccacaccatcagtccggtggccatcgcggtaacctccaccatcatctacacgattgtggccgccaccctaagcccatggatggcgctggcgttgattgccgcccacctggttatcggcatccttgtgccgcgattctttgccaccggcgtacgtaaccttggccctgccatccgtggcgctgccggagaactcgacgatgtgatactcgatgacatgcgcggcctggacgaaatcatccgatttggccgcggcgaggaacgtgcgcaggccatcgaggaccgtacccatgcgttgtggaaggatcacaccaaactcagcaaggtcaacggccgtttcaccggaatcagcggactcttggtggctgtgctcacagcggcttcggtcgccgtggctattgcctgtgccggcgcgaacccgcagagcattccggctctgattgccgccttcgtgctgttcgccagctcgttcgaaccgactttggcgctcgccgccttgcccgctaacctgactcagaccttcgcgtccgctagccgactgttcggactgatggacgaggtgcccgctgtgaccgagaacggcactgttgtgccgcaggagtatatgggcatgcgtcttgatgacgtcacctttgcatatgcgggggagcatgaagtcctgtccgacttctcgcttgacgtgccgcagcatggcgtgctgggtatccaggggccgtccggccgaggcaagtccaccatgctcaagctgctgctgcgctactgggatccgcagcgcggtcaggtgacgttgtccggcacgccgttgcccgaggtcgatgtgcatgctcgccgacgtattcaggccatgatgagccaggaaatccacctgtttgatggctctatccgagacaatctgctgattgctttgcctgagtccgaggttgaagctgcaaatgttgcaggcaatggggaagtgggtgccaagaccgttgattcccgacagcagcggttggcggcgcaatcggcagagggcgatgccgttcaggtggcagcagctgacggtctcgatgctcgtttgcgtcaggctctcgccaaggcctccgtgcttgatctcattgattccctgcccgatggccttgatactcaggtaggcgagttgggcgaccgtctatccgaaggtgaacgccagcgtatcggtttggctcgtgtgttcctgcgcaatgctgatctggtgcttttcgacgagccgaccagccgtttggatgctttgaacgaggctattattctacgttccattcacgctatggccgtgggtgagcagcatgcagacaaggagcgcggcgcggctgtggtgctggtctcccaccgcgaatccgccatgcgcattgctgatgcggtactcaatctgtaactgcctgtaactacgcgggaatcacatcgcattgcgttacgttaccgcgttgcattgcggttcctcgcgggtggcggcgatgccatctccggtcgtcattgcgttgctgcgtttgtgttgcgatatgtgatgcggcaacgcagcaatgcggcaatgcaatgtgatgtggcaacgtggcaacgtagcgatgcaataacgcggtaacatggcaacatggcaatgcagtaacgcaacgcagcattcacgccttgatcaaagcgccgatgacgctgtcgaacgcagtgagactgaggggagccaaagcccaaaaccggcaaacacagcaccggccatgagccgatacaataaaggatttgattaatatgactactcatagagcatttaggtggccgtccctgctgacggaatccggccgcggcatcgcgttcggcggcgactacaacccggaccagtggcccgaggagacgctggacgaggatatccgtctcatgggtgaggccggcgtgaacgtcgtgtcgctggcaattttcagctgggacaagatcgagccggtcgagggcgcgttcacgttcgagtggctcgaccatgtgatcgacaggctcggcagagccggcatcgccgtggacttggcctccgccacagccgccgcgccgctgtggctgtacgaatcccatccagaggtgctgccggtagaccggtatggtcatatcgtcaacgcgggctcacgccagtcgtggcagcccacaagcccggtgttcaaggaatacgcgctgcgcctgtgccgcaaacttgccgaacactacaaggacaacccgtatgtaaccgcctggcacatgggcaacgaatacggctggaacaaccgctacgactactccgacaacgccttggccgcgttccgcacgtggtgcgaggccaagtacggtaccatcgacgcgttgaacgaggcgtggggcacggccttctggtcgcagcacgtgaacagtttcgacgaggtgctgctgccacgtcacatgggcggcgacgccatggtcaacccgtcgcagcagttggattacgagcggttcggcaacgacatgctgctcgacttctacaaggccgaacgtgacgccatcgagcagatctgccccggcaagccgttcaccacgaacttcatggtctccaccgaccagtgcgtcatggactacgccaaatgggccggcgaggtggacttcgtgtccaacgaccactacttccatgaaggcgaatcccacctggacgagctcgcctgctcggacgcgctcatggactccctcgcgctgggcaagccgtggtacgtgatggagcactccacctcagccgtgcagtggaagccgctcaacgcgcgcaaacgggccggcgagctcatgcgcgactccctggcccacgtggccatgggcgccgacgccatctgctttttccaatggcggcagtccgtgtccggcgccgaggcgtttcactccgccatgctgccccacgcgggcgccgacacgaaggtcttccgcggcgtatgcgagctcggcaaggcgctgaagactctctccgacgccgggctgcagggcactgagctcgagcgtgccggcacggcgatcctgttcagcgcggaatccgaatgggccacacgctccgaaaccctgcccagcatgaaactcaaccactggcacgacgttcgcgactggtaccgcggcttcctggatgccgggctgcgcgcggacgtggtgccgctcgcctacgactggaccgactacaaaaccatcgtgctgcccaccgtgctcagcctgtccgacgaagacgttcgccgtatcgccgacttcgcgaaggccggcggaaccgtcatcgtcggctacgccactggcctgatcgacgagtacttccacatcgggctcggcggatacccaggtgccggcaatggcctcctacgcgacatgctcggcatccgcagcgaagaattcaacatcctcggtgaagaagccgaaggcgagcccagcgaaatcagcctgtccaacggtctgacgacccgcctgtggcagaacgacgtgacttccgtagccgcggacaccacagtgcttgcctcttacgcaggtgagtccgccgccgactgggagctggagcgcacccccgccatcaccagccgtccctatggcaacggtaccgccatctacgtgggctgcgacctcaaccgtcacgacattgcccagctgctcaaagcacttggctcccgctggcgggagctgtcggcgcagccgactgagagtggtcaaactccaacctatcccaccacagatccccgcatcctgcacaccatccgccgatccgcagacggctccacccgcttcgatttctacctcaaccgctcaaaccagcccgtcgccatcaacggtgtggaaggtgatcccatcatcgcccaccgttgcgagactgacgccgttggatatacgctgaaccgcaacgccattcttatcgctaaaacgtcctgctaaaccgcgctagaatggcaatgttgtccggatagaggagtgcggcatgagcgacgagaaaacagccaagcgtcgagtgacgctacgcgatgtcgctcaggccgccggtgtatcgctcaaaaccgcgtcgaacgtgatcaatggctccgggcgtatgacagatgagacccgtgccaaggtcgagtcggtcattaaggacctcgactaccgagtcaacgtggccgcccgcaacctcaaccgcgatcacaccggcttcatcaccctcgccgtgccttcgctgattccgccatatctggccgagctcgccaaccgcaccatcgaggccgcccgtcagcgcgactattccgtatacgtcaccacgtatgcggaaggctccgcgaaaggcgcgcgcgatctgctgaagaagttcaactccacggtgtccgatggcatgatcctttccatgagcgaggtggaaaacatttcgcccgatgatctgaaggttgattttccgctggtcatcgttggcgcgcgtaccacgtggggcattgtggatcacgtgaccccagatgatgtatccgcagccgccatggccgcaggctacctgtatgaccgcggttccaccagacttgcagtgatcggtgcccgtgacgtttacgacgaagatgcattgctgaatgccgtagaaggcaacgcgcagctgcgtctgcgcggcatcatcgaagagacccgtaggcgtgggctctccttggatccgcagctgattggcaacaccgatcaggattggaccatcggagccggtgcccgtgtgacccagcggctcattgattccggcgtgccattcgacggtgtgattgccttgaacgatcagttggccatcggcgcattgaccgctctgcgcaccgctggttatgaggtgcccgtgcaggtgcaggtcatcggcttcgataacaacgaggaagccccctacctgcagattccgctgaccaccatggattcccgccttgactggacggctcccacggcagtg

SEQ ID NO: 783 - DNA, 3538 bp, Unknown
  R14_18m  MAG No. k141_2995
atgatgcactattgctcatttactgctccctacgatggtcttaaccaacaggttctaagggtcaggctcaggcctttctcaactcgcgaaccacatgcgagtccccctgcactacagtgccgacgctatgcgccaacatggacattatcgtgacggatttgttcgatacgtgtcgtcaggtctggcgcgtcccgtccattcgtgatatgtggacgcctccgccgagcaacatctcccggatttgtgacgctgacgcgatgtcagtggtacaaattcgggaagggtaaaacaacaggaacaatatggaggtgttgcgatataggaatcgctgcgaacggccgctcgtgagacgcggaacatataccggacaatgccgcctgacctgtcaccgtatacggctatcctgaagcggttgttattagaccccaaaccgttcaaaccagaaggtgcattgtggctcagtccaaactcgatgaagtcgtatcccttgcgaagcgtcgcggcttcgtgttccccgccggcgaaatttacggcggcacccgttccgcttgggattacggccccctcggcgtcgctctcaaggacaatatcaagcgtgaatggtggcgctccatggtcgtcacccgtcctgatgtcgtcggtgtcgacacctccatcattctgccgcccgaagtgtgggtggcgtccggccacgtgagcgtgttcaacgatccgctcgtcgagtgcctcaactgccacaagcgcaaccgcgccgacaagctcgaggaatcctacgccgagaagcacggcgacaagatgccggaaaacggcatgaaggacatcgtctgcccgaactgcggcacccgtggccagtggaccgaaccgcgcgacttcaacatgatgctgcgcacccacctcggcccggtcgaggacgagaacagcctgcactacctgcgtccggagactgcacagggcatcttcgtcgacttcaagaacgtgatgacctcctcccgttccaagccgccgttcggcatcgccaacatgggtaagtccttccgtaacgagatcaccccgggcaacttcatcttccgcacccgtgagttcgagcagatggagatggagttcttcgtcaagcccggcaccgatgaggaatggcaccagtactggatcgacgcccgcacccgctggtacatcgacctcggcgtcaagccagagaacctgcgccactacgagcacccgaaggagaagctctcccactactccaagcgcaccgtggacatcgaatacaagttcggcttccaaggttccgactggggcgagctcgaaggcatcgccaaccgtaccgattacgatttgagcgcgcactccaagcactccggcgaagacctgagctacttcaaccaggccaccggcgagaagtacgtgccgtacgtcatcgaaccggccgccggtctgacccgttccctgatgtgcttcctcgtggacgcctacgatgtggacgaggccccgaacaccaagggcggcgtcgacaagcgcaccgtgctgcgtctcgacccgcgtctggccccggtcaaggccgccgtgctgccgctgagcaagaagcctgaactgcagaccgtggcccagaacctggccgacgacctgcgcttcaacgaatggatgatcgactacgacgagtccggtgccatcggtcgtcgttaccgtcgtcaggacgagatcggcaccccgctgtgcatcaccgtggacttcgacaccctcgaggaccacgccgtgaccatccgtgagcgtgacaccatggcccaggagcgcgtcgctcttgacaaggtggccgattacgtggccgcccgcatcggcgagaagcgcacccgcgtgcccctgaagcccgtggaaatgggcggcgaggcttggcctgagtccggcgttcaggaagccggcggtctgtactaaagacgggtctgtatagaggctcccctctatgaggggagctgtctacgaagtggactgagggggctcttgctgaggcgactcccctcagtcgcctacggcggcagctccccctcaaagaggggagccaaaactatttcagaacaggaaccacatggcagaatctgaaaccgaaaccaccatcaccgctactcacgagaccaacaatctcgacccgcgtacggacgcgccggcacggcccgagactccggtatacatcgcccccgtgcagctcggcaacattaccgtgccgaccccggtggtgctttcgccgatggcgggcgtgaccaactggccgttccgcgtgatctgcgaggaatacggtcccgatggtctttacgtggccgagatgatcaccgcgcgggccctcgtggcgcgcaacccgaaagccctgcgtctctgccatttcgccaaaagcgaaaaaattcgttcgctgcagttgtatggcgtgaatccgtccatcaccgaacaggcggcgaaaatcgtggtcgacggcaacatggccgaccatgtggacctgaacttcggttgcccggtacccaaggtcacccgtcgcgggggaggctcggccctgccatggaaaaccgacatcttcaccgagctcatccagcgcgtggtcgccgtatgcgagccggcgggcatccccgtcacctcgaagatccgcgtcggcatcgaccataaccatgagaccttcctcgaagccggacacatcgcgcaggaggagggctgcaaggccgtaaccctgcatgcccgcaccaccgccgaatactatggcggtcattccgactggtcccgcatcggcgagctcaaggaacacctcaacattccggtattcggcaatggcgatatctggggtgccgaggacgcgctcgaaatggtgcgcgagaccggctgcgacggcgtggccatcggccgcggatgtcagggccggccgtggctgttcgccaacatcaaaaacgccttcgagggcaatcccgaacggctcaacccgaatctgggcgaggtctgccgggtgattcaccgtcatgccgagctgcttaccgagttctatgagggcgatgagatgatggccgtccacgatctgcgcaagcacatcgcctggtatctgaaagggttcccggtgggtgggtccacccgcaaggcctttatggaatgcgagagcctggccgatgtggaccgcgagatcggcaagctcgacccgaccatcgaatacccgccacgcgtggtcgacaaaccgcgcggccgcgtgcgtttcgccaagaaggtgcacttgccgtatgggtggttggaatcgcgtaccaccacccacgaagagcgtgaggcgctcttcggtgacgacccaatggacgccagttactgaaaaaatactgaaaatacacgcaacacgcgccattctgcgcgtgaatttccctccaagagtagcctgtttgcgctactcttgggtgtaaccgtgaagtgacaggagccaaacgtgagcgagatcgcgcagaatgagttcaacgacaagaccaacatcaaggttgttggcgtcggcggtgccggcggtaatgccgtcaatcgcatgattgccgaggga

SEQ ID NO: 784 - DNA, 7982 bp, Unknown
  R14_18m  MAG No. k141_3017
acatgcaccaggtgatcgacaccgccctgaccgcctacgaggaacaagtcgcgccgctgctgaagaagtagaccgtcgtttcaccagaggattaacgatttagcttgaaaccgactgaatattgctgaggcaatagccggtttcaggcttctgtgttttttgggaagccaaatttcctggggtacttaaggctcgccacgaggagtacagttgtctgtaacgcacaatgtggcgcgtaagacgaggggcgtatctcgcaagtggggtgcgatgcagttgaaggagtgcatgtcatgactgatccgaatgccaatccgaacggccaggtgccggggcagcaagctgacgccaatccgactgagccgttaaatgcgatgacgggggaagcaggaaccgccgccaacaatgctccaacccaagcactcgcagcgggcgaacagcccactcaggcgttcactcctgttgagcagcctacgcaggcgtttacacctgccgagcagtccacccagcctcttgcgccggtcaatcagccggtaccgcctacgcaggctttgccaccagtgactcctgccgctgcgcccgcgcctgcgcccgcaccgacagcgcccgcgcctgcgcccgcaccgacagcgcccgcgcctgcgcccgcaccagcagcgcccaattcgccctatccggggacggctccggcaggcggatcggttcctccggtctacggcagcgtcagtgctcggtatccgggcggcggggccgtgcctccgcaaacgccctataacccgtatatgcaaggcggccaaccgaacggccagccgggatggtctggttcttacggcagtgtgccgcctgaagcgaaccagaagtacaacggcctggctattgccggttttatctgctcgttccttgtctcactccccggtctgatcctgagcatcgtgggcctcaaccagattaagaaacagggcggcaagggcaagggcttggccatcgccggcatcatcatcagtgcggcgggcatggtgatacaggtaatactggtcatcgcgctgatcgtcggcggtgtctcgtacaccagcaaggctatagatgaggcgaaaaccgattccttctatagtcagtcctcttcgggcaacggtgatagcagcgataagagcaaagctcaagataatcttgacgatgcgctggacgacacgttgggcgaaacccatgacgatctaaccgacggcgattatgggctgtacgattcgattcaggatttcgtcgactcttcggaattcaaggactccattgaatccgaagcggatacgtttgcagataccggcatcaccttcaactaccgtgtcgacggtgacaccttggtgtacgagtacgtgctcgacgaccgctatgcctcgctaggcgataccgtcgcttcctcactggatgctatgaacagcacctatcaatccaccgcgaatctgctgggctcgatgtgcaagacctccagcggcaaggcatcgttgcgcgtcatcatgcacacgcaaagcggccagtcgctgtacgacaaaacctggaccgaaaagtagcaatcccagcgaacgtgcgttttggtcggttgaaggccggtctgcttgctccttggacggatgcttctgcggaaggaactgccaaggagtaggcttacaggcatgagactcgcacgtttttctttgaatgattcgccgcgctacgccttcgtgcagaaggacgaaacggacggcaaggactacctcatcgaacttgacggtcatccgctggccggcgaccgggtcaagcccaccggcactcgttacccggtcgacggcgacggcatccgcctgctctccccggtcatcccctccaaggtttacggtctggccaagaactacgaggcccacgcccagttcatgcacgaggccggccactccgaaatcgcccacgcgccggaagacatggtgatcttcaccaagccgtccacctcggtgattggccccgacgatccgatcgtgtacccggcctgctccaaggacatgaacttcgagccggaagtggccgtggtgatgggccgtatcgccaagaacgtgtccgttgaaaacgcgatggattacgtgctcggcttcacctgcgtgaacgacgtgacgttgcgcgacctgcagggcatcgaccccacgtggacgcgcgccaagggcttcgatacttcctgcccgcttggcccgtggattgtgatgcgtgacgacctcgactggagggacgccaagatttccttcacgctgaacggcgaggatgtgccgatggcgtctggcaccaccgcgaacctgattcacggcatccccgagcagattgccgcgatttcgtcgttctccacgctgctgcctggtgacgtcatcatgaccggcaccccgaacgcctccggccacctcgacccaggcgacgagaccatcgtgcacgtcgagggcatcggcgatctgcgcaacgtaatcgttcgggcgtgactcgttctggatcccctctctgaggggagccgtccaggcggagaagctgactgaggggaaccaagaacgcgccttacgctcccggcagaagtgcgtgcagggcggtcatcaccaccaagctgatgatggccgtcactgtcagcgagaagccggcgagcttggcgttgccggttagcgaatcggtgaacttggttgagaagatcgtgataggggcgaacgagcccaacacgatgatctcgcgaatcctcatgtcgaatggcagtaggaaccaggcggccacggcgataatcgcgccgaataccatgcgccagacaatcaccttgcccaactccaccttgtccttgcgattgttcggaatctccatcatcagtccgatcatggccatcgcgcagaaggcgttcgcattggcgaacggggtgatgagcgtaacgatgggctgtgggatcgtgatgtgcaggaacatgaacaccagcatcagcatgtagatgtcgaaggaaatcgagcttaggaagtccctggcaatattgcgcagacgcaggatgagcggtagcgacttgaaattgtcatccatatgcagcagcgtgcgtgtgatggtcagtgacccggccgtggccacggtggcgttgccgatatcgagcatgatgatcggcagaccggcggacgggcccatgaacgtctgaaccacaggcaggcagaacgcgcccaggttcaggcccgaggcgttgagcatctggaaggcgcggtagttcttctcgtcgccgcgagaaccgaaatacacgatgaacagcggaatcgcgcaggcgaagaagccgaacaacacgatccacagcatgcgcatgtcgtgcttgttcgtggcgaacgacaggataatcgcacaaggaagcgtcagattgaataccagaccctgcacgattttgtaatcacgctcgccgaaaatgtggacatgtttgagtatgtagacaccaatgataacgagcagcagcgaaccggcctgaaaaatcatgttcttctcttatcccacaagcacccgccgcagcaccggcggcggtcaggcgcataacaaaccagccgtgagtataggagcgttcgcgcggcgctggcgcggggcggtgcatattgtggacagtcccgtaacgttgatatgccatgctggcgagatgaatatatccaataccaagtggagctcggcacgatagagaggtaggaaaacatggcagagcagacggtcaccgtaggcgttggggcattgagcatcgaggacgttatcgccgtagcgcgcggcggtgccaaagtggcgatttcggacgaatcgaagcatgagatggcgctaagtcgcgcggttatcgatcatttggccgacgacaccgtgccgcattacggtatctccaccggattcggcgcgctcgcctccacttccatccccaaggaacagcgcgcgcagctgcagaaaagtctgatccgctcgcatgccgccggtgccggaccggaagtggagcgtgaggtggtgcgcggcctgctggtgctgcgcctgagcaccctgtgcaccggacgcaccggtgtgcgcccggaaaccgcgcaggtctacgccgatatgctgaacgccggcatcaccccggtggtctacgaatacggttcgctcggatgctccggtgatttggcgccgctcgccgcctgcgctttggtggcgatgggcgaaggcgaggcccgcaacgctgacggccgcaagatcggcggcggcgaagcgctgcgtgcggccggcatcacgcccgtcgatttgaaagagaaggaaggcttggcgctggtcaacggcaccgacggcatgctcggcatgttgtgtatggccatcaccgatctgcgcctgctactcaagacggcggacatcgccgccgcgatgagcgtggaaggcatgctcggcaacgaccgcgtgttcgccgccgacttgcaggcgctgcgtccgcatcgcggccaaggcgattccgccgcgaacatcgtccgcatgctcaagggctctggtctgatcgaagccggccgcccgggctccaccgtgcgtgtgcaggacgcctactcgctgcgctgcaccccgcaggtgcacggcgccgcccgcgacaccgtggaatacgcggcctccgtggcgggcgtggaactcgcctccgccatcgacaacccgtgcgtcacgctggacggccgtgtggagtccaacggcaacttccatggcgcgccgctggcctatgtgctcgatttcctggcgattccgactgccgacgtagcctctatctccgagcgtcgtaccgaccgcttccttgacgtggcgcgcaaccgcggcctgccggcgttcctggctggtgacccgggcgtggactccggtttcatgatcgcccagtacaccgccgccggcatcgtctccgaaatgaagcgcaacgccgtgcccgcctcggtcgattcgattccgagctccgccatgcaggaagatcacgtgtcgatgggctgggccgccgcccgcaagctgcgccggtcgattccggcctttgcgcgcgtgctggccgtggaactgctgtgctcctgccgctccttcgacttccgcaagccgtaccgtccgggtgcggcgggcgccgccgtataccgcgtggtgcgccagtacgccaacgaaatcggccccgacgtacgcgatacctggaccaccccgcaaatcgaaggcgtagccaacgccatcctctccggcgaaatcctatccgccgccgaagctgccgtcggcctcctgaaatagatgtgagctccctcatcagagggggctactgttcaccctccccaccaaaatccaaaacttgagtcacctgcactcaagttttgggaatagaatgggttccaggtcggttgaccatatcagacaacgacaagttgcggtctgcggtggcgcttgcggggctttcgaagcccgcgagccgctccgcgcgggccgcatgatatggaggaatacgatatggaacagaagttcaccactatggcccaggaggccgtcggcgacgcgattcagagtgcgtccgccgcaggaaacgcgcaggtcgagaccctgcacgtcatggatgcgttgctgcgtcaggaaaacggcgtggtgcgctccctcatcgaggccgcgggcggagacccacaggccatcggcgccgccgtgcgtaacgctttggtcgcactgccgagcgcatccggctccagcacttcgcagccgcaggccagccgccagctgaccgccgccatcgcccaggctgagaaggaaatgcagcagatgggcgacgaatacgtctccaccgagcacctgcttatcggcatcgcggccagcaagccgaaccagtcggccgaaatcctggagaagaacggcgtcaccgcagcctccctgcgcaaggccgtacccggcgtgcgtggcggcgcgaaggtcaccagcccggacgcggaaggctcgtacaaggccctggagaagtactccaccgacctgacggccgccgccaaggaaggcaagctcgatccggtgatcggccgtgatcaggaaatccgccgcgtgattcagatcctctcccgtcgtaccaagaacaacccggtgctgatcggcgagcccggcgtcggcaagaccgccgtcgtggaaggcctggcccagcgtatcgtggcgggcgacgtgcccaccaccctgcaaggcaagaagctcatctcccttgacctaggctccatggtggccggctcgaagtaccgtggcgagttcgaggagcgcctgaagagcgtcctcaacgaaatcaagaacgcggacggccagatcatcaccttcatcgacgagattcacaccatcgtcggcgcgggtgcggccgaaggctcgatggacgccggcaatatgctgaagcctatgctggcccgtggcgagctgcgcctgatcggcgcgaccacgctggacgagtaccgcgagaacatcgaaaaggatccggcattggaacgccgtttccaacaggtgttcgtgggcgagccgagcgtggaagacaccatcgccatcctgcgtggcctgaagcagcgttacgaggcgcaccacaaggtgacaatcggcgatgacgcgctggttgccgccgcgaccctctcgaaccgttatattccgggccgtcagctgccggacaaggccatcgacctggtcgatgaggcggctgcccacctgcgtatggagctcgactcctcgcctgaggagatcgatgaactgcagcgtaaggtgacccgtcttgaaatggaggaaatgcagctcaagaaggctgaggatcctgcatccaaggagcgtctgggcaagctgcaagccgaactcgcggacacccgtgagaagctcagcggcctcaaggcgcgttgggatgcggagcaggccggccacaacaaggtcggtgacctgcgtgccaagctcgatgacctgcgtgtgcaggcggacaagttcacccgtgagggaaatctggctgaggcctcgaagattctgtacggagagattccggctattcagaaggaactcgccgccgcggaaagcgcggatgccgaatctgccgatgccggcgcggccaacccggccgatgagccgatggtcccggaccgtgtggacgccgactcggtggccgagatcgtctccgactggaccggcattcccgttggccgcctgatgcagggcgagaacgagaagctgctgcatatggaggactacctgggcaagcgtgtgatcggccagaaggaagccatcgccgccgtgtccgacgcggtgcgccgttcgcgtgccggcatctccgacccgaaccgtccgaccggatcgttcctgttcctcggtcccaccggtgtgggcaagaccgaactggccaaggcgctcgccgacttcctgttcgacgacgagaaggccatggtccgcatcgacatgtccgaatacatggagaaggcttcagtctcgcgcctgatcggtgcggctccgggctacgtgggctacgagcagggcggccagctgaccgaggccgtgcgccgccgcccgtattccgtggtgctgttcgacgaggtcgagaaggccaatccggagatcttcgacgtgctgctgcaggtgctcgacgatggccgcctgaccgatggccagggcaggaccgtggacttcaagaacacgatcctgatcatgacctccaacctcggctcgcagttcctcgtgaacgaggacatggacgccgacgccaagaagaaggccgtgatggacgccgtccacatgaacttcaagccggagttcctgaaccgtctggacgacatcgtcatgttccacccgctcacgcgtgaggagcttggcggcatcgtggatatccaggtggctggcgtggcccagcgtctgaccgatcgccgcatcacgctggacgtcaccgactcggctcgcgaatggctggccaacaccggttacgacccggcttatggcgctcgtccgctgcgccgcctggtacagaccgaagtgggcgaccagctggcccg

SEQ ID NO: 785 - DNA, 5595 bp, Unknown
  R14_18m  MAG No. k141_3087
gctggcctccaccttgtcgtgcagatggtcggcgttgaacaggtcatgcacgcggatgccgacacggttgatcttgtccgcgtaggctgggccgatgccacggccggtggtgccgatcttgtgcttgccaaggaagcgttcagtcaccttgtcgagtgtgcggtggtagggcgcgatgatgtgtgcggcctcgctcaccttgaggtgggagcaatcgatgccgcgggattccaggccgtcgatctcctcgaagagcacttccgggtccacgaccacgccgttgccgatcaccggggtgaggttcgggttgatgatgccggagggcagcaggtgcagggcgtacgactcgtcgccgaccaccacgctatggcccgcgttgttgccgccgttgaagcgcgcgacataatcgaccttggtaccgatcagatcggtcgccttgcctttaccctcatcgccccactgggcaccaataagaacaattccaggcatgatgcacctccgcattcgcacgattccgccggaaacagactaccttacaccctctactcggggcgcggccatctcacgcaatcgggcttctggtgtctttgccgcgcgttgcgcgaggcgggccgacaccaaggcgccgccacggcgaatgacagtttatttgggtgttatctgagtgctttgccggccgagccgagttgcttgcatgcctcagccacgcgggcggacatggattcctcggccttgcggccccaggaacgcggatcgtagaacttcttttcgcccacttcaccgtcgatcttgaggaccttgtcatagttctcgaacacatggtcggcaatcgggcgcgtgaacgagtattgcgtgtcggtgtcgatgttcatcttgatcacgccatggctcacggcttctgcaatctcttccggacgggagcccgaaccgccgtggaacaccaattcgaacggcttgccgttgggaaagtcgactatgccggcggcgctgggcagctcaccctcgaccaccgcgcgcgccacacgggactgaatatcaccgagcagggcgggacgcagcttgaccacgccgggcttgtaggagccgtgcacattaccgaacgtgaaggcggccatgtatcggccacgctcgcccaaaccaaggcgacgggccacttcaaggccatcggccggcgtggaatagaggcgttcgtcgattttggcggaatagccgtcttcctcgccgccgaccgcgccgatctcgatctccagcaccgtgtgcgcggcctgcgacttatcgagcagctcctcggcgatgtccagattttccttgagcgacacggtggagccgtcccacatatgcgactggaatgtgggctcctgaccatgcgccacctgatcggtctcatgtgcgagcagcggtcgcacccattcgtccagatactgcttggcgcagtgatcggtgtgcagggcgatggtgatgttcgggtacttcgcggcgacctcgtgtgcaaaagcggccaaggccagcgatccggtgacacggtcgttgacgccgatgccggaaaggtatgcggctgcgccgacggacacctggatgatgccgtcggattcggcatccgcgaaccccttcagcgcggcgttcagcgtctgcgagctggtcacgttgatggcagggtaagcgtagccgccgcgtcgtgcggcgtctagcatttcggcataacgttccggtgttgcgattgtcatggcttcattatcgctcggggtgtgcccgccagactaggttctggagccaggcgagctgtgaactatctcacgaggaacaccatgatgataatcatggcgaagccgaccaaatcggtcggggtaaagaccgcgccggcgaataggacaccggtgatagtggcggttacgggttcactggtgccgagcatggtggcgcgcattgcaccgcagcgctgggtgccgccgaggaatagccaataggcaccgaatgtgccgaacaccacggtgaataccatcagaccaatgccgaaccagtccaacgcgggggcggtggtccacgggcgcacgagcggcagcagcattaggccggaaacgatgaacatgacgccgctggccatgaagttgccccatttggccattaatgcgatgggcagaatcgcaagcagtgacgtgcatacggcatcggtcaggccccacagcagaccgggcagcggcagactgagctggctgagatcgccgcctgtggcgatgagcaccgtgcccacaaaagcgagtaccacaccgatgctttcgcgtttgccgggcagccgtttgcccataatacatacgaatacgagtacaaccagcagattgagcgtctgcagcactgtggccgtgccggaattggtccagtcaatggccttcaagtaggagacctgcaccatgagcacgcagaagaacgcgcacagcaggagtctcgggtaggaacggtagtccttaagcgagttgatgaacttgtcaggcgtgaagattcctgcgcaaaccagaaagatgacaccggccaatagctcgcgcacgcaggcgatccacagcggatcggcgtgatagtcgttcatcaggagtttggagacggtggcgttgacgccccagaagacgcctccggcgagcgccagtccggcaccgacgaagatgtcgtgcggggtgcgttcgagggttggcgttggttggccattggttgcagcggtcttgggttcacacatcgcccatcacgatacgcggacgacgtgaattgttctcatatagcggtcatacggcaggaaaataagctctcaaaagagggaaaaccgttgaaatttcaaggaaaatcgatggagcggacgacgggagtcgaacccgcctctaaagcttgggaagctttcattctaccgatgaactacgtccgcatgtgcgcttccacgcacgagaggcaagtgtatcacctatgcggcaccttgcgccatgtgccggtttgagttctgtgctggactagtgaattgcgcgcgtggaatacgtggatgcggccaccggagtgccgttcatttcattggccatttgcatcaggcgtgcgatgcgctgatcagtcggcggatgcgtggagaacagtttggagaaaccgaccgcggagaacggattggcaatcatcatcgcggagacggactgggtgccggccgttttgcgcataggcgtggtctgggcaccataggagatcttgttgagcgcggaggccagggcctcggggtcgccggtcagcagactgccgtcttcgtcggcgtcgtattcgcgagtacgggagatggccatctgaatcagtgatgcggcaatcggcgcgagaatcacgctgaggagcacgccgatcaagccgagaccgcctgaattatcgcggtcgtcgcgcgagttgccgccgccgaaatacatcagagaataaccgaggtacgtgatgacggtggccatggcagaggcgatggcggaggtcagaatgtcgcggttgtacacgtgcatcagttcatgacccagcacgccgcgcaactcgcgggcgttcagaatctgcaggatgccctgcgtgcagcatacggcagcgtgacgttcgttgcggccggtggcgaaggcgttcggactcatggtgggcgcgatgtagatgcgaggcatcggcttgccggccttggcactcagctcgcgcacgatctggtagatttcgggggcttcctgctcgctgacctccctggctcccatggatgcgatggcgagtttgtcggagaaccagtatgagccgaacgtggtggccaacccgataatgacgtagatgcccagcgtctgctgcctgccgcccgtggcccaccatatcagcatgatgatggcccacatcaaggcgaacagcagcgtagtcttcaggccgttgaaatggccgtgcacccgtactttggcatccatgaggctcacactaaaatcactgcctgaatattggctggatgtgcgccgaggggtgaatcggatgggggttggcggtgcttacggtgcggttggcggggatcggaatagcctgtttacatgagattgacgatgcttgacagtgcggttgcttggcctgttttaccgctttaccgctttaccgattggtctgatcgagacgctttgcttgtttggcctgctttggctgcttggatcgtttggcccatcggcctgctcgactggcatgacaatggcttttatataaataagaacgctggcgtataaccggcgttcttatttatcgatgtatcaatcgcgccgattgctgctggtgcagttgccggtgcgatgagctgatagtcaatcaggccagagcgagctcacgcatctggtcgggctcgatgaccttcttgtgctcgcggccctccttggcgccttcggcgcgctcgaaggcgtcgaccttcttccagccagcgaagtcaatcggcttgacgccgcggctttccagcagtcggtcgatggattcggggtcgcgatcctcggccacgcgaccaccttcggcggccttggccagatcctcaagcatgttggtcacgatggcaagtgcgtcggacttggtggagccgatcaggcccaccgggccgcgcttggcccagccagtggcgtacagacggtcgcgcacttcgccgccgtccgcttcggtggtgatgcggccatcgccattggcgttggccaggtgggcgccgtgctcgtcgtaagtaatgccgggagcctcggccggcttgtagccgatggcgtggtagacggcctcaaccgggtagtcggtgaactcgccggtgcggctcatcttgccgtcggcactggtttcggtgcgttccacgcggatggccttgaccttgccgtcctcgccgaggatctcggtaggggcggagttgaagtgcacgtagtacttgcggtcggccgggttgccttcgaagtcgacgtcgccgtcatcttccatgtcctcggccatctcacggatggcgaacagttcctcgaccatctggcgggtgagcttgtccttgccggccacctcgatggtctcgtcgtccaaatcgaagtcgtcctcattgatgatgagctgcacgccgggcagcttctccatctcgcgcagttcctgcacgctgaacttggcctgggccacgccacgacggatgaacaggtgcagcaccttggccttgttgcggccgatgccctcgtacacgttgtcgggaatgtcggttctggccttgaggtcgtcggcgtcgcgcatgagctcgcgggccacatccatggccacgttgccgccgccgatcacggcgacgttctcggccgtcagcggccattcgcgggcaccggtgggatacccgtcgtaccattcgacgaacttggcggcaccgtacacaccttcaaggtcggcaccgggcaggttcagcggcttgtccttgaccgcgccggtggcgaacagcacggcgtcgtagcgggcgagcaggtcgtcaagagtcacgtccttgccgaattccacgtcgcaatagaggtggatgttcgggttgtcgagcgtcttctcaagcgcggaggcgatgaacttgatggacgggtggtccggggccacaccgtaacgcaccaggcc

SEQ ID NO: 786 - DNA, 14037 bp, Unknown
  R14_18m  MAG No. k141_3260
acttcgtcgtcggctgggtaggtggtaaagcgttcatgattccactgtgcgggttacttatgtaagagcacaagcgcaaccggcaaatgtggatactatgacgcggtttggcgtgttgtggataacgtgtggatgaaaacccggttatccaccattagttcagaaggtttaccaaggctccccagccgacttacctgtgacgacagacaacccgccgagttgttcgctgaatacgtcagacccagtgagcggagaggggagccaaggtgcggtcacttcaccaaatcggtgagttcgccaaggttcagttcgaagctgacgccacgatcctcgaaatgcggctggttacgggtgctgaccatggcgtgtcgcacgaactcgccggcgatttcggccgactcggccaagccgcggccggccatcaccgcgccgcacagggcagatgcgaaggcgtcacctgtgccatgaatcatgtatggcagcttttcatgagccagctcgatcttgccggcaacaccggtggaagcgctggccacatagttgacgattttgccatcgccatggtcgatgcccttcaacaccacgttcttggcacccaacttcagcagagcaccaagcagctcgttaaccgtggcctcatcaatatcctggccaggatagtcacgcttggtgagaatgctcgcttcggtgaggttcggcatcaacacgtcggcaccatcggccagagcgcccattgcctcgcacagctccggtgtatacgtggggtacatttcgccggcgtctcccatcaccgggtcaaccagacgcagcgcattcggatattcacggtagagacgctgaatgatcgccacctgatcgggggagccgaggaagcctgaatacacgccatccagttccacgtcttccttctgccaggcatccaagtaaccggagagaatatccgtggtgtcgtggaacgtgaacactgcatagcgcgtgtgcgccgagaacagggcggtcggcaccgggcacacatcgcagccggcggccgagagaatcggaatcgcggcggtcagcgagcacttgccgtagccgcacatgtcgtgcacggcggccacgcgcggaatatagctcggatcacggtcatacagtgttacatcggtcatgtctgttcgaaccccttcaccatgttggcggaataattcattggcgatgtttgactgtagtcgttcgtcatgtaaaccatgtaaccgggcggcggaaaaaaggaacagacgtcatcaccgagcgggcaaaccgtcttggtgacgggtggaacaagcaatcatcacggacacttgagccatgcgcgaaaggcatggtagcgatatcaccgtgaccgcagtcgaccgtgaaagcgcatgcgtgcggcccggcgtgtcgcgataatttcaacgactttttcgtgacttctgacagtctcccacgtcaatgatcccaaggctttataagcccttataggcaagcccgataacgttcggcttgcgccgcgcggcccaaacgtcgtaacttcataaccaacacctcgccaaccgcccgaacacggcaggcgggtggcaaggaaaaatcctcgcgacctagcacaaccaaggagaaagacccatggccgagaacaacaagaagtaccgttttgagaccctgcagctgcatgtgggccaggagcaggccgacccggccaccgactcccgtgcagtcccgatctacgccaccaccagctacgtcttccacaacttcgaccacgccgaggctcgcttcggtctcgctgacccgggcaacatctacggccgtttgaccaacaccacccagggtgtcttcgaggaccgcatcgccgcccttgaaggtggtaccgctggtctggccgtcgcttccggtgccgctgccgttgaatacgctgtgcgtaatatcacccagtccggtgaccacatcgtcgccgccaagaacatctacggtggaaccttcaacctgctgcgccacaccctgccgcgtgacggcatcaccaccaccttcgtttccgccgagaacccgcaggagttcgaggacgccatccaggagaacaccaagctcgtctacttcgagaccttcggcaacccgaacgctgatctgccggacttcgaggccatctccgaaatcgcccacaagcatcacctgccggtgatcgtggacaacaccttcgccactccgtacctgttccgcccgctggagcacggcgccgacgtggtggtcgagtccgccaccaagttcatcggcggccacggcaccaccctcggcggtgtgatcgtcgaaggcggcaagttcaactgggccgaggtgccgggcaagttcccgaccctgaccgagccggacccctcctaccacggcctgaacttctacgaggctctcggcggcaccgccttcgtgacccgtatccgcgccatcctgctgcgcgacaccggcgccaccctgtccccgttcgccgccttcctgctgctgcagggcaccgaaaccctgtccctgcgcgtcgagcgccacgtccagaacgctctgaaggtcgtcgagtacctgcagaccgtgccggaagtcgagtccgtctcccacccgtccatcccgggccgtccggatcacgacctgtacgagaagtacttcccgaacggagcaggctccatcttcaccttcgatatcaagggcggaaaggatgcggctcgcgtcttcatcgacaatctgcacctgttctctctgcttgccaatgtggccgacgcaaagtccctcgtcatccacccggcttccaccacgcactcccaggagaccttggaagagctcgaggaccagggcattcaccagggcaccatccgcctgtccatcggcaccgagaacatcgaggatatcctcgatgatctgaagggcggcttcgaagcccttcgcgcttccggcttggccaagtgaggtcgacaggagggttgacggcccgatgagaaggggcgcgatgctaatggggtgcatcgcgaatcatcgagccgcatggggtgccttccgcctgatcgcttgacccaaggagtagaaagctcgcactgacgtcatgcagtgcgggctttcttgcgtctgtatgcctcacactgtttgcgcagaggcatgaatagtgtgagacctgagacgacataatcctcaaggatgagggccggcacacggccactagcccaattcagtctggcgcacgatggggcgcgccgttatttcttcataagttggaatcatcgtccgggcatagggcccggccaaatatggagaggcattatgaacatgcagaacccgtccgcatcgcgaggcatcgctattcaggccgtcgacttggtcaagaactacggcgccggcggcaatatggttcacgccctgcgcggcgtgaacgtgagtttcgaacgcggcgaattcaccgccatcatgggcccgtccggctccggcaaatccacgcttatgcacacgctcgccggcctcgactccgccacatccgggcatatccttttcggcggggcagacctgacccgcatggacgacaagcagctcaccttgctgcgtcgccacaagatcggcttcatcttccaaagcttcaacctgctgcccatgttcaccgccgaacagaacatcctcatgccactgactctcgccggagacaagcccgaccgcgcttggttcgacctgctcgtcgaaaccctggggctgaagcagcgcctgaaccaccgaccgaatgaactgtccggtggccagcagcagcgcgtggccatcgcccgcgcgctgattaccaagccgaagctggtgttcgctgacgagccgaccggcaacctcgactccgtttccagcgccgaagtgctcggcttcctgaagcgttcggtcaacgagcttggccagaccatcgtcatggtcacgcacgatgcggtggccgcctcctatgccgaccgtgccatcgtattcgccgacggacagatcgtggccgacgaggcgaaccccaccgccgaaacgatgaacgagctgcttatgtccgaacgcgaacgtgccacgcgcactgccgtcaccggcacacgcgccgacacgctcgcccgtcttgccggcgtaaaggatgtgcccaacctgcccatcaccgacgctccattgcccccggctgggagaaccggcaccatgcgccatgcccgcgtcgctgcacagcacgcttgctgagccggaaagcgagagacaggacacccccatgttttccatcactctgaaacttatgaagaaaagcgctaggatgctgattccggcaggcatcgccatcctgatcggcactgcgttcatcgccgctaccttcctgttcggcaacgcgatgaacgatgcgcttgccgcccagaataccgcccagctcggcggcgcgaactacgtgatcagcccggatagcggcaaggacctgaccgataaggaccaggactacatctacacgcgcacggttaacgacttccagcttgaccgcatccgcgccaccaaaggcgtcaaggacgcacgtgccggctacgcgggttccgtgaccgtaacccgtggcaacaagcatgccagcagctacgtcatcaccaccgccacaaaacgcacgctgctgccggtcaccatcacgcaaggagaccagccggcggacagcaacgagatcgccctgaccaagtccgtagccgaccagctcggcgtcaaggtaggggaccgtgtgaccgtcaactcgcaggcggcgcagtatgcgggcaagaccggcgattcggccggtaataccggtgacgctggtgatgagtcggcccagaacgccgatggcacgagctcgcacgacggtgattccgatgccgcgtccggcgcgtccgccccatccgacggcaccgacacggccgccgactccggcatgaccgtgcgcgtggtcggcctcaccgacgacccgaacggtgcctacgcctactacggtggcgcttccgtgctttccgacaacgtcatcaccgcaatggccggcagcaacgatttcggcaacctgcctgtctacctcgtctatctcgacatcgacgatgccagcgacacggccgcggcatccaccgtaaaacaggtcagcacactgctccctaagcatttcagcgtgcaatcccgtgccgcgctcgtcgaggaatccgtcaaaagcatgagctcgggcgaaaccagcatcaccaccatcttcctgctgagcttcggcatgctcgccatgctggtcgcggcgctcgtcatcgccaacaccttccaagtgctcgtggcacagcgccgccgcacactcgccctgctgcgcaccatcggcgcgaacaaaagccagctgtatgtctccgtgctgtttgaagccggtgtgctgggactgatcgcctccgcactgggagtgggcctgggcatcggactcatggccgcactatgccagtcgggcctgatgaaagccaccggcatgaccatgcgactggtactatccggtccggtgttcacggtgcctatggcattcggcatcattatgacggtgattgcctcgctaggctccgcgcgttccgctaccgccgtcaccccgctggaagcgttgcgacccatcgaactgaccgacacgcgacgggccggtgtggtccgcgccgtgatttccatgctgctgattgtgggcggcgtggcactgtgcgcattctctgtatggcagatgtccgagaaaatcgccggacgtgattcaatggccgacaagcagtattcgctggtgctgctcgccgccatcatcggatgtgcattgatcttccttggactggtgctttccgccacgttctggctaccggtgctcatgcgcggcgtgggcgcgctggttgcactggccggtccgtccgccaaagtggcacatgcgaacattcagaagaacccgcgccgcgtggccgccaccggtgccgcactgcttatcggcgtgacgctggtctccaccatcgccactggtgccgccagcgccaagcaaaccatgaacgaggcgctgaccacgcgctacagcgtcgacatgattgccgctggcgccgatatgactggcaaacaggccggcgaggcagccaaagtcaagggcgttcagagcagtatctacgcgccgacccgcatgatgaccatgaaggatgccgacggcaagagcctgagtgtgcttgtcgtgggcgtggatggcgtcgacgcgctgcgcaaggtggtgcgctccgatttgtccggtgtgaccattgatggcgattccgtactgatgcccaagtattccgccgctacaggcaaggatattccgctggacaagagcgttacgttcacggctggagcggccgaagcacaagccgatgccgccaatggtccgtccggtaatgatgcgaacggcagcgccgaaaacggcaatggacaatccggcggcacacagacgctgacgctcaaaccgcggaaggtggactatcgccgcattgcctccaactacgccgcggtcgccttcgtggacgccagccacttcaccaacggtggaatcaaggccgacgggcatatcatgcttatgcgtattgacgccgaaggcgcgggtgttgcgttgaacgacgtattcaccaacgtgcagaatgtgttctccgccagtgcgggtgttaccgtgaccggtccggtggccgaacgtacgcaatgggagaccatgatcaacggcatgatggcattgttggtcggtttgattgcggtggctgtgctcatcgccttggtcggtgtggcgaacacgctgagtctgtcggtgatcgaacgcacacgcgaatccgccaccttgcgtgccatcggcatgacgcgcggccaactgcggcgctcgctggcggtggaggcgttgctgctttcgctcgtctccggcgtggtgggagtggtattgggtaccctgttcggctggctcggatcctacatggtgtttagtttgtacggcgacaccgtgttcccgttcgaatgggccaccaacggtgtggtgctcggcgtcgccgcgctcgccgctctgctggccagcgtggcacccgcccgccgggccgtcaaaacgccaccagttgaagccttggccgaagcgtagagcaataagctccctcatcagagggagcttatttgttacaccagcccgttatcgtacgcgaagactacagcctgtacgcggtcacgggcgttgattttggcgaggatatgcgccacgtgggttttgacggtgggaagggagataaagagcttgtccgcgatctcctgattgctcagaccatgggcgatctccaccagcacctcgcgttcacggtcggtaagcagatccagttcgggatcggtgtatgctgggcgtgacgtattggaaccgtcggaagcggccccggcaggggaggggatgccggtcatcgagccggcaccgttgccggccgcaccgccagagacgccgacggcggaaccgtacacggcaccggagcgcgcgacatcgccggtcagcgaaccatgctgcgcgtaaccgtcctgcatcatcttttcgatgagtcgcttggtggcggaaggcgcgataatcgcattgccttggaatacagtacgaatcgaattgagcaacgtttccggttcggtgtccttgagcaggaagcccgaggcgccggcattgatggctgccatcacatactcgtccaaatcgaacgtcgtcagaatgattacgcgcgtcggccggtcgtcagccgattcggccgagacggtcgcgtcggcggccgggctggccgaatcggccgcgttgtccggcgcggcggagagtgaggtaatacggctcgtggcctcaatgccatccatgccgggcatgcgcacatccatcagcaccacgtcgggatgcagggattccgccaacgccacggcttgggcgccgtcggacgcctgcccgaccacctccatatccggttgcgaaccaatgaccatggcaaaaccggcacgtaccagctcctggtcgtccgcaataatcacgcgaatgcttctgctctcgttcatgctctccactgtatccgtttcctatcggagcgccgctccataaacaccctgattgttccctgagttcttattgggcaagtctctcaccggggtaacgttcccgcgtgttgcatctgactatccaacgaagccgccggtcgcaactgcatatccggctgcacaccctcatgggcctcgtcgctgaacccggtttcacgcaacactctcaacagctgacgcatatgagccaatgcggcgcgcccccgagcaccaatcgcggcaaaagccgcttcaatctgcatactatcaggcgcaggttcggcgttgagcatcaccagtccctcgtcagcctgcgcaatcaccgattccagcgtggtcagtacttcggtttgcatcgccgcactaatacggttgcgctccaagttggccgccagcaccttttgccgctcctgctcggctcgcagcgcctcctcgcgtcgcaacagcaccagagcgtttgcgccacgcgaacggctccatcgagccatcgcaatgcaggcaaaaccgaccaacatgattcccgcgcccggcagcaagccggacaaaaccagcctccattttgagagcatggaactaccatcgggcaaaaacagatggaacagctgactgtatccattccacccagccatcaccttgatgcccgcaagccacgaatcggctgccagcgccacgctcacccagcgccaagcggactctcgtccatacaataccgccgaatacacggataccatcgcaaacatattgatggtcaaaatcgatggcaagaacaacagttgcacagcagacagcaccgccatcgccagcgcgctgccctctgggaagcggcgacggaacgccaaaggcgagagcataataatcgtcagcgttatagtcggcacgcggttcggcgaatacggggcattgccgatcatttgcaaatcgccatacgtggcggaatcaaatagcgcaatcagcacgatagtggcgataacgtccatcagaagatagtgacgctcggtccactgcgcaaatcgacccacccagttcgactcatgcgtatctccttggtcgagtactttggggcgcgcccgatccatcaatcctcgtatacgcgagataacggttagcaccggatcctccgtatcggtgccagactgtggggcggcaggggagagcggaatcgtagccgccacaataaagccaccattcggccctgggccggcctgcacgctgccacccaacgactcaatgcgttcgtgcataccaaccaatccgtatccgggcttatgaccgtctgctgcagacgtcgcgccacggccgttatcggatacggtaatcgacagcacatcgtttgaccagatttcatcgatggtggctttagcaccctcgcccgcatgtttgcgcgtattggtcagcgcttcctgcacaagacggaacacggcggtttccgcgtcggcggacagccggtcaggttgcgctttgccggtcatatgccgggacaccaccagatgaccgtcaaacagcgaatcgatgtcggcatatccggtactgccactcgcaccgaacacattgaacagacgctgcatatcatgctgcgcgcgttccgcttcatggcgaatcgtacccatcgtgtgcttggcgatggccagatcatgcgcacccgcataccggccgccatccgactgcacaataatcgtggagagcgtatgtgccaccacatcatgcatatcacgggcgatgcgtgcgcgttcggccagcgccgcgatgcgcgtctcctcggcctctttcgccacaatggaagcgttgcgctcgcgcatggccgccagcgtggcgttgcgcgctcgctgccacaaggccatgatgatgacgctcagcacgctcgattcgatgaacgccgcctccatgccgaagtcagcgagcatcttggccccgcagttgacggcgccgcttgcccccacgacgccggtgaccgccgggcatgtgggcatcgtgatggcatcggacagccagccgtcgcggatgacgcgcgaaccggaggaaggtccgtcgaacagcggacccacgttgaaagacaccgaccagaccatcgccgcgaccagtcccatgacgaacgccgtgacgatgaaccgccaggaatgtcggggattgccgtacagaatcaccgaatacaccatgatcagggcgtagaaatcgaaatacatgatcgccgggccgaacacaagatgcgtgatggtcagcgccacgaacagccaggccgccggctccgggcaatacctgcgcagcatcagcggcacgaagaccggcagcgaccacagcgtcatcgacgcctgagttgcgggaaacaatatgccgcccgtcgaatcagggctggtgacgccgatgaacggcacgcagccggcgatcagcgctgcggcgagcaacgtgtcccatagcagtgtgcgggtcgactcccgtgcgcaccatgccctcacgcgcgccataatctccataacgcgcaaggctagcgtgtccggcgacgaaccggtatcactcttcaggaggatttatggactagagtcttgaaccatgacaatgctgagcaaatactacgtgcccggactggccatagaggaccattccatcgatgttccgctcgactggaccggccatgagccaggccaagcgttcgacggcgaaaccatcaaactgttctatcgcgtggtcaccgcgcccgaacacgtgcatgacgacctgcccctgctgattttcctgcaaggcggtcccggcggtgccggcccgcgcctcaacagcccgacctccgacggatggatcgaggaggccatcaggcacttccgggtgatcctgcccgaccagcgcggcaccggccgctcctcgcgcgtggacacgcacgccatggcccgcatcgccgccgcgcacgacgatgatgccgcggccggcgcacgagcccaagccgactacctgaagaagttccttgccgattccatcgtgcgtgacttcgaacatctgcgcctgaccgaattcggtggccgcaagtgggtgacgatgggccaaagctacggcggcttcctgaccctgaccacactgtccctgttcccggccggcgtaatcgccagcttcaccaccggcggcatcccgcacgtgccggccgacgccgctgaagtgtacgagcataccttcccgcgcatggtgcgcaagacgactcagttctacgagcgctacccacaggacaaggagcgcgtggccgccatcgccgacaagctgccgactactgcggaagtcgccgaattcgttggcaaactcaccgattccgtactgaatccgatggctggtaccgatgtggagcatcgacttggcgtgatcgccggcatggccgcccacggcttcccgctgatgccgaacggcgacccgctcaccgtcgaacgcttccagtgcttgggatccgactttggcatgaagccgagcttcgagcgtgtccattggattcttgacgacgccttccttgatggcgatggttccgcttctgccgactcgccgttgtctgacgaatttttgaccaaagtgatgaacgccacgtcgtcgcgcccactgtactggccgctgcaggaattcatctacgccaacggcgagcttgacgagcccattcgttgggccgcccagcgcgtgcgcgatggcaagcccgaattcggtgctgatgaacgcccgctcaacttcactggcgaggccatgttcccgtggatgttcgaacaggaggccgcattgcgcccgttcaagccggccatggacctgctcatggaagacacgcacttcggcgtgatctatgacgaaggtcagctggcccgcaatgaggtgccgctgcaggccgccgtctacttcgacgacatgtacgtcgattccggcctgcagctcgacaccttgagccgcgtgggcaacagccactactggaccaccaacgaattcgagcatgacggtctgcacggctcgctcgtcttcaagcatctctatgacgaagccctcaaccggggcgacctcgaagaactgttctgactcaaggaagcaagctccctctgatgagggagctctgtatacatgcacgaaaggaaaacgtatgactcagaacctcaccatcggttttatcggatatggcaacatggcccaggccatcgcccaaggcttcgttgacgcgggcgtggtcgccggcggccagatggtcgcctgcgccgcccactacgacaagcttgagaagaccaccgccgaacttggcgtgcgtccgttgcacaatgcgctggaagtggtgacggccgccgacgtggtcatcatcgccatcaagccctaccagatcgccgccgtcgtcaagccgctggccgacgaacttgccaggccgggcaagatcgtcgtctccatcgccgccggctggaatctcaagaagtaccaggacctgttcgccaccgaagacggcgaatccgtcgactccccggacatccatatccagtgcaccattccgaacactccgatggccgtgggcaagggcgtgctcgtcaccgaatccgtcaacacactgacctacgacgaaaccgaaaccttcgagcagctattcggccccatcagcctcatcgagcgcgtggacaccccgcatatgaacatcgccatggtggtggccggctgcgcgcccgccttcactgacatgtacatcgaggccttgggcgacgccggcgtgcagtacggtctgcagcgagccaccgcctaccggctcgccgccaagatggtcgaaggtgtcggcgcgctctacatggccaccgaaacccatcccggtgccatgaaggacgccgtgtgctcgcccggcggcaccaccatcaagggcgtcgcccagctcgaaaaggacggtttccgcggctcggtcatcgacgccgtagacgccatcgtcggctgactgccaatcagagtttgcgtatattcgcatatcacagtcaaagccttcgaaccgtatgctcggaggcttttgcatatggccggttcaccacatgcaggttcaaggtgtccagcttctccctagacttggaatcatgtctcttactatcggaatcgtcggactgcccaacgtcggcaagtccaccatgttcaacgcactgacccgcaacaacgtgctggctgaaaactacccgttcgccaccatcgaaccgaacactggcatcgtaccgttgccggacaagcgtctgccggtactggccaagctggtccacaccgaaaaggtcgtgcccgccacggtgaccttcgtggacatcgccggcatcgtcaagggcgcctccgagggcgaaggcctgggcaacaagttcctggccaacatccgcgaggcggacgcgatttgcgaggttgtgcgcgccttcgaggacgacgacatcgtccacgtcaacggcaaggtggatccggccgacgacatcgacaccatcaacaccgagctgatcctcgccgacctgcagaccatcgaaaacgcgctgcccaagctggagaaggatctgaggggcaagaagatcgagccggcctacatggacgctgtcaagcaggcaaagaccatccttgaagccggcgagacgctcgacaaggccgcacgcgaaggccgcttcgacaaggattccgtctacgacctgcatctgatgaccgccaagccgttcatctacgtgttcaacgtggacgacaacgagctggccaacaaggacctgcaggcaaagctcgccgcatccgtggccccggctccggccgtgttcctcaacgctcagttcgaggcggacttgaccgagctcgacgaggcggatgcccgcgaaatgctcgaggacgcgggcttaagcgaatccggccttgaccagttggcccgcgtcggcttcgacatcctcggcttgcagaccttcctgaccgcaggcgtcaaggaagtgcgcgcttggcagatccacaagggctggaccgccccgcaggccgccggcgtgattcacaccgacttcgaaaagggcttcatcaaggctgacatcgtctcctacgacg

SEQ ID NO: 787 - DNA, 5309 bp, Unknown
  R14_18m  MAG No. k141_3309
ccggctttgcggacttcgatggtttcgatgcggcggccatccaccttggtgacgaccatgttgtagccgtcgtcggaatgcagcacgtcgcccaccgcacccatcttgccggtcttggacaggaagtagccggcgaccgtctcgtacgggccgtcctccaattcgatgccggtcagatcggcgaagtcctcaatggtcatgctggcctcgatcgtggccacaccattgacgaacgcggtgcgggtggtgcgttcgccgcccttctcgctgggcagatcgtactcatcgcgaatatcgcccacaagctcctcggtcatatcctcaagcgtcacgatgccgtccgtgcctccgtactcgtcgatgaccacggccagatggatgccgcgcttacgcagcagttccaggctcggcagcagcttggaggtgccgggcagggagatgccttcgcgcaccacatcgcgcacgatcttggcgttcggatcgcgcacgtccagtagatcgcgcacatgcacgaagccgatcacgtcgtcgaaatccttgccggtcaccgggtaacgggagtacggctggtcgcgtacgaacgcggcggcctcggccaagggctggtcgccctcgatgaagaccacgtcggcacgcgggcgcatcacctcggcgacgatggtttcggacgcgtcgaacacatcgtccagaatcgtgcgttcgtccttggaaaggttggtgttggagctgaccagcacgcgcagctcgtcgtcggacacctcggactcggtctgctgcgggtcgaagccgagcaggcggacgatgccgttcgtgttcttgccgatgagccagatgatcgggcggcagacggcggcgaaggcgtcgatggcgggcaccacggcgcgcgcgatctgctcggtgcgctgcatggcgatgcgcttgggcaccatctcggagatcacgatggagcagtaggagatgatgagggtcaggatgatgttcaccaggccgccggcgatgccggggtgcacgccccagctttcgaccaccggaatcaggtagggggcgatggaggaggcaccgaacgaggcggacaggaagccggagagcgtcacgccgatttgcacggtggagaggaaggtgttcgggtcacgtgcgattttggcgactttggcaccgcgagcgtcctcctgctccatttgctcgatctgcgagccgcgcagagagaccaatgccaactcggtgccggagaacacggaaccgataacgagaaatacaaaaatcaggaggatgttcaaaccaagtgacatggcttcaactctaggggagcggcacgtcaaattggggtgtgctggctgggcagtaagaaactcggcaaggggaagggcattctcatcactatcgatgagacgcaagcggcctcgcatgatgatttggttgccattgctacagccgtgcagcacgtcattacggatgccgatgaaagtgatacgcctgatgaggataagaagggcgttgccatcgtgtttgctggcttgccgtatatggtcaacgatttgctggataacgaggtaaccacattcctgcgccgtgcgctacgccgcgaattggataacgtgccgcttccagacgtcaagaatgcgttcctgaaaacagttgcggattccggcaagaccatcagtggggaagatgcgcttgaagccgctcgccagtctgaaggatacccgtacatggtgcagcttgttggctactacatgtggcaatccgcacaacgtcgaggttcaaatgtcattaccgcggacgacgtgtcgaccggtgtttccgatgcgctgctcgccttcgacgattcaaggacaaactcatccgcccggcaggtcatgggcagctggaatttgcggtgccgcatttggggcagtatttgcagtcgttgtagcaccaaatatagggctgggttcattcatttggtaggttgcgcgttcatttggtgggttgtcggcatggtgaggcgttggaatggcggcatttcaatggtcagtgttggagtgcagtgaccaaatgaacgcataattgacctaatgaatgaagtaagccggttgcgggctagtttcgatccagttctatgagcgccgacgcatcttggccacggcattgctgacgcaaatacgcagcacaatggtgaagacgactaccataatccccagaatgccaatgttgaaccagaactgatccgtggtgtgctcccacagatcatcctttttgaacatcggcaccttggtggggccatacagcagatcgttgagcccgatatccgaggcggcggcggagaagccccaacgtccggggaagatcatgctgaccagctcgaggctgtcgcggccggtgaccggaatcatgccgccggagaacaccaactgggccatgaccagcaccaccagcaatggcatcgtctgttctcccgacttcaccaacgccgagccgacttcgcccaacaatgcggaagtccacgcagtcagccaaatcgccaacaccagttcgggtatgccggaatcagtgaccacaccatggtccgggccgggcttgccgaggctgaccgcagtggtcagaatcgccgcctgcaacaaggtctgcaaacccatcacgatgagtttcgaggcggtgtatgacgtgggcgacaaacccaccgcgcgctcgcggccgtaaatcgctcgctcggagacgatgtctcgcacggacaaagccgatcccataaaacaggcacccagtatgacgagcacaagcagctggttcggctcggtggcggcgtctttgaaatcgggctcacccaagccatgagaaccgggcacaaccagcgacagcagtcctaggagcaatggcagcaacagcaggaagatcagcaatccggggtcggcgatgatcaaatgcagctgacgaatcaccagagtgatggtctgtttgatgcggaatggctttgccggtttctcatgctcggtgtgccgcgtgatggtggactcggcctgcatggtgcgctggcgtgaatcagtaatcgaatacacccgttccggagattcggcgacatcgttgaagatgtcggcccattccttgccgttgaacgcctggctcatctcctgcacggtgccgaagaatgccggatggccgccgggagcgagcatgagcacgttatcgcacaacttgttgatatacgacagtgaatgggtgactacgataaccacgcggccggcatccgccagttggcgcaacatggtcatcaccgtaagatccagcgccgggtcgaggcccgaggtcggttcgtcgagaatcagcagttcgggttcggtgagtagctcgatagcggtggacacgcgcttgcgttggccgccggacagtctgtcaatgcgattcttacggcgagacgtgagttccagctcattgagcacgttgtcgatgatttcggcgcgctcggccttggttgagccgggcaggcgcagcttggcggcgtattcgagcgccgcgtccacagagagcttgcggtgcaccacgtcgtcctgcggcacgaatccgatacggctgcgcaacagttcgatgttctgatgcacgtcgtatccatcaaacagcacgcgcccgtccgtggggctgttgagcccggcgacgatggaggtgaatgttgatttgccggcgccggaaggtccgattacggcggtgagcgtgcccttggcgaatacggcgttgatgccgtcaagcagccgggtgcctttgcccacggtcagtccgatgttttcggcgataaccgcgtcgttgctgacaaacggcgtgcggtcgcacagcacgccttcatgcacgatcaggtcggtgttgccgacggtgacgacgtcgtcttcccgcagccagatcttcgcgacgcggcggccgttgacgtaagtgccgttggcggagttcaggtcagtgagcaggatgccgctgctggtggtttccagcgagcagtgtttgcgggagaccagataatcgttgatgcgaatcaggcaggcggtatcgcggccgatgacgcctgtggtgtcgtgctcggggctgaaggacccgtgcacgcggttggtggtgagttgggattcgagccttaccgcttgcgtgctgcctgccagaacggtgccggcggcattcgatggggaaggggatgcgcagggagacggagatggtgatgcgggtgataccggcactggcgatactgccgtcggtgccactgctgttgggcggggttgctgttgcaggtgcgcgagggccggggatacgcggtgcggggccagcggggctggcgttggttgcggttgtaccggttgtgccggttgcggtgctggtggtgtgggttgcactactgggcgtgcctgttgcggcgcgagttgcgtgggttgtgccggttgcgctgatggtgccggcggtagcgcaggctgggccacgtttgccgcagggcgtcgcgggggctgtgccggcgtggacggcccgctggttccgacgatgcagacgatggtggcaccttgtgccagcgtcactttggtgctgttcagcagcagtacggaagtggtgtgaatgccgttgatggacagtccgtttgcactacccgtgtcttccaagagccaaccatcgtcggtaaaggtgacgcgagcatgatggtgagatacgtacgggttgtgaatcaccagatcgcaatccggcgcacgcccgatggtcgtggcacgtgcaggattgggggtataggtggcggatccgtagtgaatagtaagggcaggtggcattggttcagacttccgtgttcttcgatctctctgcacacagatgtaccacgaccgcattacccccggtgaacggggtctgactgatggtcagaaactcagcacctcgaccttgccggtgtcgagctggtaacgggcgccgacgatcatcagctggtcggcagccaatgcctgctgaatgatgggggattgttccaccagcgtctcgatggtgtgggccacgtgtacgcgctcgatgtcttcatgcgcgtcgagctcggcttcgcgcgcctgccagacggacatgccggcctggcgcagaataatcgattcggcggcggcgatgtgctcgtcgaggtcgtccatcgcatccgcggcctccagtgagccgtcggcttcggaagtgatggtgtgcatcaggtcgtccagctcctgctcggcggcctcgattgcgccgcagtgctcgtgaccgagcacacagatcaggctgacgtgcagtttcttgaccgcgtactccagcgaggcgataaccgcgctatcgatgagttgcccggcggtgcgcacggtgaacag

SEQ ID NO: 788 - DNA, 9058 bp, Unknown
  R14_18m  MAG No. k141_3547
cagtcgttcctcgacaagcagggcgcggcgtgcagcggttcccggtgcctgaaaaccatgaccttcgacaccgaggaccaggcggcgaacgagtattgcgcggcgtacgagggcgcgagaaaggagaccgcggccgcgatcatcgacaagtcggcgcgcgcgtgcggcatcagccagaaggtgctgctcaccgtgatgcagaaggagcagcacctggtcacggccgtcgatccgacggacttccagtacaaggccgccatggggctgagctgcccggacgacgcgaactgcgatccggcctatgccggcttcttcagacaggtgtacggggcggcgcaccgctaccaatactacgtggcgcatgaaagcgcctacggctatcacgccaacgcgctgaactacatccagtaccacccggatgccgggtgcggcggcaccaacgtgtacatcgagaacaaggcgaccgcgctgctctacatctacacgccctaccagccgaacgacgcctcgctggcggccgggttcggcgagggcgactcatgctccagctacggcaaccgcaacttcgccctcatatacaccaactggttcggtgccgcgcgccgataggggcgggaacggcaaaaaaccgaaaccacggtaaggctaggtgtcatccgcgccgtcgccgccccgtcatccggccggagaaccggccggatgacgggcggcacggctcacaggtcgatcttcggggaggcgtcgagcagggtacgcgtgtactcggccttgggatggttgagcacgcggccggtctccccgctctccacgacgcgcccgtggcgcagcaccgtgatcacatcggacatctcctgcacgatgcccaggtcatgggtgatgaacaggcatgcgaaaccgtgctcgcgctgcagccggcgcagcaggtcgagcaccttgcgctgcacggtcacgtccagcgacgacgtcggctcgtcggcgatgagcagcgacgggttgagcgccaaggcgcgcgcgatgccgacgcgctggcgctggccgcccgacagctggtgcgggaaccggccggccacatcggcgggcagctccacctgatcaagcaattcaaggacgcgcttgcgccggtccgtctcgctgagcccgccctgcacgagcatcggctcaccgatgctccatgccacggacttgcgcgggttgagcgccgatccgctgtcctggaacacatagcccatatgcttcaggatctcgcgcttgcgcctgccatgcgccttggcgagatcctccccctcgatgagcaccgtgcccgaggtaggcgcgagctggccggagatcaccttggcgatcgtggtcttgccggctcccgattcgcccaccagcgcgcgggtcctgccggccaccagatcgaacgagatgtccttgacggcgaagctgccggccttgtacgacatggccacgtcgttcacctgcgtgatgcgcctgccgccgccgggcgcgtcactttccgtgatgcgttcgccgccggccgcatgttcgccgtctgccgcatgctcgtcgatgcgcaggcgcggcacggcgtcgagcagcatccgcgtgtagtcgtcggacgggtggcggaagacctgcgcgacgctcccctgctcgacgatcacgccgttgtgcatcacgtacacgtcctgcgcggcctgccacaccacgcccatgtcgtgggtgatgagcagcacggccagatcgaggtcgaccgccagcgaggagatcagggcgagaatcgccttctgcgtggtcacgtcgagcgcggtggtcggctcgtcggcgatgagtaccttgggtcggttgatgatcgccatggcgatcatcacgcgctgcagctggccgcccgacagctcatgcgggtacgacgaccacacgcgttcggcgtcgtcgagcccgacctcgcgcagctgttcgagcaccttggccttgcgctcggcggcgctgagctgcttctggtggtatttgagcgattccgcgacctgtacgccgagcgtgaacaccggattgaacgcggtggacggttcctggaacaccgtgccgatgtattcgccgcggatgcgttgcagcggcgcgtcggcggccagcagatcgatgccgcggccggcggcgtccttgccgtcgccgcccggaccggagtccggcccgtcatccacaagggcgtcgtcgaggtacgcgtggcccttcacgctggccaccgacggatcgagacggggcagcgccatcgccgtcaccgacttgccggagccggattcgccgaccagagcggtgatgcgccccgggaacagcctgaggctgacgccgtgggtcacctcccgctcgtcgaagctgacggccagaccgtccacggtcacgatcgcgcgtggttcactcattggaagctccttggatgcacaagcgttggaatgcgtccggcgcgcgcgccagcggaccatgccgccggcgcgcgccggatgcggatgccggctcagttcgcgctggcgagcgagacctgcgtgtagtccgggtacgccgggaagttgccgatgacgaagttggtcacgttcgatccgtggatgaacgtgttcttcgaatagatcagcggcacgaccggcgcgtcggccatgatcgtcttgtcggcctcggcccagatcttgccggcctcggtccgatcgatggtctcggtggccttcttgatcagctcgtcgaccttcgagttcgcgtaacgggccaggttgtagttgccgtggccgatctgcgaggagtcgaacagcggggagatgttggcgtagggcgacgggaagtcgggctgccacgagctgatggccagatcgtagtcgcccttgtcgttggtcagcgtatcggaatacacatcgtcgttgagtgtctggatgtccaccttgacgccggcccgcttgaggctcgtctggatcgaggaggcggtttcggcctgagcggaggtggcgatgagcttgagggtcggggcctgctcgcccgactccttgatcagctgcttggccttgtccacgtcgccggtcggatcggccttgtacaggtcgtagtcctcgcggccctcgatgccgggcgtaatgagcgtggtggcgaagttgccggcgatctcgccgccggaagccgtctggtaggccttcttgtcgaccgcgtactgcagcgcttggcgaatcttcgcgttcttcacgtgttgggtgttgatggcgaggtattccagcgcgccgtcgccgctggtggtcagcagcttcttgtagttcgggttggcctgcgcctgcgcgagctgcgcggccggcacgaatccggacaggaacgagttcttgccttcaccggtgccctgcatgatcgactgggcggccaccgaggtgtcctgtcccatcttgaacacgatcttgtcggggcccgcggtgcgcaccggatcggtcttcttgtcccagtaggtgttgcgcacgaagacggcctgcttgccggcctcgttcgactcgaccttgtacgggccggaggccaccggcagcttgccgtagccggacgccgggcccttgccgtcgggcacgggggtgaacgcggcgagcgagacgacccacggccagtcgccgaacggcgcgttgaggtggaagatgatggtcttgtcgttcggcgtctcgatggagctgagctcctggccgtcgaacgggccgtggtagtcctgcgcgccctcgagcagcgtcttgtggtagctcaggccgccggtcagcgagtcggcgaaggaacgctccagcccgtacttgacgtccttggaggtgatgggcgtgccgtcggagaacttgagcccgttcttgagcgtgtacgtccacgtcttgccgtcgtcgctcgacttgccggtgtcggtggccagatcgggcacgaccttcgtctcgcccttgtcggtgatcttccacgcggtcaggcggcggaagatgttgccgttcgtggtggtcggcagaccctggctcttggccgggtccagatccatctccgtgctggacagcagcacgttcagcgtgccgcccttgacggtggtgccgctcgccgagccggtggcggcgttgtcgttggacgcgccgcagccggacagcgccagtaccgcggcacaagcccccgccgcgaatacgcgccatgcgttgttcttcatgatggttttcctctctatcggtgccggtccgtggagcagaccggcaagtatcgcgtgttgcggccgcagccgcactacttcgtgccgagcgcgaccctggggtcgagcaggctgtagcagatgtccacgatcaggttggcgacgatgaccagcacggcggcgaacatcgtcgcgccgaccagcacctgcaggtcgaggttcgacacggaatcgagcagcagcgagccgagcccctgcatcgagaacaccttctcggtgagcaccgcgccgccgagcagcccgcccagatcgaggccgaacatggtcatcacgggcagcagcgcgttgcgcagcgcgtgcttgaagatgatcaccgattcgggcacgcccttggagcgggcggtgcggatgtagtcctggctcagctcgccaatcatctgcgtgcgggtgaccctggtgtagccggcggcgctgagcacggccagcaccagccacggcagcagcagatgcgtgaaccagccgacagggtcgtcgtggaagttcacgtacccgccgctggggaatatctgcagcaccagcgaaaaggcgatcaccgtcagcaggccgatcaggtatgatggtgccgaaacgcccacgatcgacagcccgagcagcgtgcggtcgatcagcgtatcgcgcttgagggccgcccacacgccggtcgccacgccgatgaccagccacagcacggccgcgccgaccgcgatcgacgcggtgatcgggaagcggtcgaggatcagctggctcaccgattcgttgagacggaacgaatacccgaggcatggtgccgagcagaccacggcaccgccgccgctgccgaaggtgcgcccgacgaagatgcccgccacgtaattgcccatctgctcgtaccacggcttatcggtgcccatgaaggcggagacccgctgcagctgctcgggcgtgcacggcttgccgcacgacagctgcgccggattggtcggcagcaggaagaagatcaggaacagcgccagcgtgatgagcaggatgacgacgatcgagctcgccacgcgcttgccgatgtattgcaggattctcatgcacgcacccccttgcgcgggtcgatggcgtcgctcaggccatcgccaagcaggttgaagccgaaggtcagcaggaacagggcggcgcccgggaagatcagatacatcgggtcgaccagggcccactgcacggcgtcggagatggaccggccccatgagggcgtcggcgggttcatgccgacgccgaggaacgacaggcccgcctcggcgccgatgcgcccgggaatcgacagcgtgatgttgacgatgagcagcggcatgaggttcggcaggatctgatgccacagcacatgggcaggcgaggcgcccatcaccttggacgcgacggcgaaattgcgcttgctcagcgtcagcgtctgcccccggacaagacgcgcgatgccgggccatccgaagaatccgagcactagcgtcagcagcaccggcctcgggaagccctgcggcaccaccgccgacagcgcgatcgcgaagatcaggaacgggaagccgaagaagacgtccatcgtgcgcgagatcagcgcatcgaccaacccggggaaatagccggccagcagcccgagcgccacgccgatgaccaacgagatgaccgacgagacgacgccgatgcccagcgagatccgtgagccgtacgccacgatggagaacaggtcgacgccgcgcagcggggtgacgccgaaccagtgccgggcactgatgccgccgccgaatccggccggcaccgacccggcacccaaggcctcgggatgctcggcgtacgggtcgttgccggtgatggccgacaacggcccggccagcggcgccagcagcacgaagaacagcacgatggcgccgccgaccactatcgatgagcgagcgccggaacggagaacgcgccgccgtctttccgccttcggcgcggctttcgccgtcgcatccgtcatattgtcatccccattttcacgctgaacataccgataatcatcaatccgcgcaggtgggcgcccgtgagccgggtccccctgcagccggtgtcctaacattaaggtttcgcagcaggatgacatgctgtggccttatcggttatttggatagcaggttatcaatggacggcaatcggcggataaggcatgccgcggggacatgcgggaaaaacccttcgttcccgcgcgtcacgccacccgtcattccccgaccgggctgacgtacggacgcagcagggtcgtggtgccggctgccagcaacgcaaaaatcgcgccgaccgggccgagccaggtcaggccaaggaggtcgttgaccaggccgccgaccgcggagccgatggcgatgccgatgttgaacgacatggaattcagggaggcggccagattcaccgaaccgggatgggattggtaggccacatccatatacagcacctgggaagcggaattctgcaggtacatgagcatgccaagcgccaccagcagcagtgcgccgccggccggcaccagcgaggcgaaagccagcaggcacaggcagacggcctgcacgcagtagatcggtcgaatgtgggtcagcggctcgacccccctgccccgatcggccagcttgcctccgtacaggttgctccacaggcaggcacagccgtagaccaccaagccgacgctgatatagcgttcgggcacaccgatttcgtcgcgcatgatcggcgagagatacgtgtagaagacgtaggaggcggctgcgccaaagaccacatccgccacgccgagctggatgcggcggtcgaagaacagacggaattgcctcaggaaaccgatcttcgccggatgcgagttgcgtggcagagacaccgccatcgatgccatcagcacggcggtgagcaccgaaaccaaggcaaaggtgacacgccagccgaaagtattggccacccaagtgccggccggtacgccgaccacagaggcgatggagaaacccgagaatacccaagcaatgaacttggtgcggtatttgtcggtggtcacgtcgggcgcgaaggtcatggagatggccaccagcgtgccggacaccgaggcgatgagcagtcgggcgatgagcagcaccggatagttcggcgcgaagacgcacaggatattgccgacgaggaacacgcccatcaacgtcagataggtgagaaagcgcgggaatcgggcggataatgcggatccgagcggcgtgcagggcgcgtacacgaatgcgaagatggccaccagattacccacggtcacttcggagaccttaagtccggatgcgatgtccggcaggatgcccactaccacgaattcgctcatgcccagcatgaagctggcgaagatcaggatggtgaccggcagattgaagaagcggtcggtgcgcgcggtgttcgcaggtgtgttcgtcatgggtgctctcttgagtgctctcgctcgtactacaagctgattcgtcggttacgtcaatcgtttttcgtatcaactcagcgacaacactattcccacctctgcccgctacccaccaccacgacacgctatagaaaaccccgccgatgaccaatcatcgacggggttcggcacatgtgcaacgcttgcgattacagcttcggcagatacttcttcagctcgtaaggcgtgacctgctggttgtactcctcccattcctggtgcttgttgtccaggaagtagccgaaggcgtgttcgccgagcacgtcggccacgaagtcggatttctccatgatcttcagcgcctcgtccagcgagcgcggcagcggctgaatgcccatagcctgacgttcgccgtcggtgagctcccacacgtcatcactggtgggttcgcccagctgcatctgcttatcgatgccatcgagaccggcggccagcagcaccgagtaggcaaggtatgggttggccaccgggtcgagcgcacggaactccatgcgcgcggagttgcccttgcccggcttgtactgcgggatgcgcagcagcgcggaacggttgttgtggccccagcagatgtagcttggtgcctcattgccgccccacaggcgcttgtacgagttgacgtactggtcggtgaccgcgcagatttcggccgcatggtacaggatgccggcggcgaactggcgggcggtcagggacatgttgaactcctgaccggcctcgtagaaggcgttggaatcgccttcgaacaggctcaggtgcgtgtgcatgccggaaccaggcgcgtcggccaggggcttgggcatgaagctggcgtgaatgccacgctccaaggaaatctccttgaccaccgtacggaatgtcatgatgttgtcggccatggtgagcgcgtccgcgtatcgcagatcgatctcgttctggcctggccccgcctcatggtgcgagtattccaccgagatgcccatttgctcgagcatgttcacggtggcgcggcggaagtccatgcctgggctgcgcggcacatggtcgaagtagccgccctcgtcgatcggggtcggggccttggaccagtcgtcctggctttcgaacaggtagaactcgatttccggatgcacgtagaacgtgaagcccttgtccttggccttggcgagcgtacgcttcaacacgtgacgtggatcgccgagcgaaggctcgccgtctggggtcagaatgtcgcagaacatgcgggcggtaccttgcgggccaccgcgccacggcaggatctggaacgtcgcgggatcgggttgaacgatcatgtcgtcttcggacacgcgggtcatgccctcgatggcggaaccgtcgaagccgagaccctcctcaaacgcggcttccagttcggccggagcaatcgccacggacttcagtgttcccaacac

SEQ ID NO: 789 - DNA, 5032 bp, Unknown
  R14_18m  MAG No. k141_3654
actatccgaccgcaaccatggacatatccaccagcattgcccaatctcaaaccttgcgttaacgcaaatttacatatcacagtccgggcatgcggtaaactgtcggagtatttatcgaccggcgggggcgtactataccctttctggccggtctaggaaataaggagcaaccgtatgggtaagtatcttctgcgacgcattctgcagatgattcccgtggttctcggtacgactcttctggtatatgcccttgtattcgccctgccgggcgaccccgtcaaggccatgttcggagacaagcctgtcaatgaggccgtcgcagcccagatccgcgcagaataccatctcgaccagccgttcatcgttcagtacttcatctacctgaagaatgcactgaccctgaacttcggcgataccttcgccggccagcccgttctcgacgaaatcacccgcgccttcccggtcaccatcaggctcggcttgatggcgttcgtgttcgaggcgatcttcggcgtggtcttcggcattatctcgggcctcaagaagggcaagtggtacgacaccgtcatcctgatcgtctccctgctgcttatttccgtgccgaccttcgtcaccggcttcgtcatgcaatatgtctttggtattcagtgggcgatattgccggtgacggcaggcgccgaccccggcttccttgatctgctcatgccggccatggtgctcggttcggtgtcgatggcctatatcatccgactgacccgctccgaaatctcctccaacatcgccgaggattacgtgcgcaccgcacgtgccaaaggtatgtcgaacggccaggtcatgctgcgccacgtactgcgcaactccctgattccagtcgtcacttacctcggccaggacatcggcgccctgatgggtggtgccatgatcaccgagcagatcttcaacatccacggcatcggcttcctcacctaccagtccattctgaagggcgaggcaaacctggtggtgtccatcgtcacgttgctcatgctgattttcgtagtgtgcaacctcgtcgtcgacatgctgtacgcggccctcgatccgcgtatccgttacgcgtgatagggaggagtgagtcacatggcaaacgaaaccactgaaaacgagctcaaccagaccggcgagccaggaaccgaatacttcatggaaaccctgcccggtcaggaccgttacgtagctcctctcgacgagaccccgttgcaggacgtcgattccgtcgacgaatccgcaccggccaccagcatgtgggccgacgcatggcgaaccctgcgccgcaacccgctgttcatcatttccggcttgctgatcctgttcatcatcgtggtggccatcgcccccggtctgttcaccaagcaggatccgaacgcctgcgatctgggcaactccttgagccccgcctccaccggacaccccttcggctacgacctgcagggctgtgacgtgtacacccgcgtggtctacggcacccgtacctcactgtccgtcggcgtgctctccacgctactggtcgtgatcgtcggtaccctgatcggtgccgtcgccggcttcttcggcggttgggtcgacgcggtgctgagccgtatcaccgacatcttcttcgcgctgcctatgctgcttggcgccatcgtggtgctccagatgttcaagacctccaagtccatctggaagatcgtgctggtgctgacgctcttcggctgggtcggcgtatgccgtatcgcccgaagcgccgtgctggaatcgaagaacctcgaattcaacaccgcttccacggccctcggctccacgcctgccagaaacctgttccgtcacatcctgccgaactccctggccccgatcatcgtcatcgccaccacctcgctggcctcctacatcgtggccgaagccacgctgagcttcctcggcgtcggcctgcccaccaccacggtgagctggggcggcgacatctccagcgcgcagaccaacctgcagaccgatccgatggtgctgttctacccgtccgccgcactggccatcaccgtgctcgcgttcatcatgatgggcgacgccgtcaaggacgccctcgatccgaagagccgtacggcctgagcgaggggagtggagaatcattatgactgacaataccaacgccaagatgctggctatgcagaaagagcatggtccgctgctcgaggtcaaggatctggccatcgacttcaccactgacaccggcaagccggtgcatgcggtgcgcgatgccaacttcaccgtctaccccggccagtgggtggccatcgtgggcgaatccggctccggcaagtccacctccgccatggctgtgctgggcctgctgcccggcaccggtcacgtggtcaacggctccatcaagctcgacggcgaggaaatcgccggcgccaagcagagcgagttcgacaagctgcgcggcaccaagatgggtctcgtgcctcaggacccgatgagcaacctcaacccggtgtggcgcatcggcacccaggtcaaggaagcactgaaggccaacaacatggacgtggcccacgagaagcgctccgccctcgccaaggccctggccggcgacgaggtcgaagtcaagggtaacgacgacgagaccttcctcggcgccaaggaactgcccgagctcatgaccgaggccaagaaggctttgaccgaagccggcgtgtccggcgaggccttcgacaaggccgtcgcccgcttcaccaacgaatgggttccgggctccgaaacccgttggcgcgtggccgacgacctcatcaaggccggcgtggccgacgatcaggcctggtacctcgccaagaagtacgtcatcggctccacaatggatgaccgcatcgcgggtctgctgtccgaggccggtctgcccgacgccgctacccgtgcccgtcagttcccgcacgagttctccggtggtatgcgccagcgtgcgctcatcgccatcggtctggcctgccgccctgacctgctgatcgccgacgagccgacctccgccctcgacgtgaccgtgcagaagaagatcctcgaccatctgcacatgcttaccgactcactgggcaccgccgtgctgttcatcacccacgatctgggtcttgccgccgagcgcgcccagcacattgtcgtgatgtacaagggtcaggtcgtcgaatccggtccgtccctcgaggtgctgcagcacccgcagcacccgtacaccaagcgactcgtggccgccgccccgtcgctggcctcccagcgcatcatctccgccaaggagcgcggtgagaacgcggacgccctgcttgaccaccacatcgccggcgaaagcacgcttgagaaaagcgagcacatcatcaccgtcgaccacctgaccaaggaattcaagctgccccgcaagaaggagatgttcaaggccgtcgacgacgtgtccttctccgtcaagcgcggcaccaccctggccatcgtgggcgaatccggttccggcaagtccaccgtggcgaacatggtgcttcacctgctgaagcccacttccggcaaagtgttctacgaaggacgcgacacctccacgttcaaggccaaggatctgctcggtttccgccgccatgtgcagccggtgttccagaacccgtacggttcgctcgacccgatgtactccatcttccgttccatcgaggagccgctgcgcatccacaagattggcgataagaagtcgcgtgccaatcgtgtcaaggaactgctggacatggtcgagatgccggcttccgtgatgggtcgttacccgaacgagctttccggcggccagcgtcagcgcatcgccatcgcacgagccatggctctggatccggacgtcatcgtgtgcgatgaggccgtctccgccttggacgtgctggtgcaggatcaggtgctgcgtctgctcaacgacctgcaggccgagaagggcctgagctatctgttcatcacccacgatctggccgtggttcgccagatcgccgacgaggtcgtggtgatgcagcacggcaagctcgtggagcacgccaccaccgacgaggtcttcgaccacccgcagaagcagtacacccgagacctgctcgacgccatccccggcggcaagctccaactcggtctggactgataatctgcgtttgagcgcattgtattgggttctttccatccgtggaaagaacccaatattcgtatgtgcaggtttgcattatggttcgcgtgggacgaaaggcaaaaatcggtgttttcccgatgttgtcccacaatttgtgggacaacatcaacatcaatcgatggacatgagtgttgtcccacagcagatttctcacgaagcccggaattacgccattcttagtgtggttgataattactcatgctgtggggcgtgggacgacccgcgaaaatcgtcgattttcggatgttgtcccacggaatatgtcatacctcgtatgtgatcgtgagtggggcgtgatcggaccagcgtttgtcatacgtgggagccttgtcgatgacgaatccgcgtgcggtctccgccagctcgggcgtggcgaactggtagtcgattctccagccgacattgttgtcgaaggcgcgccctcgttggctccaccatgtgtacggcccctgaatatcaccggccaacgaacgcatcacatccacgaactcgtattcgtccagccatttgtccacgtaggcacgttcttcgggcagaaatccggcgtgcttctcattggccttggcgttcttgatatcaagcggcgtgtgcgcgatgttgaaatcgccgcagagcacggcctgtttgccgccatgcgcagcctcgtcccgcaacgcgcccatgcgcttcagcatcgtgtccagaaaacggtacttctgttccattttggtcggatcatcggtgttgccggcatgtatgtacacggatgccacggtgatcgtatagccctcaggcgttttgacatcggtttcgatccaacgccccgaatccacatcctcgctcagacctggc

SEQ ID NO: 790 - DNA, 19226 bp, Unknown
  R14_18m  MAG No. k141_3739
ggattcgacaacgcccacggcactggggagacatgcgtgaccaccatgcagcgcattctcggcgagcatgcattcgacggcaagaacgtcaccgtcatcggctacggcccggtcggccaaggcttcgcacggcgtattcgcgcgcttggagccgaagtcaccatctgcgatatcgatccagtggcttcactcaaagcggtgttcgacggcttcgccgcacaagacattgacgaggcactcccttgcgcggatatggtggtgtccgccactggcgtgagacatacggtcacacttgagcacatgcgcgcaatgcacgagggcgcggcgctcgcagtgatcggcggcatcgccaacgaaatcgccttggacgaggtaagcgacttcaccccacaggtcaacagggacaccgcgcaactcaatgttcccgacggaccaacgctcacgctaatcgccgacggcgatggcgtgaactacacggtgggaggcggcaatccaatcgagatcatggatctgagcttcgccgtacaggccagcgccgtcgcatatcttctggaacatcgaggcacactggatcacacgcttatcagacttgacgcagcgaccgaccagcgcatcgccgccagcgcgctcaaggcgcgcggataccgagccagccatgccgtggaggacaacggctacgattggcgactgaccagattcgcggaaaacgaccgagagaacgccgaccgatagccataggcacggcaccgaacacaacgcagcgaggagaatatgaccgacaacacctggccgaccgtcgataccgagcttatcgatgaggtgacactgtattccgccaaactcatcatccccgtgacgggccccgtcatcatcgatggcgcagtcgccatacatggcgaccgcgtggttcatgtaggtaaacgccgctgggtgctggaggcgctgaagcaggaaatgacgtctcacggcaccatccgtgaacggcattgggatggggtgctcacccccggattggtcaacgcgcacactcatctgcagtacagcggcatggtgcaggtcgggcaaggcacctacgatcggttccgcgcctgggaactggcattcaacgaggtgtacgccgaggcgcagaagacccagccatggaagcagtgggccgaggacggtgctcgccagatggtcgaatcgggcacgacggccgccgcagacatcgtcaccgatctggacgccgccggcgcgctggcttcgcagggcatgcacggcatcgcttattgggaggtaatgggctggcacaacgacgaatggatggaaaagggccgcaccgagctcatccggcagttgcgccggatgaacgaggagcagctgccgaacctcggcatcagcccgcatgctccgtatacgctggagtccgaaccgttcgttgatcttccagacattgctcgtcagctgaacatgcgactgcatatccatctggcggagaccccgctcgaggccggcacttatccgccggtgctcaccacttattcggcgtccgactggcgtgaccacgattgggaaagctaccggcagctcaaggacgtgggcaaaggtgcctccgccatccagttcgtcgatcagcttggctcgcttggcccggatgtgcacattgcacacggcgtgtgggccaatggcgaggatcggcgtattctacgtcagcgcggcgtgggcgtggccttgtgcccccgatcgaatcgcattaccaacaccggcaaagatgcaccggtgcgcgaatacctcgaggaaggcaatctggtaagcgtgggcaccgattcgctctccagcacgccgaccctcgatctgcttgatgacgtgtcgatgctttacgacctggcccgcgaacaaggctatgccagcgacgatctgacacatcgcctgattcgtatgatgacgctgggcggtgccgcctccatgggcatgcacgtgggccgcaaccgcattggacagatcaacgcgggcgcattggctgatttcgcgttcttcgacatccccgtcgacacatcatctccggccggcatcgaagaaacgctggaaacactggtgaagcacggcgcaggcacgaaccgagccacggtgatatccgggcgcgaagcctacaacaacgcctggtgacaccgctgacccgacctgatatcaagaagccaaaaaccagcaaacccgccaagaacaggagatctcattatgagcgtcgctttgcgagacatgagtccatacgcccggtccatagtggaacgccttggactggaagcccaccccgaaggcggctggtacacgcgtgactggcaatccccgcacacggatgaggcctcaagccgaccgctatcgtcactgatttacttcctgctgcccgagggagatgccagcgcctggcataaggtcgatgcggatgaggtctggctgtggcatggcccggcatcggtcaagctggaactcggcggcagcggcgagactccggaatccgacgaatccaagcgaaccgtaatcaccctgggttccggcatcaccaccgatcaggccgacgtaaccgtatcgggacatgcggtcgtaccggctggcgtctggcagcgcacagtgcctggccagggcgatgcgctggtctcctgtgtggtcagtccgggattcgtattcgacggcttcacactcgaacagtgaacgccatttcgctctgcgccaatatgagatattcgttcgcttacgcgccagattgcgcggctctagccggccataagcaatggagataaccagcatccgagaatatcgctgttttgtagtaacccaatagccatacaattggcgcgcatgcatcaagcacgactttgaaccgtgtgcatgacgaacacttgaggagaggaagcccatgttcaataagcaacacatcgtccgtaccattgcgtccaccgccagcatcctggctctgtcgttcaccgcagcctgcggttccggccagtccaccgcatccaattccgccgattcgaacgacatcacccagcagacgtacaagccgggcaagctgaccatcgccaccggacagccggcctacgagccgtgggttatgaacgacaagccggaaagcggtgagggctacgaggcggccgtcgcctacgcagtggccgacaagctcggtttcaagaagagcgacgtggtgtggacccgcaccgcattcgacaccgccatcgctcccggcgccaaggactgggatctcaacatccagcagttcggcatcaccgacgagcgcaagaaggccgttgacttctcgtccagctactacaacgacagccagtccgtcgtggtcaagaaagacagcaagttcgccaacgccaccaaggtatccgatctgaagaatgcgaccgtgggcgtcatggtcggcacccttgcctacgactacgccaaggcgaacatcaaggacgacatccagacgttcaatgatgatgccgcactggctcaggcacttgacgccggtcagatcgacgcactggtcaccagcaccgtggaatgcgtgtacatggtgcagtccgagcaggtcaaggacgccaaggtgctcggccgtctgcctgactccgaagacaagagcggcatgggcatcgtgctgccgaaggattccaagctgactgcagccgtgaccaaggcagtggatgacctgaacgccgacggcaccatcaagaagcttcaggacaagtggctggccgagtacaccaccgacctgaccgaactgaagaagtaagtggagtaggctcacatcataaggtcacaacaccttggccgggcgttgcggaaattttcctgtgacacccggccattccggcattcaggaagcgagcgacattcatcacatgaccgcagcaccaaccgaaaccaggcagcacaatgcccctgacggacacgaggtaagtcaggtcgagctcaaacgacgccaatatcgtgttcatcagcaaattcaatcgacgattaccagtctgatcagcaccattgtgttcattgtggtcatcgtcatcggcctgaagctctcccccggctggccacgagtcaaggagaccttcttctccggcgaatacttcgtcaaatcgtttccccatgtgcttgacggcctatggctcaacatccgcgttctgctcgtcgcagtggtcggcgtggcgattctaagcacgctgatcgcattggtgcgcaccagccgctcccctattctgttcccgctgcgtatcctggcattgatctacacgactgtgatgcgcggcgtgcctattatcgtcgtgctgtatctaatcggtttcggcattcccggcctaggcttgttcggccgtatcgatccctcggtactcggcaccattgcagtggtaatgggatacagcgcctacgtctccgaggtgctgcgtgccggttttaacgacgtacatccttctcagcgagcctcggcccgctcgttgggcctgacctccggccagacgacccgactgatcgtcattcctcaggcattgcgcaaagtcgcgcccgcactgatgaatgacttcatctccatgcaaaaggacgtcggcctgatttccgtgctgggtgcggtggatgccgtgcgcgccgcacagatcgacgtggccagcacctacaacttcacgccgtatgtggtcgccagcctgctgttcatcctgatgagcgtgccgttcatcctgctgaacgactggtacacggaacgtctgcgtaagcgcgaactcagcggaggaacggtatgagcgaaatgaccaatatcaccaccgaggcgagtgactcccccgtgagcaacaagacggtgctgcgtcttgatgacgtgcgcaaatcctttggaaacacgcaggtgctgcgtggcatttcctttgacattcaccaacatgaggtggtggctttgctggggccttccggttcgggcaaatccacattgatgaaatgcgtcaacctgcttgagcaggtcgatgacggccagatttggctgggcaataccgatatcaccgacccgcgtgccgatcaggacaagattcgcgcacgtatcggcgtggtgttccagcagttcaacctcttcccccacatgtcggtgctcaagaacgtgacccttgccgcaatcaaggttcaccactggagcaaggatcgcgccgaaacccgcgctatggaactgcttgaacgcatcggcatgcgcgataaagccagcgcctaccctgatcagctctctggcggccagcagcagcgcgtggcgattgcgcgcgcactgatgaccgacccggaactgctgctgcttgacgagatcacatccgctcttgatccgatgctggtcggcgaagtgctcaacatggttgccgagttaaaggcccaaggcaccacaatcctcatggccacgcacgaaatgagcttcgcccacgacgcggccgaccgcatcgtactgctccgtcacggcgtcatcgccgagaacggcacacccgccgaggtgatggacgagtcgcaggatcccgagaccatcgagttcttcagccatttcaggcactgagacgaagccgaaaaacaaacaccggattcatacgacgaaaggccaaaatcctaagccactattcatactcaactgatctggtgcttaaaccgcgtccgcgaaccccaacaagttccaccaccccacaacacgcgatgtagccgccgattggtagggttggcagatagttaatcccctgtttgaaaaaggagctttggcttgtcggctgaactcgaagacattcatgaggaatgtggcatcttcggcgtatggggccaccccgacgcctcacgactcacctattttggcctgcacgcgctgcagcatcgcggtcaggaaggtgccggcatcgtctccaacgataacggtcatctcatcggtcatcgcggactcggcctgctcacccaggtgttcggcgatgagcgcgaaatcgaacgactgaagggcaattgcgccatcggccacgtgcgttacgcaacggccggctcgggcaccacggacaacatccagccgttcatcttccgcttccatgacggcgacgtggctctgtgccataacggcaacctgacgaactgcccgtcactgcgccgcaagcttgaagacgaaggcgccatcttccattcgaactccgacaccgaagtgctgatgcacttgattcgccgttcgatgcagcgcacctttatggacaagctcaaggaagcgctcaacacggtgcatggcggtttcgcctacctgctgatgaccgaagacgccatgatcggcgcactcgacccgaacggcttccgcccgctctccctcggcaagatgaagaacggcgcctacgtgctcgcctccgaaacctgcgcactggatgtcgtcggcgccgagctggtgcgcaacattcgcccgggcgaaatcgtggtggtcaacgatcacggctacaagatcgtgcagtacaccaacaacacgcagctggccatctgctcgatggaatacatctacttcgcacgcccggattccgatatctatggcgtcaacgtgcactccgcccgcaagcgcatgggcgcacgtctcgccgccgaatccccggtggaggccgatatggttatcggcgtgccgaactcctcattgtccgccgcatccggctatgcggaagcagcaggcctgcccaacgaaatgggcctaatcaaaaaccagtatgtggcccgcaccttcattcagcccacgcaggaactgcgcgagcagggtgtgcgtatgaagctctctgctgtgcgcagcgtggttaaaggcaagcgcgttatcgttatcgatgattccatcgtgcgcggcaccacgtccaagcgcatcgtgcagctgctcaaggaagccggcgccgctgaagtgcatatgcgcatcagctccccgccgctgaagtacccttgcttctatggcattgatatctccaccaccaaggaactcatcgcagccaagatgagcgtggaggaaatccgcgaatacatcggcgcggattccttggcctacctttcgctcgacggtctggtcgaatccatcggactgaacgccgacgccccatacggtggcctgtgcgtcgcctacttcaacggcgactaccccactgcgctcgacgactacgaggccgacttcctgaagtccctcacgcccgaggaccgtgtgcgtctgcctgaattcgcgctgtacaagagcaagtacatcggcaacgagtacaacaccgtgcagccggacgtgcagtaggttcggccggtccttcgactacacctcagtcattggtctttacgactacccctcagtcagcttcgctgacagctcccctgacaaggggagcttagtacaaacgaaaatccactttttgcaggtggctccccggcaagggagcttgaaaatagaacagaaaggccccaccaaatgccaaaagcatatgagaacgccggcgtgagcgtcgaagccgggtacgaagtcgtcaagcgcatcaagtcgcacgtggcccgcacgaaccgtcccggcgtggtcggcggcatcggtggcttcggcggcctgttcgacctagcctccctgggctacaaggagccggtcctcatctccggcaccgacggcgtaggcaccaagctcatggtcgccaagctggccaacaagcacgacaccatcggcatcgactgcgtggccatgtgcgtcaacgacatcgccgcccagggtgccgagccgctgttcttccttgactacatcgcttgcggcaagaacgacccggccctgcttgagcaggtcgtggccggtgtggccgacggctgcgtgcaggccggttccgcactggtcggcggtgagaccgctgaaatgccgggcatgtacgacgaggacgagtacgatctggccggtttctcggtcggcgttgccgaaaagtccgccattgtggacggttccaccatcactgagggcgacgtgcttatcggtctgccttccaccggcgtgcactccaacggcttctccctggtgcgcaaggccctgttcgagcaggctggctataccgtggacactgagctcgccgagctgggcggcgcaaagctcggcgacgtgctgctcacccccaccaagatctacgtcaaggccctctccccgctgttcaaggcgggcgtggtcaagggcgtggcccacatcaccggtggtggcttcatcgagaacatcccgcgcatgattccggacggtctggccgccgaaatcgaacttggcacctggcctgtgctcccgatcttcgacgtgcttgagaaggccggcaatatcgatcacaaggagatgtacaacatcttcaacatgggcatcggcatggtgctggccatcgaccccgcccgcaaggacgaggcgctgaagctgctcgccgacaacaacgaacccgcctacgtgctcggccagatcaccaccgacaccaccgacacgcaaatcgtactgaagtagctccagataccggctcccctcaaagaggggagccaaagactttaggaaggaaaaacatgggtcagaaagtattggtcatcggctccggtgcgcgtgagcataccattgcctacacgctactcaaatcgccgagcgtcgacgaagtcaccgtggcgcccggcaacccgggcatgctcaaggatggcatccgcaccacacagctgagccagtcgaatcatgccgcgctcatcgaattcgtgaaggacaacggctacgactgggtgttcgtgggcccggaagtcccgctcatcgaaggcatcgtggacgatttcgccgccgccggcatcaaggcgttcggcccgtccaaggccgccgcccagatcgagggttccaaggacttcgccaagcagctcatggaccgtcacaacattccgaccgccaaatatcagacgttcggagacttggacatggctcaggcttacgtacacgagcatggcgcgccgatcgtcatcaaggccgatggtctggccgccggcaagggcgtgaccgtggccatggacgagcacaccgcccagcgtgcgcttgaagacatcttcatcgatcatcgcttcggctccgccggtgccaaggtcgttatcgaggacttccttgacggccaggaattctccctgatgagcttcgtcaacggcactgatttctggccgatgccgatctcccaggatcacaagcgcgcccacgatggcgacgaaggcccgaacaccggtggcatgggtgcctacagcccggtgccgcagattccgcagtccgtggtcgacgaggccatcgagaaaatcgtgcgccccaccgtcgaaggcatggccgaggaaggcacaccgttcaccggcatcctgtacgccggcctgatcgccaccgccgacggaccgaaggtcatcgaattcaacgctcgtttcggcgacccggaaaccgaagtcgtgctcccgaagctcacctccgacctcggtgccggcatctccgccattctcgacggcgaaacccccgaattcatctgggatgagtccaatgccaccctcggcgtggtcatcgcctccaacggctacccggagaacgtcatcaagggtgcccgtgtgcccgagatcgaggtcgacgaggattcgcatgtctactatgccggcgtcgcctccgacgacaagggtggtctgattgccaactccggccgtgtcctgctcgtcgaaacctccgccccggacatcaagtccgctcaggacaaggtctacgcgatcatcgacaagctcgagctgcgcggactgttctaccgccacgacatcggcttcaaagccctgaagtaacagaagcggcgcatctgccgcatatttttggcccggtggccatgtcaatcgattgacgtggccaccgggccagatttttctgtcccggtagccgatttcggctctttttcgcaaaccaggacagttgaacacctcgaatataggaatatttggaattcccttccatgcaaaaccgcactattccgccattttcgtaatacgcggacgatactttcggcgtcagttttgtcccggtaagcagaaaatgactcgaaatcaaataccaggacagaaaaatctggcccggtatacgaatcaatcgattgacgtggctgccgggacagcgaacgtcactatgacaacgccatcacccaatatcagcgagcgatatcacgctagctgaatttggcgatgatgttgaacagtttggccttggcttcattgaagggcgggtacacgaggcgcagagtgtcggggaactgcggcttggtaaccacggttttgacgtggctgaaggtgaggaagcctgctttgccgtggtaggcgtcgatgccggacgcgcccacgccaccgaacggcagtcggctggacagcaggtgacccaacggcaacgaatatcccaaagctccggagctggtctgacgttcgaaagtcagccgaacctcgtgatcgcgcgagaacacatatgcagccaacggccgggaccgcttgttgatgaatcggattgcggactcggcatcctcaaccaccaggatcggcagaatcgggccgaagatctcctccttcattaccggcgcatccggtgacgtgccgtatagcacggtaggcgcgatatatcgggcggcgcgatcgaccttgcctccgcaaacgattcgcccggccggatcgaatacgccgggcaccttgtgaatctcgctcggctcaacagcggccgaggcagtcgcatcactatcagcggctgccgtattcgaaccggccgccggcttcgccgcattgttcgcgctaccggtgccaccaccggctgtctcccccgcgcttccgcgtccggcagccacgacattgaagcgccgcccgaccatatccatggccgcgcctaccgccgatgccacctgtaccagcggcgagctcggctcctcagacggcacggtgccgaccggcaatagcttgcacagtcgttcaaaatgacgatcgttgataatacgaccaaaatcaggcgaggccttcggatcttcgccatagaattcggtgatggctacggcgatgcgctcggccagagcctcggccacatccggcgtggcgagcacatagtcgggtgccacgcaggtctgtccggcattggtgaacttgccccatgcgatacgtcgtgcggccacattgatatccaccgtacggtccacgaagcacggtgatttgccgccgagttccaacgtgaccggtgtcaggtgctcggccgccgcacgcatgacgattttgccgacgtgcccgccgccggtgtagaagatatggttgaacggacatttcagcagttcgccggtttccttgggcccgcctccgaccacgcacacggactcggggtcaagatattgcggcacgagttcggcgatgaggcgcgaggtgttgggcgaaagctcggagggcttcaggcagatggcgttgcctgcggcgagcgcgtcggccattggctccagagccaacagcaccgggtaattccatggcgagatgatgagtaccacgcccttgggctcggcgatcgtccagccggcggcgggttgcagcatccaatgcatcgccttgggatggcgcgcggcccacagtccgagccggttgcggacgaactgcgcctcgccggccaccagattcagctccatcagtatggtttccgccgcgggtttgcccaaatcggccatggccgcagccacgaaagcatcacgattgtccgctaccagacggcatagcgcatccaattgcgcccgccgccaagccaatggccgcgtacacccggattcgtaggcgtgacgcaactgagcgaaatccgcattgaccatggcacatccttcccgcaggatgcccgggtcggtttccgggcatcgactgtacctatcgtaccgtcatgacgatggcatgagggcgtttgtgctgcaggcaataccagacgtttcggctggtattcgccaaatagcttgggctcggccgaagtaggtggtgcaggtattgtcggcgagttcatcgacggtgatgggattggcgctggccacgccgagcagttcggcattggcaggcaggtcgtgttgtgcggccacagagtccacttgtacctccacatccacagcttcggcagaaggtccgacggcgatatgcccgcctgcatcaaccacaatgcggcggtcatcggtgacatgcacgatggcgtcgcggccctcatagcccgcccatgaccagctggccacgccgtcatgtcctcgttcgatgaatcgcgaggtacggcccgcgagggtcgcgcgactcgtgaatcatcgcatcgtgcgggagcgtgactggctgccgcgctgccgtatcgcggtccttgccaattgaacggaaccgccagccatgattcacatcaatgcgcttcatggctttattgtaaggcgggagtgattggtctgtgggatctctccctcagtctcacttcgttcgacagctccctcatcagaggaagctcacagcactatggcaacggtacagcaattttggacgggcttcgcccgcgttttgctggctcgcctgtcggctcgcacgttgcctacagaccgaaaatcctccggattttccgtcgcggcacagccgctcccctcacctacggatagcccactgagctatccgctttacggttcggccgggctgtctgctttacggcaacgtcataaaatctgtgtctttgaggtagtttttgccggcggtgatgtcgtattggatgagcttgtagtcggcaagcaactgcttggtttccttgtcgaagtcatcggtggacatcgggttgccgttttggtcgagatagatgttctggccttcgggaatacgatcccagccttggaccttgttgaccacaggcggttccatagcggcaatcttggaatgcatttcggtcaggaacgccagatacgggctgaccttggcgttcatgtgatcggcggcctgtgccacgaagaagttcggcgaagagtaggctgcatcgcttgccttattgccttgggagctggaagccttattcgaccagatgaagtaatcggtcaggtgcagggccaaggagttgttgccatcctcgctggcggacgagtagatgcccggcaagtgatcgccgtagaacactacggtgacgggcttatccagcgcatccagttcgttcaggaactcctgagtggcctgatcggtaatctccacacccttttgataggtctcaatcgactgctgttcatcatcacccagcggcgtacccgtggtggattcagcggtgtagtcgttgttctcataccactcgtggtagggcatgtggttctgcatggtgatgatctgaatgaacttgttcgtcttgccggacctgatgccttccagcgcagaatcataggaagacttatcagagacgtacggcgactcgtcaatcttgtcctgatacttgatcacgtccggaccggtcagcgtgtagaagtgcgagaacccgaacttcttgtagttcgtagcgcgcgagtacatgctggactcgtacggatggtagccgagcgagttggcgggcgcaccccacatctggttgatggtgggggtccaatgctggctcgggaccagctgctggtacgggctggacagggaggaatcgaaattggccatgctcagaccggaaagtcccatgtattcgaggttggccgtaccgccgccgtagccggaggagagcatcaggccggaggtggtgcccgccttgatcttgcggatgttgggcatcgaatccttattggtcttcagtcccggcacgcggctcgggtcggagaaggattcggacagcacgtacaccactgtcgaatcagtgaggttgttggtgcgggaggcgttgattgtctccgcttccttctggtagcgagcggcgaccttcttcatggtctcctcggagtagttgctcggcttgtccatgatcttcgggttgagctgacgggtaaaggccacgagcggaccgttgcgctgcgcgtcatacacggaatcccacatggatggcgtgtcccccaaggcgcgggagaacttgttggccagcgaatcggtggtgctcacatgaatgcagtacaacgcgaacaccagaatcggcagcagcagcagaatcagacgggaggtgaggttcaggctcaggttgtccgtacggatcatgcgacctttgcgcccgtcgaagtggcgcagcaccagaatcagggcgagcagcgcggcgaacgcgccaagtgccacgaggatggtcacgtgcgcgccggccggaatgaaggtgagcatattgccggtgttcgagccaaggaagccgaggtcggcgggcagaatggcctcgtaacggatctcgaccttgaaatgttcgatggcggccacgatgattccgaccgcaagaatcacgatgcttgccgtccagaatctgttgaacagcatcagcaacatgaggtacagcaacgcgacaagtatcacgttgagtacgaatacgaaattgccgtcggtccacatcttgctcacgaagccgaatccgacggtcggactggacagttgcacacgggtggagctggacgaaacgcccacttcgagcgccgtcacaacaataatgtcgaagataacgaagagcacgccgtacgcccagccggggaagggcttgtgggggtgctggggcgtgacttcattggcttcggcttttttgacccaaagcttgaaatggggtttcactgtggtgatactactagtgttctcgctcattcgcctgtttccgtatgtgacttttcaagggcatattgttgccgctgaaccttggaaaatccatagttccactatttttcttaccgtttcctaactattcaccctaacgcaaagggtgcctcgggacatccccgaagcaccctgatatataaggagccttccctgatagcgaagcgttctgttctcccctaggcaacgcctcgctatctgacttgattattccccttattgctgttgcggattgccggctaccgccgcattacttcacggcggcggcgaactggtcgaccagtgcgctcatccagtcgagcaggttggtgtactgcttcggcatctgctcggtgagctccacgatcggcacgttgacgtccttggcggcaccggtgatctggtcggtggtggagttggcttcctggctgttgaagacgagcatcttgatggagccgcccttcagggtgtcctggaagtccttgatgtcggccggggtcggctcgctctcgttggcggaagcctgggcgtagcccttcggggtggcgtcggtcatcttgaggtcgtcggccaagtgccaggccacggattcggtggcggcgtacggcaggttctcggtcttggcggaagtctccttgatcttggactcaagctggtcttccttggcgtgccattctttgttgagcttggcgtagtcgtccttgtgactcgggtcggccttctggtaggcggcggtgatggcgtcggcagcgttggaacgcaccttggcggagaaccagacgtgcgggttgtcgccttccttgatgccggcggtttcggcggcggtgaccagcgtggccttggtcgactgggcggccttggtggcccacgggtcgtaatcggcgccgttgaccacggccaccttggcagtgccgaacttggcaacatcctggctggtgggctcgtaatcgtgcgcctcaacgttggtcttggtcatgatgttggtgacttcgacgttgctgccgccgaggtcttcggccacggaaccccactggttgatggaggcgacgacctcgatcttgccggaagacgcggcgctgctggaatcggacttgttgccggcggcattgctggaaccgcaggcggccatcgagaacagggtcgccgcggcggccgcgatggcgagcgcgcgcttggcgttggacatgatggacatgattggattttcctctctaattcggctgtttggccgggcgatgctgctgttgctgcatcatcgcccggcccccaacacgacagaataacatgtattgagaattattatcatttgcatttacgtcggtgtgttgcacgcgcacacccgcgctgccggcggaaatcccgcgccccgacgatgacaacgcgggatcccgccgttttcggcagacgaaacggcagtatccccgcgtccgaacgatacccgcgcgggggttctgccatttaaggcctcggaaacgacagaaatcccgcgccaccttcgttcggacgcgggggttctgccgtttgccgcacatgtcacaacggcatcgcggcacagaccgacgcctgcaccaggtcgacgagccccacggtgtgggcatcctcacagaccagcgcatcacgcaaggcgattgcacggatgatgtcgcggcaggcgcactccccgtctgtatccaaatggcgtgccaggcaaccggcaccaatgaccggcaattcgagcacgcacgaggcctcacggatcaggcgggagaccactacgccggtcgaacgctcgtcatagacgccgttctcctcgcccatgccgtacaggcacaaacggtcgtcgtcaaagaatcgctcttcgaattcgtcaaggcctacggcattggccaccgcacccacgaacatcgactcaccccactcgttgagacggaaggaatcggccagatactgcgcgaccggcgtggcctcaaggcccacaggcagcgagaccagaaacgcgccggcccgcccttgcagcgatccgagcgtccgttcaaggtcatgtttgaccgtgcagctcatgcagcacccctcgagcccgaacgaatcggactcgccgaacaccaccccgcttgcctggggcttcgcgacgttgcgcacgatatcgagaccggattccacggcttcgttcgggcgcacgtcataagcaatcgagcatacggacgggaaggaatcgatcaacgagaacgccacggagtccaggctcaggcggtcggcgccggtgagcagcaccacgggcgtgcgcccctccgcgtttccctgtgattgcaatgccggatgaatcatgacagcctttctaatttgataatggttatcattatgatatagttgcaggcatgtccaaaacatgtcaaattctgggaacacgcgccggggtcggcaaccgcgtctcccactcgcacaggaaaacacgccgaaccttcgccccgaacctgcagtccaagcggtactgggtgccgtccttgcagcggcacgtcacgcttaccgtgagcgccaagggcatcaagaccatcgaccgcatcggcatcgaggcggcgatcgcccgcatccgccgcgatcagaacgtcaactgaaccggccacggcatcacccccatgctcgggcagtcagtaggcccgccactgtgccggcgcgtaaccgcgcaacaaaccgcgctaacgagctgcatcacccacatggcaccgcgacgtacgcgacatacgtgacataacagcgtgacacccacacatagaaagcaccactcatggcaagcaaatcctccgcaatccgcccggtcatcaccctgaagtccacggccggcaccggattcacctacaccaccaccaagaatcgtcgtaatacgccggaccgtcttgagctcaccaagttcgatccggtagtccgcaaacgggtgctcttccgagagacccgctaatccatctgttcgttcattggacaccagtcgcgaggcgaggaagaggcttaagcacccgccgaaatcgtttcctcgttggcattccggcggtttcctctatcaccatttcatgaactcatcttccgaaccttgcggcatgcgcccaatgaacgaatgcactcgtcccagctccggccggcgcgattcccgcgccccggagccttatcaaggagccggacatggccaaaaccagtaagatcaaccgacaattgcagcgcgaacgcatggtcgccaagtatgccgaacgccgcgccgaacacaagcgcgacagcgtcaaccctcatctgaccaccgaagaacgcgccgaggcgatgcgcaagctgcaggccctcccccgcgacgccagccccacccgtctgcgcaaccgcgattccatcgacggccgcccgcgcgcctacaaccgcaagttcggcctgtcacgtatcaatctgcgtgagaaggcacacaagggcaaactgcccggcgtggtgaaatccagctggtgatcgggccggcacaaccggccgtcaggccgtctcaggccatctcaattcaccggattccacccgcgcgtccgacgccattctcatccatatcaccacacaacaccacacagccaaaggtccataaccatgcaagagggcatccaccccgaatacggccccgtggtcttctatgaccgctccgccgacaagtacttcctcaccaagtccacactggtggccaaggccgtaaacctgccgaccatcgactgggaggacggcaacacctacccgctcgtcaatgtggaggtgtccagctacagccacccgttctacaccggcaagaatgtggtgatcgacgccgccggtcaggtgcagaagttcaacgctcgttacgggcgcaagtgattcgccgcacattccgcaaagaccgtaagacaagaagaaaggaacggacatgaaggtcaaggcatcggtccgctcattggcccgcaaggatggctcctatgtcgtccgccggcgcggccatctgtatgtaatcaacaagaagaacccccactggaaggcgaggcaaggctgatggcactgcccaagtacaaggcgtcccgagcaaacacgcattcgcgccgagccaactggaaggccaaggtgcctcagctggccacggtcagaacgcctgaaggcgaagtggttcaggttccgcagaatctggccgcagccgtacgaaaggggtatatgaagccataaccaacatcgtggattccgcaatccatcaagtctcgtaacaacaactcgacggtccgctccacaggccggcggcgtacgttctttctcccatttccttccgtatgccgtcacctgccggggcgaaccgccgttttatgaggccaccgcatccgatctggccaagctcgccaaggcagacatcgtggtgctcaacggcgccggctacgacggctgggcggaaaaggcgcagcttgacaagaaacgccagaccatcgtgaacgtgggcggcctcatgggcgtcaccgccaccgacgagcacgagcattcccacgaccacgccgagggcgaagaaggccgcc

SEQ ID NO: 791 - DNA, 9924 bp, Unknown
  R14_18m  MAG No. k141_3805
cacgcttgcgggagtcagatccagggccgctgccagcagcccaacatcatggagatacagtttgaacgcggaatcatcacggtatgacggcaatggtgccgcaggtttttcgacgcgatacacccgcaacgcaagaccagaatcgacaatctgctgaatcgcggattcatattgcgccgcccgagcgccacgagcgatgtggccaaaaataaatttataccgcaatacacacttttcctagggttgcaattcgcgtatcctacatttttcctagggttgcgattgtccaaaattacatttttcctagggttaataatgcagaatactgcacttttcccagggttagtaccctgaccttccctaatcacacggtgttgtaaaggcgtcgcggtattggccgggggtgagtccggtgcggcgcttgaagacgaacataatagaatatctcaagcatcgatgaatacggagatgatcacaatggctgattacatcggaacagtcaacaaccaatcttcaacacagcccaacggtcacaattcacatagcaacaccaccgagtcgctatggcgcggcacggattatggcaaatggttcgtagcggattcatgcacgtcgctgtcatcaagtatccaaggtttcgcaatgccactcatcgcgcagaccgtcacgggctcaccggcacaggcgacgctgctggattcaatcatgaccatgatatcgtcggtattgcggctgccaggtggcgtggtacaagataagtacgaccgcaaaaaacttatgattgcgttcggcctgattggtttcgcactgttcggcatatgcgcggccctaggatgggcgggattactcatatacccggtgctgatggtacttgcgatatgcctcggcatacgctcaggcctcctaggaaccacgagcaacacgatgctacgaggcatcgttcccgatcaattgctgcccaaggcgtcaagcctcaatgatggccgcgatgccgccctcgaactcgccggcgcaccagtaggtggcgtattgatcggcggcggtctatggctgccattcgcagtcagcgcgctgctgaatctattggaaaccgcggcggcgatgcggatcacaaaatactggcatcgtggcgggcggaccaatacggagggccgcgcccttgccgacgatgaggccgatgagaatggcgatgcggccaacatcactcaggccgctgacgagcaggcaacgaccacgacatcatccgcgtcacagtattggcgtgagatgttttccggattccgctggcttcttagcgagcgattcgaacgtcgcctgattttgtcgagcgcgctggcgttcgcgtgcttcaactcgttcctgctgattacggtgctctcgatcggctccgacccatcacatgtggtgtcagccagtttcatgaacgtttctgtgtctgtgggcgtcatcgttggctcgctcatctcttccgtgctggttcagcatgtgcgcggcggcatagtcgccgtatcgttctacgtgctgatgagcatcggcgcgctcggcgcagcgctggctccgtggattcttgcgcgtatggcgtttctggcaatttcgctgctggccctaccggccggcaatgcggtaatcaacggattccaatcattgctcatcaacaaggagcatatgggccgcgtattcgccggcatgggcatgattgagacgattgctgccccggtgatcacatttctgtccggcatcgccatgcaacactggggttactcagtcacgtccgtggctttgggcttgtgcatcgtggcggccgcgatccctgccgtgacaatgagggaactggtcacactgcctaagccggatggctgggaggaccatatccgcaaatccgggctcaccaagttctgacaacaagtaagggcgactatctcccggatttgtgacgctcggcaaccgtcagcgtcacaaatccgggaagaggaaggtggatacggtttcagccgcgcgggcagcaaggtggacaaatcgttgccgggatggaatcgcggcaagtatgcaaaagcctcccattcgcgcgcgacgcataagcgcgcaaatgggaggcttcccaaccgcagcatcatatgcagaaataaggagagtaaggcatatgctgccgcggtcacaccccgccgggaacctgccgcaggccgcgtccggcatcgaaagccttgcagtcgatgcgtgcggccggccgttcccggcgcggtggccatgtcagacgtcagtcagacgtcatcacttctgccagccgatgtcctgcggcaggttgccggcgaagccggacgggccgtagttggccagacccttcttcgcaccgaggtacgaagccgggttggagaccgggatggtgccgtacagcttgagggcttccttctcggcggcgttgacggccttggtctgctcgtcatagtcggagaggctgccagccttcttgacgagctcgtcgatcttcttgctgcccacgtaggagaagttggacgggccgtcggaggtgtacagctgcggggcggacaccacgaaggtcatggcgctcggagcctgccaagccatcggcagcacctggtagttgccggaagacacggtgtcggagaacttggactcggccacgttcacgaccttgaccttgatgccggccttcttcatcatcgcctggtaggcgttggcgagggcctgctgggtggcgttgtcaccgaagaaagtgaaggagatctcaagggtcttgccgcccttggcgtagtagccgtccttgcccatcttgtagccgtcggcctcaagggttttcttggcgttgtccacgttgtacttggcctcggcgggcaggttgttctcgtagcccttctggaacggcagcagcagctcggagcccggctgctcggccttccagttcaggccctggaactgcacgttgttgtaggtgttcacgtcgaaggcctgagtgatggccttacgcacctgcaggtcgtcaagcggcttggacttgctgttgtactccagcacgcgggtcttggtgctgtagccgatgcgcagctgggcgtccttgacggaacggatggccttgatgtcgtccttggtgttggcctccacggcgtcgatctcgccgttctggaaggcgttgagggaggcggtgtcggccatctgcttgtagacgatcttgtccagcttcggcttgttgccccaccacttctcgttcggcacgaaggtgacctgggagtcggagaaggagtcgaccttgtacggaccggcggcccactcgttgtgcgggttcttcacccagccctgggtgaaggtcttcgggtcggcggccttcgggttcaccagagcgccgaagacttcctgccacgggtagtacggggtcttgtaggtcaccttgacctgcttcgggctgtcgccctgctcaacgctggcgatacggtcgaagccgtcggtgctcggcgggttgtagtccgggttggagccgttgttggcttcccacgtggccttgaaggcggtccagtcgatgtcggagccgtcgttccacttggccttcgggttgatgtcgtactgcacgaccatcgggtccttgctcacgagcttcatgtcggtcaggaagtccgggttcaccttaatcggggagccattgacctggtcggtcatgagcaggctgggctggtaccagctccacagctcggacatgtagccggtgttgccgtcggaagacaggtagttccagttcgggccgatttcgacgatggacagggtcagcgtgccgccgtccttgacgttgtcacggctctgatggttgtcgtaacgctcggtgaccttcggcatgggcaggtcgccggtgtacgacgaatcgatgccggccggcggttcggtggcgctcgaggcattgctggaaccgttgccattgcccgcgccgcagccggcaagcagcatggcaagcgccgcagtggccgcggcgagcgcggtcagcttacgtgtcttgttcattgttatttcctcctctatatggttccgaccgtcatgcgaaatggcatgcaacctgatggccgctcggtcgggaagtgtcatacggccgcagcgccgggcgttcgccgcggcagcgggcctgttgttcggcgctcagcttgggcatgagcgggcagcggcccatgaacgggcagccttcgaacgtctcggtggggctgggcacctcgccctgcagcacgatgcgctggcgggtgcgttccgccttcgggtccggcaccggcacggcgctgatgagcgcctgggtgtacgggtgcaacgggtgctcgaacacgtcttcggtgtcgccggattccacgatgcggcccaggtacatcaccgccacgcggctggagatatggcgcaccaccgacaggttatgggccacgaacaggtaggccacgcccagcttgttctgcaggtcctcaagcaggttgatcacgccggcctggatggacacgtccagtgcggagaccggctcgtcgagcagcacgagcttcgggttgaccgacagcgcacgcgcgatggcgatgcgctggcgctgaccgccggagaactgcgtggggaagcggtccacctggtcggggttcagctccaccagacgcatgagttcaccgatgcgttcgcggatctgctctttggagtagtgctggaccttcatcggctcggccaggatgtcgtagatcggcaggcgcgggtcgagcgaactcatcgggtcctggaagacatactgcacggccgaacgcagctcgcggcgcttctcgcgcggaatcttgtgttcgagcttggtgccgaacatctcgatctcgccgtcctgcggctgcttgaactccatgatctccatgagcgtggtggacttgcccgagccggactcgcccacgagcgccacggtctcgccttcgcgcacgtccagcgtcacgtcgtccacggccttgacctcgccgatcttacggcgcaggaatccgccggcggtcagcgggaaggtcttgcgcatgtgcttgacgtcgagcaccatcttgcgttcgtcgcgcgggatgccggcgaacttcgacttggcggcctcggccaccgtgtacacgtcgtggaaggtcaggcccttgtccacgatctcctgggtgcggtggcaggccacgaactggcccgggcggcccggcaccggctccatggccggctcggtggtgtggcatatgtcggtggccagcgggcagcgcggcgcgaacgggcagcccttgggcatgttgaccaggttcatcggggagccaggaatcggcaccaggcggctgttgcgttcgcggtcggaacgcggcacggcacccagcaggcccatggtgtacggcatggccgggtggtcgaagatggagtcgacgtccgccttctcgaccgggcggccggcgtacatgacgacgatgtcgtcggccacgccggcgatcacgcccagatcgtgggtgatgaagatgacggccgcgccggtttcacgctgggccttgcgcagcacttcgagcacctgggcctggatcgtcacgtccagtgcggtggtcggttcgtcggcgatgatcacgtccgggtcgttggcaatggccatggcgatcatcacgcgctggcgcatgccgccggagaactcgtgcgggaaggacttcaggcggtcctccgggtccgggatgccgaccaggttcatgagctcgatggagcggtcgtgaatctgctgttcggtcatcttcggattgtgggtgaccagcgcttccttgatctggtcgccgatggagaacaccggggtcagagcggagagcgggtcctggaagaccatggcgatgcccttgccacggatctcgctcatctcaagatcggacttgctgagcaattcctcgccgtggtaggtgatggagcccttgacgctggcgttcttgtccagcaggcccatgatggccatggaggtcacggacttgccggagccggactcgcccacgatgccgagggtcttgccggggtacaggtcgaagttcatgccgcgcaccgcgtgcacggtgccggcttcggaggcgaagctgacggtgaggtcgcgtactgaaatcaccggttcggatgccatgccttgcgctcctgtggtgttggggttggtgttggttgttacgttgcttgcgttgcgttcgtcgctcatgatgcccgtctcccctctcactcggccttgccgccagaacgggagtacgggtcgatggcgtcacgcagtccgtcgccgatcagctgcacggagaaggtcaggacgaccagcaccacggacgggaagatcagcacccatggcgaggtctgcaccacggactggccggcgttgagcagcgtaccgagcgaggtgtcgggcgccttgatgcccaggcccaggaagctcagcgaggtttcgctgttgaccgcaccgatcacgccgagcacggtgttgatgaccagcaccgaacccaggttcggcaccagatgacgcacgatgatggtgaaggacggcacacccatgaacttcgccgcgcggatgtattcgcgatcgcgcaggctcagggtcagcgtgcgcagcgtacgggcgtagccgatccaaccgaatgcggtcaggccgatggccagccacagccagtcgctgccgccggccgccatgccgacgatcagggcgatgagcaggaaggacggcacgacgagcagcatatccagcagccacatgcccacgcgctcgaaccagccttcgaagaacgccacggccgtgcccaccagggcggcgatgatcgtggtgccgaacgagctgaagataccgatggtcaacgaacggccgaggccgcggatgatcatcgcgtacatatccgagccaccgaccgtggtacccagccagtgctgggcggacggcggcgaggcgagggcggcgaaatcgggctcatcgtagctccactgggagaatttcgagccgaaaatcgccaaaagaatcagcagaatcagcaccaccagacccaccacggccgaggggcggcgcatgaagcggcgcacgtacagctgcatgcggccggtgcggtggaagtcgtcggcgctggaagcctcctgggcgttcctggcgtcggcggactgcggttcgctgccctgcggatcggtgagttccatatcctgggcggcggcgtcggagaccatgttttcgttgtcgttcatcatgttagatcgtcctttgcgcggggctcagctcagtcggatacgcgggtcaagccaggcggagaagatatccgccagcagcgcgccggacagcgtgcacacgccaccgaacgcggccacggccacggcaccgttgatgtcgttgttggcgatggtctgggtgaagtacatgcccaggccgttgatggcgaacacgttttcggtgatcacggcgccggtgaacacgccggcgatggagaaggccacatccacggcggtcggaatcagcgaggtgcgcagtgcgtggcggcgaatggccgcgttgagcgtcaggcccttggcgcgggcggtgcgtacgtagtcggcgttcatggtgtcgagcagatacgtacgctgggtgagatggtagcccaccatgcccggaatcgtcatcacgatggtgggcaggatcaggtgctgcagatagtcaaacacccaaagcaccgggttggagccttggtaggagtgcaggccggtcacgtagaacgcgcggctgcccacgatgttgttgaagttgatggccagcagcaccaccatcaggcccatgacggcggccgggaccaccaggaagaacgttgcggtggtgttgagcacgcggtcctgccacttgtactggcggatggccgtgtacacgccgatgctcacgccgaagaggatggagagcacggtggcgagcgtcaccagctgcagcgaagcggagatacgggaggcgatggccggcgccaccggcgactggtccgggctcaggccccagttccactgggtgaggatgcccttgagccagcggaaatagcggatgacgaccggcgtctggtcgttgatgttggccagatcgagcgaccggttaatcgacgcgatcggcggatgcggattgcgcgacatgtagttcgaacgcggatccatgaatgcgctggccaggaaatacgtcatcgatactgccacgaacagcatgatcacgtagttcacaatgcgcttgatgatgtacttgaacacccaaccacctcccagataactgggaaagtgataccccccccccccgctcaaaaccacaaattgagtccaatatatggaatatgggtattgacttttccgactttttcctgtacagaaaactgcgaaaacacttactgtgtattgggcaaacatccgtttgttaattttgtatttcctgagcctttgctggacatgccttatactttcgtgtcagcagtccgccggcccggatggtgacagtccccgccgccggcaacggattatccatcagcatcatcagcatcagacaggggcatcatgacgacagacgccagcgcacgggccatcaaacccgaacttctgcgtacgtacaccgaggatttcaacaaggaccgcgccaacctgatcgcggcggacgcggcggtttcggccggcgtgctcaaggcggccaccgactatcgcggcgtgcgtgcgctgccgcgcgacttctccatcgaactcaagcagggttcgatcaccaatcaggagcgttccggccgctgctggatgttcgcctccctgaacacgctgcgttacgaactcatgcatcgctggaatcttgaggatttcgagttctccgagacctacctgttcttctgggacgcgatggagaagtcgaacacctacctggagaatgtgctgcgcacgctcgacgagcccaccgactcgcgcctgttcgaggccatcaactggggcccgtccgatgacggcggctggtggcagatgttcgccgcgctggtgaacaagtacggtctggtgcccaagagcgcctacccggagtccgagaactcccgtaattccgatgatttcaagcagtacctcaactccaagctgcgcgagttcgcagccgagctgcgccgccgttcggctgcgggcgctggcgaggacgagctgcgcgcgctgaaggacgagtacatgggcaccgtgtaccgcatctgcgccgtgtcgcttggcgagccgccggagaagttcgacttcttcgcgcgcaccaaggatgatgatgaggataagaagggcgaggcttgcaagtgcaaggccgaggtcgacgcagacggcaagaccgaatcctgcaagtgcggcgactcctgcaaatgcgagggcaaatccgacgccaaggcctgcaagtgcgataagaacaagtccgacaagccgaaaaccggtaaggacgagcgcccgcagattcgcgagatcggcatcaccccgcttgagttctacaagaagtacgtgccggtggacgtcaacgatttcgctacgctggccaacgccccgctcaagaaccgtccgttcaaccggcgctaccgcatccgcttcagcgcgaacgtggccgaggcgggcgatatggagttcgtcaacgtaccgctggacgtgttcaagaaggccgcgcttgaccagctcaccgccggccatccgatctggttcgcctgcgactgcacgcagttcgccctgcgcaaggacggcttcttcgaccagtccgtggtgcgcgtcgaccagctgttcggcaccgagttcaccggcgacaaggcccacggccttgaatacggcgacagcccgagcaaccacgccatgactttcaccggcgtgaacctcggcgaggacggcaagccgaaccgctggaaggtggagaacagctggggcaaggacgccggcaaggacggctactacgtcatgtccgacgcctggttcgaccgctacgtcaccgagctcatcatc

SEQ ID NO: 792 - DNA, 10264 bp, Unknown
  R14_18m  MAG No. k141_4014
cgctgacgggtctctttcataagtgcagggcttcatgattggttcgcaccatggtttgcgaatcactcgcatatcacggtgcatggcattcgcatattattcacgcaaaccatcaatggcgctttggaaatcctccagacctgcaaagttctggtacacactcgcgaatcgaaggtacgccaccacatccaagtcacgcaacggtttcaggatggctttgcccacttcatctgaggtgacttcggcaaggcctcgggagcgaagatcctcttcgactttctgtcccagcaacttcagatcctcttctctgaccggccgcccctggcaggctttacgtacgccggaaatcactttgtctctgctgaatggctccacgccacccgaacgtttagtgaccagcagcatactggtttccaccgtggtaaaacgcttgttgcatttcgggcatacgcgacgccgacggatggaatgaccgtcatcgctaatgcgcgtatcaataactttggtgtcggggttctggcaaaaagggcaatgcatgctctccagaataacgtgtacgggcggaaaaaccatgccgctcgggtttcatttactcaaccggaacaataatgcgctgcccggcctgcaatgttccggactcgagattgttcagcgtaatcagctcatccactgtttccgatacatcatggccagcaggtgtaatagccgaagcatatgaccagagcgtatcccccggccgcacgatatagctggtcacctgcgtggcacccgtatctgattgggcccgctgagcggtaagcgcgccgaaaccacaccaggccagcgccaaggcgatcatcactgcgataatccgcccacgcacattccggcgggacgttccagcatgctgcatagctacacgtgcgctacgggccggggccatcaccattgaaccagtcatcacgaccacctctctcgaacagatgttctatcgaacaactgttcttataatggcacaaatgttcgacacggtcaagtcgaaactcgaacagatgtttgatttcacacgaacaacacgttatgctggtgacataacgaaaggagccctgacgtgagcaccattcccctctcccccaagcagaagccggacgagtccaccctgaccgaccgccagcgcaaagtgttggacgccattcgcacgcatatcgacgaacaaggctttgctccctctttccgggagatcggaaatgccgccgggctcaaaagtccgtcttcggtcaagcatcagctacaagttttggaagacaagggcttcattcgcatgaacgcgaacaagggtcgcgccatcgaggtgatggcaggatccgccccgaatgccgaaaagccatcacaagccagcgaagaggcaaccagcgccagcaatatggcggagatataccaattccccgccgaagccattgccgaatcacatgacgtaccgctcgttggccgtattgccgccggcgtgccgattaccgccgaacagcatgtggatgacgtcatgcgtctgcctgaacggctgaccggctccggcaccctgttcatgctggaagtccacggtgattccatggtggatgccgctatctgcgatggcgactatgtggtggtgcgcgaacagaattccgccgtcaacggagatatcgtcgccgctctgttggatgacgaggccacggtgaagaccttccgcaaggaaaacggccatgtctggctgatgccgcacaaccccgcatactcgcccatcgacggcacacatgccacgattatgggcaaggtggtcaccgtactgcgcaaattatagcctgttcgccaccagctgatcagcgtgcgctgaatcgcgctggtcgtgctatagtcgcacactgcttacgaaaccccggcctcgcgccggggtttcgtcgtattcagaccatatcgcaaatggtattgagaagcggtttcaactcgatagagcgaaggagtacatatggcccatacccatacacccgcaccatccacatccgtaaaccctgccgcgcaccagcgcaggctgattgccacgttgaccgtcactggttcggtcttcctcatcgaagtggtgtcggccgtcttaaccggctcactggccctgctggtggatgccggtcatatgctcaccgacatgtccgtgctggtggcatccacaatcaccgccatactgatgcgccgcaagcccaacaacactcgtacttggggctgggccaggcttgaggtgctcaccgctgccgcgggcgccgtagtattgcttatcgtcggcatctatgcgttggtagaggccggcatgcgtctgttcggcggctccaaagcggaaatcgacgatatcggcttgctgctgttcgtaggcattctgggtcttgtcgcaaatatcatctcgatcttcatccttgcctcgcagcgcgaagacaacatgaacatgaaggccgcgttcctcgaggtaatgaacgacgcacttggctcggtgtctgtggtggcctctgccctggtaatgatctccaccggatggaatggcttcgacgccgtggccggtgccgtcatcgcactgatgatgattccgcgcgccatcaagctgctgcacaacgcggtcaaggtgctgctggaggaaacaccggatggtcttgatctcgataaggtacgcgagcatctggaagacgtgccgcatgtgcttgccgtgcatgacctccatgccagcacggtgtccaccgacatgccgattcttatggcccacgtggtagtcgacaaagacctcaccatggaagatgccgccacaatcctcacccaactgcaggattgcctgcgcgagcacttcccggtctcggtcccccacaccaccttccagcttgagcccgagggctatagctccccctcctccaacgaattccacgaataaaaaatgctccctctggaagcattcagcagggtataaaaaatcgctgtacgtgtgcgatttttcgtgccgcacaaggtgaaggcctacaaaggtagttcgaaccttgtgcggtgtgaaaggcgctccgtacagcgattttttatcagaagccgaactgggcggcggtttccttcagcgtctcggcggagcgcttcagagcggcgagctccttgtcggaaaccggggtgttgatggtgttgttgacgccctgacggttgaggagggtcggcacggacatgcagatgtcggagatgccgtggaagtccttgagcatggagctcacgggcaggatgcggttggtgtcgtgcaggacggcttcgatgatgtcgacgccggacatgccgatggcgtagttggtggcacccttaccgttgatgatcttgtaagcggcgttcttgacttcctggtggatctcctcgcgcttggcggcgtcgagcggatcgtggccgggcagcggggtccagtcgcacatggggacaccaccgatggtggcggactcccacagcgggacttcggagtcgccgtgctcgccggcgatgtaggcgtgcacgttcttgacgttgacgccggtctgctgggcaatcaggaagcgcagacgagcggagtccaggttggtgccggaaccgaagacctggttctcgggcagaccggtgagcttctgagccacgtgggtagcgatgtcgaccgggttggtgatgagcatgtagatggcgttcggagccaccttgaccaagttcggcatgatggccttgaggatgttgacggtagcgccaacgagctcaagacgagactgacccggcttctgacgcggaccagcggtgatgacgaccatgtcggcgtcgcggcagatttcaggatcgtcggaaccgtcgatggacacggtcgggtagaagctggagccgtgctgcatgtcgagcacttcggcttccacgcgctccttggcgatgtcttcaagcacgatctcgcgagcgacgccacgctgggcagcggcgaaggcgagggtggagccaacggcaccggcaccaataacagcaagcttcgtgggcttaacggtagtttccgccatgatggatgaacctctcttcaaaggcggtctgctgatgaatggcaggccttgtaactaacggttttcactctataaacccgctaagacgttttgctaccagcacaccaccctgtctgataacggtatggtaatgtttccaacggttgttagcgctcacaaacaaactgtgatgtttatcacgttagtcaatggactgttcgaccacctgagcggcaagatgggcgtcaacgtccgcttcaagctgtatgccatcatcgcggtactccaccttgtccaccttgccgtattcgcgtacacgagagatcagggagccagcggtatacggcagcagagcgttgacatgcacatgcgggaccggcagcagactttcgaccgcggtacgcagctcgtccaatccctcaccggtataggcggagacgatgaacgcatccggctgcagtgcggcgagtcgttcacgtgtcgcctcgtccgcctgatcggccttgttgaatacgagaatacgcggaatcgaggccgtgccttcgatgtccgccaacacgtcattgaccgcgtcgacctgagagaacgggtcagggtgggagccatcgaccacgtgcaggatcacgtcggcctcggccacctcttccagggtggatttgaacgcctcgatcagctgggtgggcaggcggcgcacgaagccgaccgtgtccacgtaggcgtaagcgcgtccgtcgcgggttttggcgcggcgcacggccgtgtccaatgtggcgaacagcgcgttttccaccagttcggccgaaccggtcagacggttggtcaacgaggatttgccggcgttcgtgtagccgaccacggccactgtgggcaggccgaagcgacggcgtgaaccgcgcttgacctcacgtgccggagccatctcacgaatctgacggcgcagtctggcgatacgcgtgcgaattacacgacggtccatttcgattttggtctcgcccgggcctcgcgatccgatgcccgcatccgcgcctgccgcgcgaccgccggcctgacgggacagcgaaccaccccaaccacgcagtcggggcagcatgtattcgagctgcgccaactccacctgcgccttaccttcacgcgaggtggcgtgctgggcgaagatgtccagaatcaccgcggtgcgatccaccaccttgactttggctgcgtcctccaatgcacggcgctgtgacggcggcaggtcgtcgtccacgataatcgtatcggcttcctcacgcgccacgatgtcggcaatctccttggctttgccggaaccaacgtacgtggctgcatccggcttggagcgatgctgcagcaaaccatcgcataccaccgcaccggcggtttcggcgagcgccgccaactccctcaacgattcctcggccttggcttgcgtggtgacggcggacgaccagacgccgacgagcaccacacgttccagacgcaccttgcggtattcgacttcggtgacgtcctgcagctcgccgagaccggcgacatgcttgagctcgttgcgggcctcgcgctcctcccattcctggttggcgtcctcatgccagccggtcgcgcgctggctgtcgtcgagcagcacttcggactgcccggccagcacaccttcaggggtaacgtcgttgttgccgcggtcgatgtcggtgtactgggtgttgtcggtcaagtgcgcctcgtttggttggaatggttcacgattcttctatggtcctttattatcatcacatgaggtgacatgctggcatagatcggcacgtaccggcataggccggctgatacaggcggcatacgagagcggcgaatcccgcagaaatggagcgaccatggcagaacagtatttctctgcggaacccgcgtcgaaggatgtgcgccgcacattgaacgtaacgttgcgcggccatgaggcgaccgctcaggtgtcgaacggcgtgttctccggctcgcgcgtggacctcggtacgtcggtattgctgaagcatgcgcccgagccgccgcttaccggcgatttcctggatttgggctgcggctggggccctatcgccctgacattggcgtttgagtcgcccgaagcgaacgtgtgggcggtggatgtcaacgagcgcgcgctggacctgacccatgccaacgcacaggcgaacggccgcacgaacattcatgcggctcaggtggacgagtccagcactcccctgcccgccgagaaccagccggcgttctgcgagacggtgccgggcgacctcacgtttgatgcgatttggtcgaatccaccgattcgagtcggcaaggaagcgctgcatacattgcttatggcttggctgccgaagctcaaggtgggcggcgccgcctatctcgtagtgcagaagaatctcggctccgattcgctgatcccctggctggacgatgcgctcggcgaggggttcactgcgagcaaatacgcgagctccaagggcttccgtatcattgaagtccgtcatgaaatatgagtatcctgcagaacttcccgtatctgccgcgcgtgatgagatagccagcgcggtcaaacgttcccaagtcgttattgtgtccggccagaccggttcgggcaaaaccacacagctgccgaaaatcctgcttgagcttggccgtggcacgcacggcaagcagatcgtgcacacccagcctcgccgtatcgccgcgcgcacggtggccgaacgtatcgcctcggagatgggcgtgaagctcggtgacgaggtcggctatcaggtgcgtttcaccgacgaaagctcgcccagcacgcgattgagagtcgtgaccgacggtattctgctcgcccagatccagcgcgatccgaaactcacccaatacgatacgatcatcatcgacgaggcgcatgagcgcagtcttaacatcgactttctgctcggctatctgacggcactgctgcctcagcgccgcgatctgaagctcatcatcacctccgcgaccatcgattcggtcaagttccaggagcatttcgagcacgccttgcatgagaaggtgccggtaatcgaggtttccggccgcaccttccccgtgcaggtggtctatgagccgcttggcaccgcgcccgcgttgatgcgcgaagtgccgggattcgcggtgggcgcccgccccggcgacgccgattacgacgagctggccagcgccatcgcggaatccgattccgaccggccccgcggccggtccggcgactcctatgccgatgacggcatcaccgatatgcccacggccgtggctcgagcctgcgccgaactggtgatccactcctcccatgagcgcggtccccgcgatattctggtcttcgcttccggcgagcgcgacatccacgagttcgaggccgcactgcggcatcattacggtccgcgcgccgacgacatgcgccgaccggacgccatcgagatcatgccgctgttcgcgcgattgtccgccgccgaccagcacaaggtgttcgaatcgcatttgcatcagcgcatcgtcatcgccaccaatgtggctgagacctcgctgaccgtgcccggtatccgctacgtggtggaccccggttccgcccgtatctcccggtattcgaagaccgcaaaggtccagcgtctgccgatcgagccgatcagccaggccagtgccgaccagaggtccggccgatgcggccgcgtggccgacggcatcgcgatccgcctgtattcgcgtgaggattacgagacccgaccgcgcttcaccgagccggaaatcctgcgtacctcgctgggtgccgtggtgcttcacatgctgtcggtgggcgtggcccgcacggccgaggacgtcacgaacttcgggttcatcgatccgccggatatgaaggccgtgtcggacggtttcaatgagctcaccgagctcaaggccatcggccgaaagcgcggcgaggtgacgctcacccataccggccgtcagctggcgcgcatccccatcgacgtgcgtctgggacgtatggttatcgaggccgcgaaaaccggttcgccgaatcttctggcccaggtgctcgtggtcgtggcgttcctgagcttgcaggacccacgtgaacgcccggacgacaagcgtgaggatgccgaccgtatccacaaccgatatgcggatgagacttccgatttcctgacggccctgaacatctgggatcgcgtgttccaagcggacggcgacccgagcaacaacgcgctgcgccgtatctgcaaaaccgagtatctcagctggctgaggatacgccagtggaaagatctcgtctcccagctacgccagatgtgcaaggagctgaagttcaaggtcggcgacccgttgcccgcctcccgcccaggcttggagattcgccagctgccgttgaatcagcaggccgcgcattcgctgtgctgctcgtgggatgcggatggcatccacaagtcgatgctcgccggattgctgtcgatgatgggcatgcaggtggtgcgtgagcccaaggcctccgatttcgcggggctgaccggtgcggcgcgcgcccgtgcgatgaaacgcgcccagaagcagtcgaagaacgattatcagggcgcgcgcggcacccgtttcgccctgttccccgcctccgccgtggccaagaagaccccgtcatgggtgatgagcaccgaactggtggagacctctcgcctgtgggcccgctattcggcggccatcgacccggcgtgggccgaaccgttggccggccaattgacccgcaccacgtatgcggagccgcactggtcgggttcgcgtggctcggctgtggccaccgcgcgcgtgctgctgtatggtctgccgatcgtacaggaccgtgccgtgcagtggggacgcatcaatccgcttgaggcgcgcgacttcctgattcgccagggtctggtcgagggcgatattcagcagcgcttcagttacgacgactttgtgggcaaaaaccgtgacattctcgaggatgccgccgatgacgcgagccgcacccgccagctggcggacaccgtgtccgacgaggatctgttcgacttctacaacgcggtcattcccaacgatgtgaccagcgtggccgatctggcgaaatggtggaagtccgagcatgaccgtcagccgaatctgcttgatttcgacccggccaaggtggagcgtctggcatccagcgattcggtgagtctggacgattaccccgaccattggcatacgaccggatcggacggccaacccatcgacctgcgtttgagctacgtatacgatccggccgacccggccgacggcgtcaccgtgcatgtgccgttgaaggcgctctcgcgtatcacgcccgaccagttcacatggaatgtgccgggcctgttggatgagctgattctgtcgatgatcaaggcgctgcccaagcagctgcgcgtccagttcgtgccggccccggatgccgcgcgtgcgattcgtgactggatcgacgagcattacccggatctgccgggctcgggctcgcagcagaagccgaatctgccgccggtggatgaggatggcacgaccgttggctggcctgatttggcacatgtgttcaccaaggcggccatcgccaccaagggtgcgcagattcatcccgaagtgttggggccggaactggtcgagcgtctttccccgtatctcagggtcacgttctcggtggagcagcaactgccggccggcaagcaccctcgtggacgccggcatgcgcgcggccccgtcaaggtgctgggtgtgtccaaggatctgaaggcgctgcaacgcaagttcgccgcgcaggcggaggcgtcggcccgtcaaatggtcaagaagcaggccgatcaggctggagaacagggcaagctggtcagtcaggcgaacctgttgcataaggcgggtgccaccaccgagtcccgggccacgatgctctggcgtggcgcattggatgcgctgcggttgccggccgaacgcatttcgtcgcgctggctgggtaccgaggcgttgatgctggcttctgctccgtacaagtccaccaaggatctggtcgaagacctgcagctggccacggtcaaacggctgatgccgaatgtcgacaggctctcggacgatgaggcgttggccaatgcggtgctcgatgtgcgcgaagtgtacgaggacaccgtctatcaggtggcgcatgacgtgatcgccgtgctcaaggcttatgccgaagtcgacaaggccactggcggcaaggc

SEQ ID NO: 793 - DNA, 24970 bp, Unknown
  R14_18m  MAG No. k141_4219
cctagaagccgaggcgttctagttgcttggggtcggactgccagcctttggctaccttgacgtggaggtcgagcttggctttttggccgacgatgcggttgaccggggtgcgtagcttcttcttgacgtaggtgaggttcgaggcgcccttgccgatgatgatcggcttctgtgagtcacgctccacgtaaatggacacgttgacctgcgccttgccgtcatagccctgaccggtctcgttgtcttccggatagtcgatggaatcgaccaccacggccagcgaatgcggcaactcgtcgtccagggtctcaaggaacgcaccgcgcacgagttcggcgatggtgtcttccggacgctcctcgctgatctgatcgtccgggtacatctgcgggccctcgggcgtgtgctcaatgagcacgttcttcacttcagccagattgtcgtgcttcagggcgctcaccggcacgatgtccgagaaatcggcgaaatcgttgatttcgatgagcttgttgatgagttgctgacggccaagctcgtcgatcttggtgacgatggcaatcagcgggatgcgccacttgaacgtaccgtcctcacgcttggtggcgaagtcggtacgcagtcgggaaagaatacgcttgtcgccggggccgatttcctggtcggcgggcagcaggaaggccaccacgtccacatcggccaaggattcgtcgaccacgtcgttcagacgctggccaagcaacgtacgcgggcggtggataccgggcgtgtccacgagcacgagctgcgcgtggtcggcggtcaggatgccgcgaatcgccttacgggtggtttccgggcgagaggatgcgatggcgatctgcttgccgatcaacgcgttgatcaacgtggatttgccgacgttcgggcggcccaccacggccacgaatccggagcgatacggcacgtcctgcttggtcacattctccgtttcaccggtcgcgtcgacttcggcaacgccggcaacatcggaagcatcggtgacgtcaatgtcatcgacgtcgttcgtgctgttgttctggtcggtcatatcactccttgctggcggtatcatcgccttcgacgggctcgccgtcagtttcctcatgggtcctgctattttcctcgccgccctcgacgtgcgccggttcgacgacgatggtggacaccttcttgcggcgtccggcggagtccacggcggtcagtcgcagaccgcgcgtcacggccgaagcaccgacaatcggcacgcggcccagaatcttggtcagcaggccgtacacggtatcgacatcgtcctcatcaatgtcgatctcgaagatctcctccagatcggcaatcggcgtacgggcgggcatcttccacttgttgtcgccgattttctccggctcggtacgctgggtgcggtcgtgctcgtcttccagctcgccgacgatctgttcgatggcatcctcgatagtcaccatgccggcgatgccgccatactcatcgaccaccacggccacatgttggcgggaacgctgcatctcatggaacaggtcgtccaccggcttggattcgggaacaagcagcggctgccggacgatggattcgaccgtgcgctccatggccgccgggttgaaggcggtggcgcgcacggcgtccttcaaataggccacgccgatcaggtcatccacatcctcaccgatcaccggcacgcgggagaaaccggagcgggagaacagtttcagcgcggaagacagtgtggagtcgcgctccatgcagatcatatcggtgcgcggcaccatgatctcgcgagtcaacgtatcagacagggtgagcacgttgcgcaacatttcggagacttccggatcgaagtcgttggactccaccagtcggtcgatggcggccttgccctgctcgagctgaatcttctcaagctcctcgtcgtcggacagatcggagtccttggagcggcggcccgaccccttggaaccggacttgtcgccaccgatgcgtgcgaacggcgtgagcttggtggccaacgacacgatgcgcgagttggaaatcatgatgtcgaccggcttggtcatgccggcggtgcgcgggcggaccagtacggagaccacggctacgataatcgcgaacaggaatccggcgagcagttcaacccacagttccgcaccccacagggatgcgatggaagacaccagtacgccgtcgagcacattgcaggcgatgcggaagaacgcacagctgccggcggtggcgtaacggtcggcgatgagccgttgcacgcgatgaatcttgtcgatcttcttcatcttgaggaactggcttgcttcggagtcggtctgcacctcgaggatgagattgttgaggctggctcgcgttacgcgggccacggcgccttcagcggcggccatggtcagcgaaagccagacgaacagggtcgccacaagtacgagaatgacggtgacggcgatcagcgtggtactggaatactccataatgttttttcggtgtccttgaatgtccttgaacggtatagaataatccgaatttggtgtgattgatttggaagtttatttggaatcgaggtcgcggccagcaccgtgcgcggcgtcgtacagggccagcgcgtcgggtgtgccggcgggcagcgtggcctgcacgttggcatcgtggcgcagggcgaagaaggtgagcagcagctgtcgctgcaggccgaacatctggcgctcctgctcgggggtcacgtggtcgtagccgagcaggtgcaggatgccgtggatggtgagcaatagcatctcctgcatggtgctgtgcccggctgcggcagcctgttgggcagcgacccacgggcagatgacgatgtcgccgagcactccttccatcacggttttgccgtcgcctgggcgcagctcgtccatcgggaagctcatcacgtcggtcgggccttcgaggttcatccaacgcatgtgcagttcggcgatgggatcgggatccacgaacatgatggtcaggtcggactgggtgctcacgcgcatctggtcgagtacccaaatacccaaatcggagaagaccttggggtcgatgacccactgggtttcattggtgacgtcaacgctcatcgtctgtctcactttggttggttgaatccgtttgctggcgggcatcgaagtcggtatggttgcggcggcccttgcgttcgatgtcgcggtggtcgccggcgatggcggagtgacggtcgtaggcggccacgatctggccgaccagctggtgacgtaccacgtcctcggttttgagatgcacgaatgcgatgtcgtcgatgccgcccaggatgcgttcgatggtggccagtcccgagcgcggcacggtcaggtccacctgcgagatatcgccggtgatgaccatcgtggtgttgaagcccagacgggtcaggaacatcttcatctgctgttcggtggtgttctgagcctcgtcgaggatcacgaacgcgtcgttcagcgtacgaccgcgcatgtaagcgagcggcgccacttcgatggagccgtcgtccatgtaccgcttgagctggtcggcgccgagcatgtcgccaagcgcgtcgtacagcgggcgcagatacgggtcaaccttgtcgttcagcgtgccgggcagaaagccgaggctttcgccggcctccacggccgggcgcgtaaggatgatgcggcgaatctgcttgtcctggaaggcacgcacagccttggccacggccagatacgtcttgccggtgcctgcgggaccaatgccgaaggtgatggtgtgcgattcgatggcgttcacgtaggccacttgtccggcggttttcgcacggaccggcacgccggcggcaaaggtgatgacgccgggaaccgtgggctttcggtacgtcgggtcgtgggagccggcagaacgtgcatgggcgcgttcgtttgaggtcgattgcgccagtttgtcatgcaccgggccgtgacctggatgttcgaggcgcacgtggttcttgagcacgttctggtcgagcatgcgacgcacggtgtcggcgtccataggcgcggtgtaggcggcttggatgatggtgttgaccaaatcctcggcctgtgcggcctgggcttcggtctgcttggagcgggagacgatcgccacgcggttgccgcgcacgataatcgtcaggtccggaaaggcgcgctccacctcgcgaatgacctcgtcaaccgggccgagcacggcgacggggtcaagttggggcgggatggtgatggtacgtgtagtcgttgccacgaagcggatattcccctactactcgtcgagcttttcgccggtcatcacgtgcgcgtgcacgtggaagatggtctggccggcgtcgagaccggtgttgaacaccagtcggtaggcgccgtgaaattccttgtcggcgatgttctgcgcgatggagacgatgtgggccagctcggtcgggtcgtcggcggcaagttcggcgacgttggcgtagtgcttcttgggcaccacgagcacgtggaccttggccttggggttgatgtcgttgaatgcgtaggtcgtctcgtcctcgtagaccttgctgctgggaatctgccctgcgatgatcttgcagaacaggcaatcgtcggattcgctcatcatgctccttggtttgatgttgctacgcaccagcttagcgcgtgggcgttactcgtaacgtcccaacacccgagacaacagcgacaacgctacaggaccggccgtcgcggctctcagaatattgtgccccagtacgcagctcaccgctccggccttgacgaaatcagctacctcctgctcactgatgccgccctcaggcccgaccaccacactgacagtccgcggccggccgtcctggagcgtgcgttccaccaactgcgtaaccttctcctccacgccggaccacgtatcggtagcatcctgatgcagcacaatcaccacatcgccatgcacgcaggccctgcggcagatggccacgacctccttgctggacgcgcacgcctccagttgcggtttaaaagcgcgccgcgactgctcggtggcggcatccagtaccgaattccacttcttgtccgtacggccgaccttccacttggcgatggatcggtccgcctgccatggcaccacttggtcgacgccaatctgcgtagccatatcgatggcctgctcatcatggccggttttcgccaatgcctgaatcagcgccaaacgggtgagcggctcgggttcgcgccccacttccacaacttcagcaagtccggcttcaggatcggccatcactgcctggattctcaagccgttgccgtcggaaagttgcaggctgtcccccgccttgagtcgcatagcctgcacagcatggcgcttgatgtgcgcgggcagggttagcttccagccggcgtgaagttcgtcgctgttcaccgggacatcgtcgacctgcgggtcgaaaagaaaaagggcatcagtcatgacttcaaggctacacgcgacacgccgggcacacgcgcgaattgcatccctgtaatttcatgctaagctatttactcgttgtccaaacgacacctgcccgggtggcggaatggtagacgcgctagcttgaggtgctagtgcctattttatacgggcgtacgggttcaagtcccgtctcgggcacagataaaccccttgcattgcaaggggtttttcgttatctgcacacacgaaaggccaccaatgcagttcatcacgctggacaccgttgacgacccgcgcgtcgaagcgtatgtgagcctcaccgaaatgcagttgcgcaatcgcttggaaccagccaagggcgtgttcatcgccgagtcccccaaagtcatcgaccgcgcgctggccgctgaccgcgaaccgctgtcactgctggtcgaggaaccttggctggagggcatgaaagacactttcgacttcatcgacgggcgctggggcgcggatattcccgtctacgtggcctcacctgagcagctcaagcgtctgaccggctaccgtctgcatcgcggcgccctatgcgcgatgcgacgctggccgctgccctccgtagccgaggtctgcaggagcgcccgccgcgtggcagtaatggaaaacatcgtggaccacaccaatgtgggcgcactgatgcgttcggcggccgcgctcgatgtggatgccgtgctggccacaccctcctgcggtgatccgctgtaccgacgagccgctcgtgtgtcgatgggcaccgtattccagattccgtggacccgtatcaccgggttcaacgacgacggtaccgaaaacaagcattactggccgttccagggcatcgacgagttgaagtcgctgggcttcaccaccgtggccatggcattggaggatcgttcgatttcgttggacgagctgacacgccgtctgcacgcgcctgccgaagatccgacgcatatcgacaagctcgcgctgatcttcggcaccgagggcgacggcctgtcccaccatacgattgcccgcgccgatttgaccgtgaagattccgatgagccacggcgtggatagtctgaacgtggcggcatccagcgcagtggcgttctacgcgacacgctaaggaatcgcacgcgctccgaaaaggccggatccttaaacaaatctacgaaactgttcatcgcaagttcacggcacgcggggggggaaagccttgcatgttcgaatttttctgcaattattaactatgtaaaccgaatgcaaggaagcatccggcccagcagtgcggtgtcgaaagacgctcagtaacagagaggacagttacgatggccaagaatcccaagattctgtcgattgtgcttgcaggtggtgaggggacccgcctgatgccgttaacccgcgatcgcgcgaagcccgccgttcccttcggtggtgtgtatcgtctgatcgatttcccgttgagcaatctggtgaactccgggtaccgtcaggtcgtggtgctcacccagtacaagtctcactcgcttgaccgccacatctcccaggtctggcgtttctccccgctgcttggctcgtacgtctcccctgtgcccgcgcagcagcgtctcggcaagcactggtacctcggctccgccgacgccatctaccagaccatcaacatcatcgaggacgtccagccggacatcgtggtgatcgtgggcgccgatcacgtctaccgcatggacttcgagcagatggtacagcagcacatcgagtccggcgccgagttcaccgtggccggtatccgccagcccatcgaggaatcgaaccagttcggtgtaattgaggtcgatcccgatcacccgaacatgatcaggaacttccaggagaagccggccaccaccaccggtctgccggacaatccgaaccagattctggcttccatgggtaactacgttgccaacaccaaggccctgttcgaggctctggctctcgatgagaaggctgccgacaccaagcatgacatgggcggcgacatcgccccgtacttcgcttcccgcaacgaggccggcgtctacgacttcaactcgaacgagattccgggttccacggtcactgatcacgcttactggcgcgacgtcggtacgattaagcagttctacgatgcgcacatggatctgatcgcctatgtgcccgagttcaacctgtacaaccaggattggccgatttacacgatgtccggcaacctgccgccggccaagttcgtgcacgccggccgcgaccgtctgggccacgccaccgattcgatcgtctcccccggtgtgatcgtctccggcggtgaagtgcaccactccgtgctctcccccaatgtgcgtatccactcgtgggcacagatcgtcgattccgtgctgttcgacggtgtgatcatcaaccgccgcgcccgcgtgtacaaggcgattctcgacaagaacgtggtcctgaccgaaaactccactgtcggcatcgataccgagcacgatctggcccgtggcttcaccgtcacgccggacggcattacggttgtcccgaagaacaccatcgtcgatgactgattgaccagtccagacttggaaaagccccgcatcatgcggggcttttctcgtatagagctccctcatcagagggagcttactaagcgctatcagtactttggcatgttgtcgaagttgaagccaagggcggcgagctggtcgcggccttcgggcgtgatgcgctccatggtccagcgcgggtcccacgtccagtcgatgcggaactcctcgaccagaccggccagcgtggatgcgcattcgtcctcgataaggtcggtcagcgggcaggccggcgtggtcagcgtcatcgtaataatggcgcggcctagctcatcgatctcaatgccgtagaccagacccaaatcgatcacgtcgatgccaagctccggatcaatcacctgatgcagtgcctcgcgcacgtcttcggcagtggcgcggccgatatcgtcaatcgccttgatcggaatctcgctgccatcggactgttcgtcatcccggcaaccgcatttgccatggtgaccgccacacgcacaggtgtcatcgccggacgcagcagagtgctcgatcgggcgtccgttcgggaagcccttggccaaggccgggttggccatcacgcggcgagcggcctcctcgtcctgcaggacgccgttgacggcatcgaaaacggacggctgtggttcgggaaccaaattatcgttggacatatttcctcagttctttgcagcgagggctttggcgatggagtccttcagcccttcccagcctagcagagcgcatttgatgcgcatagggtatttcgacacgccttggaataccacggcgtcgccgagcttttcttccaggttctcgtcgtccagaccggcaccgcgcgattccatcagtttgtggaatgtctgttccagatccatggcctcgtccacggttttgccgtccaccagatcgaccatcaccgacaggctggcctgcgaaatggagcagccgtggccgtcccacaccaatcgcttgatggtgtgcggttcgtcatcggagacttcgacatggatggtcgcctcgtcgccacaggtcgggttgaactggtgcgattcaccgggcgtgcagtattcgtggctggcttgcacggtgacattggccgccgcgtccgcggactgttcgaccgccgcgttgggcgcaaaggattccttgccatgcggatgttttgacgcctcgaggatgacctcttggtacatctgttcgaggtcatccccgctcataccgaattcgttcatggtgttctgttttactccactccaaagaacttacggatgcctttggccgcttcgaccaatgcttgggcatcttcgaccgaattgtagacaccggaggaggcacggttggatgcgtataggccgaagtggcggtgcaccggctgggcgcagtggtgtcccacgcgaatcgcgatgccctgggcgtcgatgaactggcccacatcgtgcgggtgcacgccggccacgtcgaacgccacggtaccgatgcggtccacgttttcgcgcggtccgaggatgcgaatgccatcaatgtcgccgagcttcagcagttcggcggcgatggtcttctcatgggcctcgatgttctcgagcccgatgttcatcatccattcggcggcgacgcctgcggccaccacttgggcgaccggctgggtgccggcctcgaagcgggccggaggggccatgtattgggcttcgtggtccatgtaggcgagttcgaccatggagccgccgaagttggccggcggcagggcttcgagcagttcgcgcttaccgtacaggaaaccgacgccggtaggaccgtacatcttgtgcgcgctccaggcagcgaagtccacatcaagcgcatggaaatcgactttgaggtgcggtacggactggcaagcgtccaagatgaagatcgaacctacttcatgcgcacgcttgatgataggggcgatgttggtgatggcacccgtggtgttgcccacgtgggtgacggccacgaccttggtacgctcggtgatgacttcgtcgaggttgtccgtacgcacacggccgtcctcggtcaggtcgatccacttgaaggtggcaccggtacggtaggccagctcctggaacggcagcagcaccgaatgatgttccgcgcgcgagacgacgatctcatcgcccggcttcagggcaaaacgcttggcggcttctcccccccggcccagcgacgcattgccgaacgcggtggcgagcaggttcagtccggccgtggcaccaccggtgacgacgacctcctcttcaccttcggccgtattcgcgccaacgagcttggcgaccttggcacgggcctcttcgaaggccatggtactacgggccgccagctcgtgggcaccgcggtgcacaccggcgttaatcgtacgataaaaatccgcctcggcgtcgatcaccgcattcggcttctgcgaggtggccgcggaatccaggtacacgagcgggtgcccgtgaatctcctgattcagaatcgggaactcgccccgaatctccttaaaatcaaccattatgttcccctacttacgtaacaattgtacgaaacgagtgggagtctgacatggcctgttcgcgaccgtaaagacttggcctgagtggcccggagcgtgtcgagaatagggcatgtcagactcccacggtcacggactcaggccagcgcggactcggagtcggcgccttcgggcaggtactggtcgtagccgttctcttcgagttcgtcggccagctcagggccgccggtcttgacgaagtggccgtcggcgaacacgtgcacgatgtccggcttgatgtacttcaagatacgggtgtagtgcgtgaccatgaggatgccgaactggttggcttccttggcacggttcacgccttcggacacgatgcgcagggcgtccacatccaagccggagtcggtttcgtcaaggatggcgaacttcggcttcagcagttcgagctgcagcacttcggcgcgcttcttttcaccgccggagaagccttcgttcacggaacgggaggcgaacttcgggtccatcttgaggcgcttcatggctgcggacaggtccttggcccactggcgaataccgggagcctcgccgtcgatttcggtcttggcggtgcgcaagaagttggtcatggacacgcccggtacttcgaccgggtattgcatggccaggaacaggccggccttggcgcgctcgtccggagtcatcttgaggatgtccttgccgtcgaggagggcctcgccggagtcgaccacgtacttggggtggccggccaacgtgtaggcgagagtggacttgccggaaccgttggggcccatgatggcgtgggtttcgccggagtggacggtcagggtggcacccttcaggatcggcttgatgccttccttggtttcgacgtggacgtgcaggtccttgatttcgagtgttgacattgttgtgctcctaaaaatgctgttcttacttgtcttcgaggacctgtgccatggcgtcgttttcgccacgggccagtcggcggtcaatcacggtcatcagatgttcggagatggcgggaatgccgatctcctcgacgagttcgccgaagaagccgcgcaccacgagcttgcgggcgtcggtttcggggatgccgcgggattcgaggtagaacagttcctcgtcgtcgaagcggcccaccgaagaggcgtgaccggcaccgatgatgttgccgttttcgatttcgaggttcggctcggaatcggcgatggcacccggggtcaggaccaggttgcggttgagctcgtaggagtcggtgccgggggcggtgggctggatgagcgcgttgcccacccaagtggagtgcgcgcccttgccgtcaagcgcgcccttgtagaccacgcgggacttgcagtcggggtggttgtgtaccaccatcgtgcggtgttcgatgtgctcgccggggtccacgaagtagatgccgagcatgttgaggtcgccttgttcgccgccgaagtcctgatccatgcggatgcggacgatgtcgccgcccaaggtcacgacggagtggcgcagggatgcgccttcgccgacgtggatgcggtggttggccacatgcttggcggttttggcccattcctgaacgaacgtggtggagacgtgcgagtccttgccggtggtgatttccacgccttcggccagtcgtgcgtcaccgtcgtgttccacgacgacgtccgcatgagccttgtcggcggcggcgatcaccagatggaaggcgtcgaggtcctcccccgcgccgtgcaccttgacgagcacgggctgggagatctcacctgacagttccagaatggttgcggtgtggccggattcccattcgactgcggagacgcggtcgttgggcttggacacagtgccggacaggccctcaccgagcttgatctggctgagcttcacgccttcggccaacggcgagccgtcaatcatggagacttcgatctgcgtttcgccggaaggcttgaacacggtgaagaactcgttgatgcgctcgataggcgtgtagcgccattcgtcctgcttgcggctgggctccggatagtcgcctgcgttgaacgaacgcacggcatggtccacggaggacggcatggcggccggaatcgcgtacgggtcgttggggtcggcgaccggaatcttgatttccttgacgggtgttgtgttgtcggtcatcggaatcagcccaccgatccttccatctgaagttccacaagtctgttgagttcaagcgcgtattccatcggcagctcgcggctgatcggttcgacgaagccgcgcacgatcatgcctcgcgcctcttcttccgtgagtcctcggctcatcaggtagaagagctggtcttcggagatcttggaaacggtggcttcgtgggccatcgagacgtcgtcttcgcgaacgtcgacgtgcgggtaggtatcggagcgggagaagtcgtcgaccagcagggcatcgcacacggtcgagttggacgaaccgtacgcgcccttgacgattttgaccagaccgcggtaggcggagcggccgccgccgcgcgagatggacttggcgacgatggtggagctggtgtgcggggcgaggtgaatcatcttcgcgcccgtgtcctggtactggcccttgccggcgaagccgagggacatggtggatgccttggcgtacggttcggcgaggatgcaggccgggtacttcatggtggccttggaaccgatgttgccgtccacccactccatcgtgccgccctcacgcacgtaggcacgctgggtgacgaggttgtagacgttgttcgaccagttctgcacggtggtgtagcgcacgcgggcgtgcttctcgacgatgatctcgacgatggcggcgtgcagcgagtcctcggaccagatcggggcggtgcagccttccacgtagtgcacgtaggagccttcgtccgcgatgatcagcgtacgttcgaactgacccatggccggggtgttgatgcggaagtatgcctgcaacgggatgtccacgtgcacgcccttcggcacgtatacgaacgagccgccggaccatgccgcggtgttgagggcgccgaacttgttgtcctcagggggcacgacggtgccgaaatacttcttgacgagttcagggtattcgcgcacagcggtgtccgtgtcgacgaagatcacaccctgcttcttcaggtcctcacgaatggagttgtagattacctcggactcgtactgggcagccacgccggagacgaggcggttcttctccgcctccgggatgccaaggcgatcgtaggtgttgcggatgtcgtccggcagctcctcccacgacttcgcctgcttctcgatcggcttgacgtagtacttgaagtcgtcggcgttgaagccggagagatccacgccccaatcgggcatgggcttttcgaggaacgccttgaatccacgcagacgcatgtcgagcatccactgcggctcgcctttgtcggcgctgatcgcgcgtacgacgttctcatcaatgcctcgttttgcggcttcgccggcggcatcagaatcatgccaaccatagttgtagtcgccgaactggctgatgatctcgtcatccttcttgatcttgtcctcgttgacgcgggtacgatcagccacatactggctcatctccacgtcagcggcggcgtttggtgctgtgttttcggtcaccatcctgccttccttgtatcacacttaatcctatgaaaacctagcagaacccaagtgcaaacactagctgtcctgacgcatattggctgtgggcttgattacatgcgggcgccatcgggccatgcggcatcacggatggcaccaaacggcgaaggcgtggcggcgaagcatcctgagatgccgtgccgtcacgccttcatcgtgcgcggaccgaccgcgcgggatccacggtcagcgggccgcctgatggccgagcgcggccttgaccagaccggcgaacagcgggtgcggcttggtcgggcgagacttgaactccgggtgagcctgggtggccacatagaacgggtgcacgtcctgcggcagttccacgaactcggtgagctcgccgtccgggctctggccggagatgcgcaggccgccttcacgcagacgatccttgtaggccacgttgacttcgtaacggtggcggtggcgctcggtgacatgcgtggtgccgtacagttcggcgaccagcgagccttcctccagctcggccgggtaggagccaagacgcatggtgtggcccatgtcgcccttgccggccacaatgtccttctgctcttccatggtggcgatcaccgggttggcgcaatcgggctcgaactcggaagagttcgcgtcttcaatgcccagcacgtggcgggagtattcgatgaccatggactgcagaccaaggcacaggccaagggcgggcagcttggtttcacgggcgaacttcagggcgccgatcttgccgtcgatgccgcgaatgccaaagccgccggggatcacgatgccgtcgacgttgtcgagagcggcggccgcgccttcagtggtttcgcaacggtcggcagcaacccatttgacgttgaccttggcccagttggcaaagccgccggccttgatggcctcggtgacagacaggtaggcgtccggcagatcgatgtacttgccgacgatggcgatgttgacctcgtgcttggggtggtggacgcgctcaagcaggtctgcccattcatcccaatcgacatcgtggaacggcaggccgagctcacgcaccacgtaagcatcaaggccctcttcgaacaggatcttcggtacatcgtagatgctcggcgcatccacgcagttgaccacaccttcggcatcgacgtcgcacatcagggagatcttgtctttgatggactggttgagcgggcggtcggaacgcaacacgagggcgtccggggagatgccgagttgacgcagcatcatcacggagtgctgggtgggcttggtcttgagctcgtgggcggcggaaatgtacggcaccagggaaacgtgcacgaacatgcagttgtccgggccgagatcgcgacgcacttcgcgggcggcctcaaggaagggctgggactcgatgtcgccgacggtaccaccgatttcggtgatgatcacatccacgtcatcggaagcctgggcgcgcatacgagacttgatttcgttggtgatgtgcgggatgacctgcacgcactggccgaggtattcgccggcgcgctccttgcgcagcacttcctgatagatctgaccggtggtgacgttggccttctggctcaggaagacgtcgaggaaacgctcgtagtggccgatgtcgagatcggtttcggcaccgtcttcggtcacgtagacctcaccatgctggaacgggttcatggtgcccgggtcgacgttgatgtacggatcgagcttttgctgcagaacatggataccgcggctgcgcagcaaacgaccgagcgaagatgcggtcaggcccttgccgagagaggagacaacgccgccagtgacgaaaatatgcttggtgacgtgttcttgagaattaccatgtgttcttctaaccatggaatttcactctatcatccgtgtatgacccggcgtgttcatgacgtggccggtgtagtcgtgcgtaggcagcccatctcgttctgccttggccagcatatggtcgaatacacggcgtacttcgggtccataaggcgcgcccggacgaggattcgggtccgattcgtcggaacaggaatcccgggcgcaacgtcgactgctacccgggattggctggagggcttggttctattcgctcagcaagtgcgccacagcatcgagcgcgagcttgtagccgtagaaacccatgccggtgatggtgccggtggccacagggctgattacggaacgcttgcggaactcgtcgcgggcggacgggttggaaatatggacttccataagcggcaggttctcatcaatgaccatgtgcgcggcgtcggcgagagcatacgaatagtgcgtgaaggcggcgggattcatgaccaccggggttttctcgtcggcggcttggtgcatccagtgcaccatttcggcttcgtcgtcggtctggcgcacctcgacttcgaggccgaggtccttgccccattcagcgcagagcttgcgcagggtgtcgaggtcttgacgaccgtagacgtcgggctggcggacgccgagacgtccgaggttagggccattgacaacaatgactttggtcattgggactccttttgtttgtgcttctctccctccgccccttcggggcacctccctcatcagagggaggtagaaggtaaatccgactccggggcacctccgttagaggggagccaagtactttttctgaggggatggcgaacggcacggcctacggccgttcaattactgctggatacgacggaatgcttcttctacggcttcggcgggcgggttgtcgaggtgtacgacgtgaccaatctcgtcgaggaccacgaaacgcagttcgttgccacgggctttcttgtcgcgatgcatcaatgcgagcacgtcgtcgaacgagctgccattccacgacgtcggcagacccagcgaagcaagcaacgaacggtgatagtcaaccagatcctgatcgatgtaaccgatcagatgggccagctcggcggcatacaccataccgacggccaccgcattgccatgcctccagcggaagtgctcgagcttttcgatggcatggcccatcgtgtgcccgtagttgaggaattcacgcagacccttctccttcaaatcggaggagacgtggtaggccttgacctttaccgtgcgctcaatgagctcggcaaccacgtcttcgagcggcgagccgaggaatgtagagccgtcgaaagcgcgcagttcagctgcgtggtcttcgaggatatgcaggatttcggggtcgcggatgaaaccggatttggcgacttcaccgagaccctcgatgaagatgtcattgggcagcgtagccagcgtcttggtgtcggccagcacaccggcaggcgtgtagaacgagccgacgaggttcttgccctgcggggtgttgatgccggttttgccaccggtggaggcatcgaccatggccagcagcgaggtcgggcagtttacatagcgcacgccgcgcatccacgtggcagccacgaaaccggccaaatcggttgcggcaccgccgccaagccccaccacggcatcggatcgggtgaaaccttcgttgccaaggcgttcccaaatgccgttggccacggtaatggtcttgccgggttcggcatccggaatcacgatgtcggaaacctcatagccgccctgacgcaacagggcgcgggcacgatcggagtgtcgctgcaccggctgggtatggataagcgcgattttggcgggcttgggtcccagcacgtcgaccagatgattcatggcaccttcgccaatgaccacatcatacggctcaattgccgatccggtaacatgcactgctcgctcagataccatatcaatcactttcttcgctgcgccctgaggcgtaagcccccgggtatggacatgaacgttggcgacctcgcggaataccgggtcacgctgcttgaacagtttcttccaacgggagttggcattgccattgagcatgggccggcctcccccgcggttcgcgcgttccatggcctccgccggatcggcgtcaaggtagaccacacgaccgccatggtcgatgtatgaggcgagggcatgctgggtggatggcgtcatgggagcgccaccgcccagcgaaaagataccgtcgaaatcctcaagcatatcggcgatgagatcggcctcgacctcgcggaatgccggctcaccgtattcatcgaagtaggcgggaatcttcatgcccacttcacgttcgatctccacatcggcatcggcgaacggcagacgcaacatatgcgccacttccttaccgacacgtgttttgccggctcccatcatgccgatgatgacggcgcgggggcgtgcggtcataatctacgaatcctctcgacgattggtgggtacagttgctgatggttccgcggcagtcgtctcggaaccatactccacttcgttcagcgcatgtgctccggccacgaggcgagatacgactcaaggttgcgccgtgtttcggcaacactgtctccaccgaacttatccagcgcgtacttcgccaaagtcagacgcaccatggcctcggccaccacggatgccgcaggcacggcggtgctgtcggaacgctggttgatggcttgtgcggattcgccggtcagcacgtcgaccgtacgcagggccttggggatggacggaatcggcttcatggcaccgcgtacgcgaatcacctggccattggacataccgccttcaatgccgcctgcgcggttggacagacggtcgatgcggccgtcggcgttgaccacgatctcatcgtgcgcctgcgaaccggggcgggaggcttccaggaagccgtcgccgatctccacacccttgaacgcctgaatgcccataatcgcggaggccagagccgcgtccagacgacggtcggattccacatacgtgccgatgccggcaggcacgccgtaagccagcacttcaatcacgccgcccaacgtgtcggcggccttcttggcctcgttgatgcgttcgatgatgcgggcctcggcctctttatccaacgtacgcacgggagaggcatccaacgcttccagatcgtcaggtgtgggcaacggcaaatcagggttggtctgcacgccaccgagcgccaccacgtgggctacggtgcgaatgccgaacgcctgatccaggaactgcttggccacctcgcccaaggccacacgggaggcggtctcacgggcgctggagcgctccagtaccgggcgggcgtcgtcaaaaccatacttgcgcatgccggtcagatcggcgtggcccgggcgcgggcggctcagcggcgcattgcggccttcgcgcggcaggtcatggtcgagtgcatcggcgctcatgacctcggtccacttcggccattcggtgttggcgatttcgatggccaccggcgagccgagggtcaggccgtggcgtacaccggtcagcagacggaccttgtcttgctcgaacttcatgcgggcaccacggccatatccaagtcgacggcgtgccagtgcggaaacgatatcgtccgtgctaatgcgcacgccggccggcaacccttcaatcatggccaccaatgcttctccgtgagactcccctgccgtctgccaacgcagcataacttccctcgtttcatgtgtgtacgtctatgtgtacgtctaactaggggttaatgttaagccatgccatacctgttcacgctacccggtctgctatgtgggcttgcactgtccattgaggatgttcgtcatcggcgggtgccgatcgcatgggtggccgtgggcgcgttaatccagttggccgccgatttcgcgcatggagtggtggcgaacgacctgttcgtgctgttgcaggcgctgttgttcaccgtgctatgttgcctgatccagttcgcgttggcgttgctggtgccgcggtcattgggattcggcgatgtgaccgccttgatacctatgggattgtctgtcggactgtttggcctgttgcctgtggtggtctggtggctggcgatgggcgttgccggcatcacatggattgccctgtggacgcgattcgacccacaacgcacatcaccggcacatgcgggcaaggtgccgtatgtgccggtgatattggcgggcgcgattgtggcggtggttgttggggcttaatcccgttactcccctcagtccgctttgcggacagctcccctcggcgaggggagccaatgaggcgactactggttttcggcttgccacttgcgtagttcggccacattctggtcatgttcatcggcggttacggcgaacttggtttcgccggtgtccagattgaccgtgcagaagtacagccaattgccgctttcggggtgcagtgccgcttgaatggcgctatcgccgggattgctgatcggcgtaggcggcaggccggagatcttgtacgtgttgtacgggttggactcgtcttgggtcatctcggtggtcacctgcgcgggcttgacgttattgccataggccacggtggaatccatgcccaacgacatgccctgctccaaacggttctcgatgactcgcgtcactttgccgtagtaatcggctttgttgacctcggcctcggcgatagaggcgatgatcatcacccgttcgcggtcactgccggtcggcacgcccaattcatccaacttggcgatacgcttatcgaccatggccttgaggatttccgaagcgctcttcatgctcttgacgttgtaggttcccggctccagccatccctcaaagctaccgcccgcttcattgggcagaatatccttacccttgttcttgataatcgtgtcgaattcgctttgggcaacgccggaaagcttcgcggcgtcggcgaacacatcggtagcacgttcaccgggatgaacctcaaggaagcccgccgcctggttggtgtcggagagaacggcgatcacatcggatgcggccatatgcttcttcaatgtgaacgttcccggatagagtgtcgcgctattggcgttgaccacgctggtgaacgcggcagtggacttgatgacttcggccttgagcagattatcggcgatctccgccgcgccttggccctcgctcacggtgaattcgacctcgccatagcccggtccccgatagtccgcgatggccgtcgactggttgctccggctgtcgcgccatgcgatgagcttggttacgccgaaatagccgccgccgataagcagggcgacgatggcgatagcgatgataatgccactgacgcgcttgcgcttgcgctgtgcacgtcgcttgcgcatctccttgcgggatttcggcggttctggcggctcggtcccgcgcattggttctgacccctgttcgacccaatgcgtgttgtcatcaaagaactcgttaaaatcatcggtcataaccgatacctcactgctcccgggtacggtcgagtgccgtctgcaaaatcaccactgccgactgctggtcaaccaccggcctgtgcttgttcgaagctttatgggcctcgaacagttgacgatgcgcactgactgttgtcaatctctcatctatcaatgacacctgcggaatctgatactccgtagaatcactgtcttcactctctgcttgcagcctcttctccagattggccgcccacctgcgcgcttttttggcgcttttgccttctgtaccgtccatctgcaggggcagtccgacgattacatggtccacatgttcgtcttcgatgacgttcaggacctcgtcaatagcaaagaaatagtcgccggcaacatgaatgttgccagcagggtgtgcaaaggtaagctccgggtcggacagtgccagtccgacccgggcattacccaaatcaacgcctaaccacaccactggcggaatcaggctttctgcgcctcgtgctcgagcgcttcgagggcctcgtcgatcttggaggcatcgacaccgccaccctgggcgaagtccggcttgccgccgccaccgccgccgaggaccttggctgcgccacgcaccagatcaccggccttgatgccgaccttgcgggcggcctcgttggtggccacggcgaccatcggcttgtcatcctcgttcacgccggcgagggccaccaccacgggggcgtcttcaccgagctgggcgcgcacgtcgagtacggtcttgcgcagggcgtcgaccgcgccgaagtggcccacgttcttgacggccaccttgaccggggccgcggagttcttggtgtcagcaaccagcgccggaaccgaggcggccagctgggactcgtacatggaggccaagcgacgatcggattccttgagcttggcgagcagggcgttcacacgctcggcgagctcgtccgggcgagcgttgagcttgtcggacagctgggagaccaacgcgtgctcacgagcgttgaagtcataggcaccctggcccacgacggcgtcgacacgacgcacgccggagccgatggaggcttcggacaggatgttgaccatgccgatcttgccgacgtggtccacgtgggtaccaccacacagctcgcggctccagccgtcttcgccgatggagaccacgcgtacgatgtcgccgtacttctcgccgaacaggtgcatggcaccgagggcgatggcgtcgtcgaacttcatttccttggtggtcacggcgaggttgtcgcgcagcttgtcgttgacgcgctcctcgactgcggagatcacggacttggccggggccttggaccactggaagtcgaagcgcagacggttcggggcgtcctcggagccgcgctgggtggcctgcgggccgagctcctcacgcagcgccttgtgcaccatgtgcgtggcggtgtgcgagcgggcgatggcgccacggcgggccaggtcgatgttggcgttgacttcggcgccgacgaccagcgtgccttcggtcagacggcactggtggacgatgaggtccttgatgggcttctgcacgtcgtcgacttcgagcactgcaccgtcgtcggacaggatctcgccctgatcggcaagctggccgccggcctccgcatagaacggggtacggtcgagaatgacttcgacgttggccgggccggtgacggcgggcacggagcccttgccttcctgcatgatgccgatgaccttggcacgggcggacatgtccgtgtagccgaggaagtcgatcggcttggcgagcgtcttcttgaagtcgtcatagaccgacaggtccacgttgtgacgcttcttgagggcgtcggcgcgggcgcgggacttctgctcggccatgagttcgcggaacttggcctcgtccaccttcacgccctgatcggcggccatttcgagggtcagctcaatcgggaagccgtaagtgtcgtgcagagtgaacgcatcagagccggagaccaccgggtcggcggtcttcttggccttcttgacagccacgtcgagaatctcgatgccgttctccagcgtacgacggaacgcgtcttcctcgccgtaggccgcttcggagacatcgtggaaggtgtcgttaagctccgggtagctggcgaccatggcctccttggagacaggcagcagctcgggaatcaccggatcggtcacaccgagtacacgcatggcctgcacggtgcgacgcagcaggcgacgcagcacgtagccgcggccgacgttggacgggcgcacgccatcggacataatcatcagcgcggaacgcacgtgatcggccacgacacggaacttgacatccgcggcctcgtcctcgccgtacttgcggccggacaagcgctcggcggcctcgatgaccgggaagacctcatcggtctcgtagatgttctgcttgccctgcatcaggtaggccaagcgttccagaccggcaccggtatcgatgttcttctgggcaagctcgccgacgatgtgcaggtcggtcttggacttgacgttgtcgacctcgtagttctcgaacacgaggtcccagatctcgatgaagcgcgtctcatcggccgcgggaccgccatcacgaccgtattcggggccgcggtccacgtagatctcggagcaggggccaccagggccagggccaccggtggtccagaagttgtcttccatgccgaaaatctgcatgtgctcgggatcgaagccctcgttcttccagatggaacgggcctcttcatcgtcggtaaaggtggtgacccacagcttttccgggtcaaagccgtaaccgccctcgctctgcggggtggtcagcagctcccaggcgtagtggatggcctcttccttgaagtagtcgccgatggagaagttgccaagcatctggaagaaggtgccatggcgggtggtcttgccgacctcatcgatatccagcgtacgcacgcacttctggttcgatgtcatgcggcgcttcggcggggtctgctcaccaagaaggtagggaatgaacggcaccatgccggcgatggtgaacagcgtggtggggttcggggaaatcagggatgccgaaggcatgacgagatgatcatgtttggcaaagtaatcgaggtatcgctttgcgatgtccgcagtgcgcatgagcggatgaactccttgtttgggtaatgggcgcagttgcgcctggtattggtggaaaaagactggattatgaggactagtttgttctagctggttcagtgactagatggcaaggcggcatgcgcgtgtcagttggcgcg

SEQ ID NO: 794 - DNA, 8693 bp, Unknown
  R14_18m  MAG No. k141_4409
agccaagaaaatgaggcgtatggcctatattggtgtctatgagaagcccacgcgaggattttgaggcggcaggcaagcgactgccttgggatgctgctgctcgcaatgcagcgctgtccgccaccgcgccagtctctgacgtcaaggcatccgccaatggcgccgacaatgccagcaatgctgaacattccgatgacatgcccaccgtgccgattcccgcacgcaaggctgccacgacgttcgacaccccctccaagcgtgagcgcatcgaggtcaagccgccgatcacccgattcatacgtcgtgccatcacccgcgtgttcggcgtatggtcacacatctccactcaggtggtgcgccaatggggctggtatccgcgagtggaaccctatgtgggttatggcaccggcgattactcgcgcctgatctgccgcacggtatacgcccccaagcatgcgcaatccggcgaactgatccgcggcatccgcggcatgcttgccgtgcccgcgccgcgcacccacgtgcaggccagcattgatgacacgccgctcaacaccgtgcagatcggcgtctccgaggtctatgacaaggtggaccgcacgcgcgatctcggcagcgaatacgccatctccgattccgccggatacctcgacctcgtggccgagcatcgtctggtgcccggtatccatcgcgtctcctacagcgtggccaaccgcaaacccgtgagcgccaacctgtacaccatccccgccagtgccaaagtcggcatcatctccgatgtggacgacaccatcatgatcacacaggccccggtgccatggaaggccgcgtacaacctgctgttcctcgaccccaagaagaaagcctccgtgccgggcatgagcgtgctgttcacccgcatcgccgacttgttccccggcgcaccgttcttctatctttcgacatcgccctggaatgtggagagttcgattcgcaacttcatcactgaccatggttttcccgaaggcccgctgctgctgcgcgacctcgacccgaggcccaagaccttcgtgcccaccggcccccagcacaaacttgagtttgccgaacaacttatggccgacttcccggacatgaagttcattctggtgggcgatgacgggcagaaggacccgaccacgtacgccaccatcgcccgcagatatcccggacgtgtactggctatcgtcattcgtgagttgagcccgcgcgaatcaaccggattggcgtcggtgacgggactcacctcgacccagccgactccggtaaccgatgtaccagtattcaccggcaccaccggctcgaacattctgaagaccatgctgccgtatctgaagacggtgttgcgataagcgcggcgtgatgaacgccgaatgcgtcccggtgtggtgcctcgcctataatcgcgtggtatgactgacgagagcacaaacgccgcggccgcgatgccgccttacgccaagcgcgagccgaagcgccgcgaattccacggtgacgttttcgacgacgattacgagtggatgcgagacaaagactccgatgatgtgcgcagctacgtagctgctgaaaaccagtactgcgagcgtcgcatggcgcatctggcggatttccggcatacgttgtttggagagctgaaatcgcatgtggaagagaccgatatgtctgttcccacgcgcatcaacgattactggtacttcacccgcacgcagcagggcaaacagtatggcgtgcaatgccgcatccccgtgcgcgatgccgatgactgggacccgccggtcgtggatccgcaaggcgcgcccggatccatgcccggtgaacaggtcgtttttgatgcgaacaaggaatccgaggggcatgacttcttccggctcggcggcttggatctgagcaaggacggccgttggatgctgtacggcgtggatgttgcgggagacgaacgatatgatttccgcattcgcgaccttgccgggctggagaccggggagccggtcagcgaactgcccgaacagttcaccggcattggcagcgcatgcttcacgccggacggccaatgggtgttctgggtggaattggacgattcctggcggccgctcgccgtgtggcggcatcgtgttggcacggcggtcgaatcggatgtgtgcgtgtaccgagaaaccgatgaacggttctgggtgggcgtcggcatcagttttgatgagcgcaatatcgtgatcggcaccggttccaaaaccaccaccgaagtgctgatgctgccggtggccacgcctgaaggcgaattccaagccttcattccacgtcagaacgatattgaatatgatgtgagctttgcctgttttgaaggcgcgggggagaacggtgcggatgtgccgctcgccgtggtctaccacaacgccgccaatccgaatttcgaaatcgacgtcattgacatgcgtggccatgagccgccgtaccgactcggcgaaggcgtgtgcatcgccgccgggtcgccgtacggctgtgaacatggtgagccggataagccgattaccgaggcatacttcaacgccgccaatccggcgatattgcagggtgcccacggtctgggcatcgaaggcatcgcgttgcatcgcaactttgtgtccctgagctaccgtgccgacggccagccgcacgtggcatacatgaccaagagcgcggctgccgccgacttcctggccggacggccgtggcggtttacggaactgctgccgcctgccctggaggacgactgggacatggtcgccgccgatcgcgaaaacttcaccggcgatcatggcgaaatcttgtggaccgaagatgaggcccccacggatcacacgtcatcttccgatggtgccagcgacgaccacctgcccggtgagacccggcgcttgtacaccatcggcgtcggcggcaacccatcgtatgaggcgccgcgcatgcgctactcgttcgccagctacacccgcccgggcgagctgcacgaaatcgattccgccaccggtgaagatgcgctgctgaagcgagccaccgtgttgggcgacttcaatccacgcgattacatggaacgccgtgtgtggattaccgcgcgcgacggcgaacgcattcctgtttccctcgtctggcaccgcgattgcccggcgcaggattcgccgatgttcattaccggatatggtgcatacgagatttcctccgatccggggttctcggtctctcgtctgagcatgttggatcgcggtgtgctgtacgccgtgccgcacattcgcggtggcggcgaaatgggacgcgcctggtatgaacaggggcgcagactgaacaagaagcattcctttgaggacttcgtggacgccacacgcgcgctgcagaaggcgcatttggctgatgcttggcgcaccgtggccaacggcggatccgctggcggcctgctgatgggcgcgattgccaatatggcgcccgaatgctacgccggtgttgaggcggatgtgccgttcgtggacgcgttgacctccattcttgacccggacttgccgttgaccgtcaccgaatgggacgaatggggagacccgttgcatgaccctgaggtgtatcagtacatgaagtcgtacacgccatacgagaatgtgccggtggccgtactcgagggcggcgacgacgaggctgccggtgacggcagtgctgatggggctgccgccggcgcgctcgccgccgcgcaattcccgagaatcttcattaccacctcgatgaacgacacccgcgtgctgtacgtcgagccgctcaaatggctggcccgtctgcagtccgccggcgtggacgcggtggctaagatcgaggtcgaggccggtcacggcggtctatccgggcgttacaagcaatgggaagaggtttcctatgagaacgcttggtgcatggatgtgatggggctcgctcattaggtcatttcgtcgttcattaggtcggtgtcctcttctatgtgagactgaaatgccgccatttcagtccctgaaatgaacccacgccgacctaatgaacactaaaatgacctaatgaatgtctcgacacgatacgcatgttggttgtgtccactagctgagcgggttcgggccggcaggtggtcgcgcgagtaggctccttgaactatggcaaagacatataaaatcgccgttattcccggcgacggtattggcaaggaagtcactccgtgggctcagaaggctttggaaaaggccgctgaaggcgtagctgacttcgagtatgagaacttcgacttgggtgccgagcgttatctgcgcgatggtgcgatcctgcccgaggacgaagaggagcgcatcaaggccaacgacgcgattctgctcggcgccgtgggcgatccacgcatcaaggccggcattctggaacgcggcctgctgctgaagctgcgcttcgacctcgaccagtacgtgaacctgcgcccctccaagctgtacaagggcgtcacctcgccgctcgccaaccccggcgacatcgacttcgtggtggtgcgtgaaggcaccgaaggtctgtactgcggcgccggcggcgcggtgcgccgcaacaccccgcaggaggtggccaccgaggtgtccatcaacaccgcatacggtgtggagcgtgtggtgcgttacgccttcaagctcgctatgaagcgcaagaagcacgtcaccctggtgcacaagaagaacgtgctcgtcaacgccggtgatatgtggcaacgcatcgtcgacaaggtcggcgaggaataccctgaggtcacccacgactaccagcacatcgatgcggccaccatcttcctggtctccgacccgagccgtttcgatgtgattctcaccgacaacctcttcggcgacattctgaccgatgaggccggctccgtggtgggcggcgtgggctactccgcctccggctgcatcaacgcctccgacgagttcccgtccatgttcgagccgattcacggttccgctccggacatcgccggtcagaacaaggccaacccgaccgccgccatcctctccgccgccatgctgctcgagcatctcggctttgatgatgcggccaagaagattcacaccgccgtcgaagcggacatcgaggagctcggctccaccgtgcgctccaccgaccaggtcggcaaggacattctggcccgcatgtgatgtcccacttggctcccctccagaggggagccaagtttatactgagttgcatgcaaatgcgacatggggaatgcaaaaccgttggcggcaaactagtcgccgtgaccgtatccgtcgatgatgacggcaccgcacagtcatgccatatcagcggtgatttctttattgaatcagtttcggatgccgaatctcatgctttgttgcgtgacttggaacaggctctaattagtgatgattcattgcggtccgtattggacgctcaccctagttgccaaattatcggcacagatgaagttgccatcaaaaccgcatatagccgagccgtaagcagcaacttgcccccgctggtgggggctcccgcgcagcgggtgggggtggtcagccccgatgcgccgaacaccccggcatccatcaatacacaaaccaagcagcccgacaaaagctctgaataccgggagcgctggaacgccctcagacctcaactcaccgtgatccacgaccatccgcgtactccggacgagcaaatggccattgacgagacctgggcgcgtgaagtcgcagcaggaacacgacagccgaccatccgattatgggagtgggtgggcccggctgtggtcatcggccgtttccaatcggcccaggacgaggtgaatctggacattgccgagcagctcggtttcgacgtggtgcgccgttgcacgggtggtggcgcgatgtttatcgaaccgggcaacaccattacctattctctgtatgcaccgctcgatttcgttcagggcgtaagcatcgaagaatcctaccggctctgtgactggtggctggtcgaagcgctgcgcgaacttggcttggatgtgcggttcgcgggcctcaatgatatcgcctcgcagtacggcaagatcgggggagcggcgcaacggcgcttccccgtaggctcaggcggcgcggtgctgcaccatgtgaccatggcatatgacatcgatgcggccaagatgagccgtgtgctcaacaccagtcgcgagaagatgtcagacaaagcggtgaaatcagcagtcaaacgcgtggacccgatgaaaagccagacgggtctcagccgcgaacacatcgtcgaacaccttattgactggtttgcggcgtgatttcaccgatggccgtatacgattttgccggtggccgtgcgtggttttgtcatgggcgagcgcggtaaccgcgacagtgccgtttttcgcggtaacacattcgtcagcatgtcgtacggctatcggatcgcgccacacatgaagtgacgaatgatggcatgcttctgacgaaacctgtggggcgcgttacaatatgacggatggccgacgacggtcgtaggacaataaggatggtgcgatgagcttggaaacgccaaacgcttttgctgacgaggagaacatcctgctgcatacggcattgttcaagcaggtatcgccagccgaagccgaggagctgctgccgcatttgaagcgtgcgaccttcgataagggcgactatatcttctccgaaggcgataccgatcagcgcatgtatctactggagcaggggcgcgtcaagctgattcgcacttcttccgatgaccgtgtgcagctgctgtccatccacgcgccgggcgaagtgcttggcgagattccggtattcgaccctcatggtggcccgcgcactgcgtccgcggtgtccatgagccatggcacgcgcgtggtctggctggagcatgatgccctgttcgcatggcttgatgagcatccgcgtgtggccatcgacatgttgcaggtcatggccaaccgccagcgcggcaacaacgaacgcatctccgacttggtattcatggatgtgccggcgcgtctggccaagacattgctcaacttgggctcacgtttcggcgagccggtggaacagggcctcaaagtgccgcatgacctgactcaggaagagctggcccaactggtgggctccagtcgtgagaccgtgaacaaggcgttgatggacttttccaaccgcggatggatcgcacgtgacggtcgatcgatcatcatcttccagccaggcatgctgattcgacgctcgcggcgctgaccgttcggctgacttccagccaatgttacgctagtgcggttcttgtgatgatatgttcacggaagctgaccgcgagcccggttggtagggcaccccatttagaatggggcccatgcccaaaaagaagtccctcactctccaacgtgtgcttgttctcctcttggcctatatcatgcttgccgtctgcggtggcgtggcggccagcgtgttgtttgtaccgggtgtggtcggtgccaataaagccgccaaagcggtgattccgtcgctcaaggtagaaaacgtggacttcgacgtgaccggtctgccccagaagtcgacgatgtacgcgcgagacggttccaccgttatcgcgacgttctacaaccaaaaccgtatcgtcgtgccgctgaagaagatttccaaaaccatgcagcaggcagtggtggcgcgcgaggaccgtcgattctggactcacgccggcgtcgacgtgcaaggcgtgatgcgtgcgttcgtgcagacctacctcgtcaaaggctcccagcagggtggttcgtcgctgacccagcagtacgtcaagaacgtgctgctcatgcaggcgatcgaggacgacgacccgatcgcccagtaccatgccaccgaagacaccgtcgcccgtaagattcgcgagatgctgatctccgtgcagatggagaagaagtattccaaggccgagattctgcagggctatctgaacatcgcccagttcggcaacaacctgtatggcgtggaaaccgcagcccagcgctacttcagcgtgtccgccgccgatttgaacgtggtgcagtccgccaccatcgcggctatcaccaagaacccgagccagtacgatccgctggtcgaggagaaccagaaggaaagcgagaaccagcgcaacatcgtgctcaagctgatgctgcaggaggggtacatcacccagaagcagtacaccgaagccgtgaacacgccgctgaaggacacgctgaaggtgcaggccgtgaacgtcggctgccaggacaccggcgactacgcatacttctgtgatttcgtggtgcatcgcatccagaactccgaagaattcggcaagactcgtgcggagcgtaacaagttgctgcaggagggtggcctgaagatcgtcaccacgttggatgtggaagcgaattccacgatgatggagaccgcgcgtaataccattccaccggacgatcccagcggcatggaaatagccatggccgcagtcaaaccgggaaccggcgaggtgctgagctttggcctgaatcgttactatgacgccactccggcagccgcgaacgatccgaccaagtcgggccagaactatgccgtcgatctggtggacggcggcggctccggttggaccattggttcgtcttggaagccgatcaacctgattgcgtggatgga

SEQ ID NO: 795 - DNA, 4627 bp, Unknown
  R14_18m  MAG No. k141_4479
attcttaccgacaacagatccacggacgagaccatgtgggtgttcgaacgtaaggacctgccgtagcggaaggctcgagaccctcaggggcatggccctgggcttccgcaacctcgacgccaccatcaccagaagcctgctgcacgccggcggcttcagacacgccatccaaacccacctctgacacatgcccttacacgccaaaatcggaagagccggaaatactacaacacgctgattgttgtatgtacaactgttgtctatgggtctctttatcatgaattgttgcgtataattctgcatcacccggtccaccgcctcgcgtgtgctggccctgatggagaagaagggcctgatcgcctgtgaatcggtggagcatgacgcgcgctgcaagcgcatcgtcctgaccgacaaggcggacgcgatcgtcgctgatctcaaggtgaatggtgaccgggtcgaacggttgctggtcggcggcttctccgatggagagaaggccgctctgcgcgactacgtcgcacgcatgcgtgcgaacatcgagcgcgcacaacgcgaatttgaacatcaaacgctccctcagtcacctgtggtgatggctcccgatcaagacggagcggaggttgctgacacgaaggaggagaacgaatgagcgataccgcagaggcaatcgcgcaggcgcgcaaagccgtcgaacccggtagacctaagcatgtactgcgcacgctgggtcattcgattcgtgaatacaagaaagccagcatcctggctccggtgttcgtggcggtcgaaggtattctggaaatcctgattccgaccatcatggcttcgctgatcgatgagggtatcaccggtggcagcatgccggccaccgtcaagttcggcgtgattctgctgatgtgcgcgatggtttcgctgggtgccggcttcctgtccggaaagtacgcggccgtggccggcgcgggcttcgccaagaacctgcgcaaggaccagttcgagaaggtgcagggcttcagcttcaccaacatcgaccggttctccaccggttcgatcgtgacccgactgaccaccgacgtgacgaacctgcagaacgcctacatgatgatcattcgtctgggtgtgcgtgccccgatcatggtggtcgtggcctggctgttctcgttccgtatctccccgtcgatttccatggtgttcctggcctgcatcccgattctggccatcggcctgtgcggtctggtcgtgctcgtgaaccccgtgttcgagcgcgtgtttcacacctacgatgcgttgaacaacgtggtcgacgagaacctgcagggcatccgcgtggtcaagtcctataaccgcgaatccttcgaggtctccaagttcggccgcatctcccaacgcatcttcaaggacttcaccaaggccgaacgcatcatgagcttcaacatgccgatcatgatggtgtgcgtctacgcctcgatgattctcatcgcatggatgggcgcgcagcagatcgtcgcttccggcaataatgcggcgttgggcctgtccaccggcgagctgacttcgctggtcacctatgccatgcagattcttatggccatgatgatgctgtccatgattttcgtcatggtgattatttctcaggcttctgccgagcgtatctgccaggtgctgcaggaggaaagcacggtgcagaacccggctcacccggtgactgacatggccgacggctccatcgaattcgaccacgtcaccttccgctactccgacagttccgaaaagcccgtgcttgacgacatcaacctgaagattcgttctggcatgaccatcggcatcgtcggcggtactggttcggcaaagtcgtctctggtacagctggtgccgcgactgtacgacgtgagctctggctcgctcaaggtcggcggcgtggacgtgcgcgactatgacatcgaggcgctgcgcgatcaggtggccatggtgttgcagaagaacgtgctgttctccggcactattgccgaaaacctcaggtggggcaacccgaacgccaccgatgaggagattcgccatgccgcgcagctcgcgcaggccgatggattcgttcaggaattccccgataagtacgacacgtacatcgagcagggcggcaccaatgtgtccggtggacagcgccagcgcctgtgcatcgcccgtgcgctgctgaagaagccgaagattctgattctcgacgattcgaccagcgccgtcgataccaagacggacaagctgatccgcgccgcattccacaacgagatctcggacaccacgaaaatcatcattgcccagcgcgtggcctccgtgcaggaatccgacatgattcttgtcatggattccggccgtatcatggcctccggcacgcacgaggaactgctcaccacttgcgacgaataccgttccatttacgaatcccagaccaagaaccaggctaagaccggagaactggccgctgccggacaggctgctgagtcatctaccgctgagccgtccgaaaccgtgacggtgacagtgaccatgcccacggccgataccagcgcagctgataccaatgcagccgataccaaggaaggagaagcacgatgagcaacgaccagagtttcaagaatcgcgagcctgacatgggcaaagccgaccccggaaccatcaagcgcatcttcagctacatcttccaatacaaattgcgcgttatcgccatcgtggtgtgcatcctgatcggtgccgccgcgcaggccggatccgcgctgttcctccaatcgctgattgacacctacatcctgccgatggtgggggaatcgaaccccgactgggctccgttgctgcgcgccatcagtctgatgggctgcctgtatgtggccggtatcgtggcatcctgggcttggcagtggctgatcatcaccgttgaacagggcacgctcaagaagattcgtgacgatatgttcgcccaccaacagaagctgccgattcgctacttcgacagccacgagcacggcgacatcatgagccactacaccaacgacaccgatacgctgcgccaggccatctcgcagtcgttcccgcagatgttctcctcgattatctccgcgattgcggcattgctgtccatgctgtggctgtccattccattcaccgcgttcgtaatcgtgttcaccgttctgctgtatttcatcgtgcgcaagatcgtgagccgttccggccgctacttcgtcaagcagcagcagtggatcggcgacgtgaacgccttcgtggaggaatccgtcaacggccagaaggtcatcaaggtcttcaaccatgaggacgccactcagaagaccttcgatgagaagaacgaggaactctttgaggcgtccgccgaggcgaacacctggggcaatgtgaccatgccggtcgtcggcaatatgggctatctgctctacattctgctcgccatcgtcggtgccgccgtttcgctggccggcgtcaatgacatcggtctgaccggtgtcaagccgctcaccctcggcacgctcgtctccctgctgaccttgtcccgctcgttcatcaacccgatcggccaggtctcccagcagctgaccatggtgatgatggcgctcgccggcgcctcccgcatcttcaagttgatggacgaacccatcgaggaagacaagggcaccgtgacgctcgtgaacgtggaacttgggccggacggccgcaccatgaccgaagtcgaccatgagaccggccactgggcgtggaagcgtgagatcggcgacgatggtacgaggtctctgaaggccgccgaaaagctgtgcggttccgcctgcgaggtggcgatgaaggccaaggagcaggcgatcacctcgcctgatgggcgttatacgctgctgcgcggcgacgtgcgcttcaccaacgtgaccttcggctacaacccggacaagccggtgctgcacgacatcacctggttcgccaagcccggccagaagatcgcgctcgtcggcgccaccggtgccggcaagaccaccgtgaccaacctcatcaaccggttctacgatatccagcaaggtcagattctgtatgatggcatctccgtggccggcatcaagaagcctgatttgcgcaggtctttgggcattgtgttgcaggacgtgaacctgttcaccggtaccgtgatggacaacattcgttatggccgtctgaacgccactgatgaggaatgcattgaggccgcgcgtctggtcaatgcggacagcttcatccgtatgctgcccgagggatacaacacggtgcttgagggtgatggatccggcctgtcccaaggtcagcgccagctgatttccatcgcccgcgccgcggtggccgatccgcccgcgctgattctcgatgaggccacgtcttccatcgatacccgtaccgaggaagtcgtgcaggccggcatggataacctgatgaagggccgtacggtcttcgtcatcgcccatcgtctgtccaccgtacgcaactccgacgtgatcatggtgctcgaccacggcaacatcatcgagcgtggctcgcatgacgagctgatcgcgcaaaagggcgagtactatcagctctacaccggcgcggtggagctggagtagtcggtacg

SEQ ID NO: 796 - DNA, 61397 bp, Unknown
  R14_18m  MAG No. k141_4550
caacggcgtgttcgtggctaccgtgccggcctccggcaccaagaagcagcccacgattcccgactaccgcgtcaggaccgagtgggaaagcggcgcagtgctcattgaggacgacccataccgttatatgcccacagtcggtgacatggacacctatctgttcggcgagggccgtcacgagaagctctgggaggcgcttggcgcgcacgtgctgcgctatgacgatccgatgggcggcgtggacggcacgcctggcgaacaggtggtaggcaccgcgttctccgtgtgggccccgaacgcccatgccgtgcgcgtggtcggtaacttcaacgcctgggatggccgtcgtcatgccatgcgcgagctcggctcctccggcgtgtgggagatcttcattcccggcatcggcgcgggcgagacctacaagttccagatcctgaacgccaattacacgtgggagatgaaggctgacccgatggagcgtcagcacgaggttccgccgcacaccgcctccatcgtcaccgaatccacctacgagtggaacgatgacgcctggatgcagcaccgccgcaccaccaacccgcatgatggcccggtctccatctatgaggttcacgccggcagctggaagcagggactgacctaccgcgacctggccaagcagctcgtggactatgtcaagcaggaaggcttcacccacgtggagttcatgccactggcacagcacccgttctccggctcctggggctatcaggtcaccggctactatgcggtggattcccgcctcggctcccccgacgacttccgttacctggtcgatcggttccatcaggccggcatcggcgtgatcatggactgggtgcccgcccacttcccgaaggatgccttcgcactcggccgcttcgacggcaccccgctgtacgaggacccggacccgctgcgcggcgaacaccccgaatggggcacctatgtgttcaacttcggacgccgcgaagtacgcaacttcctggtggccaacgccctgttctggctcgaggacctgcatgtcgatgcgctgcgcgtggatgccgtcagctccatgctctacctcgactacagccgcgaacccggccattggcgtccgaacatctacggcggacgcgaaaacctggaggccatcgacttcctcaaggaagccaccgccaccgcgtacaagaacaaccccggcgtcatgatgatcgccgaggagtccaccgcatggccgggcatcaccgcccccacctccgccggcggcatcggcttcggtatgaagtggaacatgggatggatgcacgacaccctcgagtatctgcacgaggagcccatcaatcgcaagtggcaccacaacgaaatcaccttctccatggtgtacgcctactccgaacactacgtattgcccatcagccacgacgaagtcgtgtacggcaagggctccctgtacggcaagatgccgggcgatggctggcagaagctagccggcgtgcgttcgatgttcgcctatcagtgggctcacccgggcaagaagctctccttcatgggcaacgagctggcccagtggggcgagtgggatcacgacgcctccatcgattgggattgcctgaactggcaggagcaccgtcaggtccagaccatggtcgccgacctcaacgccttctacaaggcgcatccggcactttggagccaggacttcgatccggccggcttccagtggctgaccagcgacgatgccgaccacaacacgctgagcttcctgcgcatcggcaccaagggcgagaccttggccgtggtggtcaacttctccggtgaagcctggcccgattaccaggtggcgctgcccaccggcggcaagtggaccgaagtgttcaccaccgatgacgccaagtacggcggctccgacatccacaacggcaccttcgaagcggtcgagggcgaatatcattcgcgtccgttctcggcgaagatcaccgttccggctctgggagttgtattcttgaagccggaagactgaactggtcaacaggctgaaaggtaaccggtttatttatgctcaataccacagcgcgtcagaatacgacaccgcgcacggtgctggtggtcgaggacgagcccacactcgctacggccatcgcccagcgcatcaccgctgaaggatggaccgctcgcgtggccggggacggcgcttccgccgtccaggccgcgtcccagctacgccccgatctggtaatcatggacatcatgctgccggtcatggatggtcttgaggccaccaaacgcatcgtcgccgaacgtccggtgccggtgctgatcctcaccgcacgtgatgacgaggccgacaaggtcatcggtctgggagcgggcgccgatgattacatgaccaaaccgttctccatgcgcgagctcatcgcccgctgcaaggcgctgctacgccgcgtggagcgtgcgaaggtcatcgccaagaattcggagaacgagaagctgctcgacttcggttcgatggtcatagacccggcccagcgcatcgtcaccgtgaacggcgagcaggtgcatctgacccccaccgagttcgatctgctggccacgctggcccgccgcccgaagtcggtgctcacccgcgaaaagctgctcgaagaggtctgggactgggtcgacgcatccggcacccgcaccgtcgacagccacgtcaaggcgctgcgccataagctcggcgccgataccatccgcaccgtgcacggcgtaggctacgctttcgagccgccgaccgcgtgatggcatccaaaaaacaacagcaatcccggcttgatgcgatgaaacctcgcgtcaagccggttgatttgttctcctctctgaagctggaactcagcgtactgatcgttatcgccactgccatcgcgtttgccatgtgctggttcctcctgaaattcggctggtccggttggatcgccatgccgctgactttggtggtggccttgggcatcacctatttcttctcccgcggcatcaccgctcccttacgccagatgcgcgatgtggccgaagccatggcggatggcgattacacggtccgcgtggatatcgatcaggatcgtcatgacgaggtcggccagctggctcgctcgttcaacgagatggccggcgaactcgaacatgccgataaaatgcgccgcgatatgatcgccaatgtgagccatgagctacgtacgcccgtttccgctttgcaagcgatggtcgagaacatggccgacggcgtcaccgagcccactcccgccaatctggagagcatcctcacccaaacgcagcgtctctccgacctcatcgccttcctgttggatttgagccgtatggaggccggtgcggcgagtctgaatatcgaaaagttcaacttcgccgactttcttgacgagaccatcgagccgttggaaatcgccgatggcggccacgcccacgacatccatgtcaccgtgccggccgacatctcgatggaaggtgatcaggaccgcctgcgccagctgttcaccaacatcatcgccaacgcactgaagcattcggccgacggcaccaccgtgctggtcgatgcccatgaggatgacagccaaggcaccatcgtgaccaatgtggtgaatttcggctcccagattgcaccgtccgaccgttcggatatcttccggcgctttgtcaaaggcaagacgggtcccggcaccgagtcgggcggcaccggccttggcctgtccatcgcacgttgggcggcccaattgcacggcggcaccgtcaaagtggtcgatgacacgcgaggcgccgatttcgaaatcatcctgcctaaatatcacgtcgccgaacgctgatattgtccgccgtcctaccgtatactgtattcgaacagatgttcgaatacagggtgggaggcacagcatgacacagcaatccaagtcacgaaccatgccgcacgacaccacgctgtttgtcatgcagatggccggcgattccatgatcaatgccggtattcataacggcgatctgctgattgtcgatcgttcgttggcaccagtccccggagatgtggttgcggctgtcatggacgatgaaatcgccatcaagcggctggtttcacgggccggcatcaccatattgcacgccgagaatcctcgatatcccgattacatgccgagcaacggcgcttcgcctgctatctggggcatcgtcaccgatgtcattcacccgttgatatcgtcatcggaccgtcgcgccacggcatccgccaataccagcacgcccaccaccttggtgccggcctgctgaaacacctgaacgcattgccgcacggtggcacctgtggtgacgatgtcatcaatgagaagcaccgcgtcgccatggcctatgagatcacgcttcaccctgacatgaccggtgatacgacgggcacgctgtaccgaagaggtctgctgcacggagcgtgccttggtggaggagctcagggcattgcatggtcgcgcattgacaccgtacccacgcaatgcccctgccaccgatttggccaacggtgccgtatgggcacgccctcttcggcgcattgacgcccgcgatgacggcaccggaaccaccaatacgcgatgccccaagcatgatgatgatattggcgtcttgttcagcagcgacaccatgatgcggccgaaagggccgtcaagctcggtatcgtcgtggtccttccagtcgagaatggcacgacgcgccgctccctggtaaatcgatgcggaccatatacgggctccgccaccaccgtctgtatcccgctcccggcattgtgcgaacaaggcccgacatgccgcacacaatacctcatccggcgcgtcacacccagcgcagccgcgtggaaacagcagattgcaggcctgtgcccacatcgcatgccaccacttgtatacgctcggcctgtccataacgcgtcaccatcaagctggagtatcgaatcgcgcaagcagtgcatccagcagttgtaccgtgtcttgcggattctccacacgaacaccgatcgcaccggcctcaaccgcaggatagtcattacccgtaggcgtcatgcgatcgcccacgaacaccatttcatcggcctgtatgccaagtgtctgcgtcagcttgcgcacggcataggccttatcgatgccgcattcgctgacatccacactggtgtagccgccggccctgacccgcatgtgcggcagatcggccttgaccgcttcgaccagcgcctgtttcttcgtgttatcgcgatcccatgcctgtttggccgctacgggtgcgaactgtcccagagcggagaaggtgatctggctgcccctgttctcgattcgaggcccccatacctgctgttcccacaatcccagttcccgggcatgtcgctcaagactttccgagacagcggccacggtggcttcggacagatcatgcgcatacaccaaggcccattgcgtgccatcccaccggtaataccgggagccggaggcaggcatgacatgcagattgccgcgcctggcattcggggtgagtacatccagcacctgtgaggtgaccaccgccatgccgccccctgagatcagggccaccaccgtatggtcgagcagcgcacagaaccgttcgatcatcgcgggcctcatcggctgttttgagctggccagcgtgttgtccaaatcgaaaccgaacaccttggcgttggagcagacattatcgaaatcaagttcggaccacgaacgtaccaccatttgtcgcgcctccctcgttgacgaatgttcacagccaatgaaccaatcctaacgcatgttgcctccgccatgtcctatggtgggaaccatgcttcagccaccttggaacgcacgaatctaccgcaaccgccacggtcgcggcacacgaaccccgatgttcggcacccgtctgccccgttaccgcactcgcaccggcatgttcgacgatatggtggcggcccaggttcgcaggctcggccaagcgtggccggaactgatacgtccgctccagttcgcggtggaggatgcgccgccttcggatccgacgccttggcagaccgagccgaatatgacgtcccagtgcttccccgccagccacggcattcccgcacgagtcgtgctctaccgtatgccgttgcagaccgaggcacctaccaagctcgaattgcagttggccgtcagggatgagctggtggctcgcatagcggaattgtatgggcgcaggcccgaggaaatcgaccccgattggggcctgtgacagtattgcgggggccgtgccacttcaagtaagacagtggcacggcccccgcagctatatcggcgccgaaacatcatcagaccgatgcttcggcgagcgcgctctacttgacgatggaggaatcgttccgagcccagacatggaccgtggcgggcatcagcgttgaagcgtcgatggcggacaatccggcgatgtccttgtcttgcaacgaatcgtgactgaaacgcgctccccagctcactttcttggatgagtcctccaacatcagcacgaccgcggtgccatgatcgccggaaagtttgccggtctcaatcgtttgcgccgcgttcgcatccagcgtgatttcctcggaggtcaccgaagcaccggcatcatcgtaggcgtgcaaggtgaccgtcctgcgcgcattggacgtattggccagcgtgatggaggcctttactccgtcgggaagggccaaccccgagaattcggatggctcgccggcattgaccaatgcgaaatcggcttggccggagtcaccggagcgtgtggccttgacggagaacgacacggcatcctctgcggtggacatcacgcccaacgccccatcaggagcctctcccaagtcgatcgccgtcaccttatcggcagtgacggtggcatctttggcgggaaccaatcctttgtcggtaatccatgacagcccggtgctggtgtctgccttggcgaacagataagcggtgaccgcatcgccggcagtgatggacggcgccaccgacgcattggaggcggtcggcagcggcagcgcgaaatcagaacccttcggtgtcagaccatccatggtcaccgtacgtaccacggacgcgataggagtctccttgctggaaacggtcacgaacagaccatgctgcccatcgaccgcggcggacagttccatcgaggactccccctcggccggcacagacagcgtggattgtgtggacaatgccattttcccggctgtctcggaaccccagacggcaatgtcgacggtggtcggcttggtggagggattcgagacgatgagctgctgtgtggtaccggtcgtgccgccggagagcaagaacgactggctgagcgaggtcgatacgcaggatgccgccgatacgcctctcacatcgccgtcatcggcccatgatgcgatggtgccgacggtgccggtgccagctgcggcctgcaacatacgggtattgatcaggcgagctccctgatcgatcttctgagcaccggttttcaccgaggaatcgtcggtcggatcggcgtctttcaaagtcacgtcatctgaactggacttttgcccgatcgccgagacagtggcgctgtagacggagccgaacgccgcgtagcgcgcctgtgtgctcagattgccgacagtggcctggaaggcgctgtcgccgtacgtgccggtatcggccaatcctataggtgccgggcagtaggtttcggactgggtcggactaactgtctggtcgatggcattatcggaagcggccaccttgtccacccagatattggggatgggggccatgacgagaacgacgaacagcgcaatcaacaccagcatggtgatcacaccgagcacgatgccgatcgcacgtttgaaaccagaagttgtgttgctcatgcctgctcctccaatccgtaggacggtcgtctgcgaggcatggcgaccaagcagtacaacgccgtgatcacacctaggcatatcagccaggcgtgcctccagacactatgctgtgcacgttgctgccatgaggtatccacctgctgtgaggtgctgctacgcagcgtcagacgatagtagctgccgctatccgtggagaccagggactgggtgccgttcgatgcggcgatattcgcgctcaactgttcatacggcatgtcgttcgaggaatcgccggtctcgggaaccacgtagatgccgccgaatccaagcgcgctgatggccgcgatggcctcttcgtcgggattggacagcagcgaggcacaggcctgggccagctgttcgtcaaccgcatcatgcttgccggacagcaggcgcgcccgctggaccggagagctgtcgatcagatcgccgcgcgaggtgcgcatcaccgcatagttgacgatgttgcgggtctccgcgctcacggcaagcacacgatgatcggcactggcctccagataatcggtggtgaccatgggcaggccgttttcggacacgcccagtcccgcatccttatgacgttcgatgccatacatgcattggatgccgatgcagcacaccagtatcagagcaagcaccacacggccagacacgatgagcgcatgcagacggtcccttttcggtgcgggatcgctgccggacgcatgcaacggttggaatcgcttcaccgccccaccggcgacgaggcacacgcaggcaaggaagcccaatatcatcatcgcgatgccaggctgtgcggaaccggccacgacgccatcggcatccacggctatggccacacggctggaaatcagggcgagcgcgcctccgcaaacgattaccacccacatcagccgcgaggtccgcaacgcgaacggcagcaccagcgaagcaagagcgagcagcgtgatgacgccgaacagcacagtgaccgccaaatcggcataatcggtcgatcccattcgccatcccagcgcacgctgtacggcctcaagcaggctcagcgacgccggcgacccgttggcggatgacgttggcactgtgatgtcgccgaacagttgacgccacatgcccaaatcggcgtaacgcaccgcattgacgagcgtaggggccaccgcaaaggcggcaggaaccggaataagcaacagcatggcgcgcttgcggcgcacgaacagcaggaacatcaggaacacgacgatcagcgcgaacagcagctgcggttcggcggccaccacagggatgaagcacagtgcggcgatggccgcggcctgaacggatgtgcgcggcttgagcgggtcttcggtatggtacatgcccacggcacggaacacgaatgcgaacgcggccggcaggaacaccattacggtgagcatcggcatattggcctgcgcataccagccgaacataatgccggtggatgcccacaacagtcctcccagcacacgaaccacgtccgagcgggtgaatacgcccgccagcgcccagaacgacaatgcgctcagcggcgcggccacaaacagtatcatcgccagagcggcggtcacatggccgagcgtgaccagcgaggccagcatcagcaccagcagccacggcgtgggcggcgcaggaatgccggtgccgctgccaaacacccatggcgtggtggcggactgcaccagttgagtgaagctggcaccggtggaaagcaacacatcggaatacaacgatccaccggagaatatcgaacggaacaccggccaatacatcaccacgatggccgcaaagcacaccagcgccatcaccacggctgcgctccagcgatatatggtgcgtgtccgcagatgggcacgttccagcggactgagcagcactctgccctgctgggattggaatgcatcccgacgatcatggaactgcttgatctgccgactgtcggcgaacaaaacctgcagggacgatgcggcgaccttcgactgtctggccaccagcctgcgcgatttcatgtttcccgcgatatcggccaaagccaaccatggcaggcacaattgcacccatgcttcatacggcttcttgccgaacatcatggctatggccatgccaaaactgcgaatcagcctccacagccagacgataatccaggacgacatggccaggtcagtgtacagatagcgctgttgggagcgatgcaccgtcatcgcatgattgaccgtgtgatcttccttaagcggctccccgcctcgcgtacgaatgccctcataccgtgcgcgacgatgtgatatctccgcttgcgggactaccaccacgcgtccgccgctcaggcagacacggcggcagaaatcgaccgattcgctgtaggtggtcagccaggcattgatgccccgcagtcgcgtgaattgcgacatggacaccagcgcgcccgccagcgacaccgcgaacacatcctgtcgcccgtcatactgctcctgatcgggttctccatcgaccaccagggaatgcacggcgtgtcggcctgcatacataccgacatcatgcaggtgggatccttcccaatcacactgtttgcacccgagcacgctggcccccggcgtattgcgccacgcctcaagcaatcgttcaaggcatgaggcatccgaggggcgggaatcatcatggagcaaccacaatgcgcggggagcgtcatccaaatcggcccgatccaacgcccggctgaccgcatcgccgaaggaacgcgcgcccttggccgaaacgatgtgaatggtcacatgcttggactgcggcacctccactaccggccccgatggcgagggaatgacctcgaacgaagtggttatcctcgaaccggcgcgcccggtcgcgtcggcgatgatgacgactcccggaagaacattctgcgtcaataccgaacgcaatgtagaccggaggaaacgcatatcctcctcaacggtgatcacagccgtaatgccggtatccacatcctgcctatgcgtatacggtcgagaagacatggcgtcggccaacgcctcatgaatatcgctattacctgtcggactcataaactcccagtgtacgcaccagacttgaagggggtgtgtgtggaactacgcctgctcccggtgctctcgcttatatcgacggcgttcgcgctcgctcataccgccccaaataccgaatcgctcatcatggtcgatggcccatttcaggcattgttcacgcacttcgcatttggcgcacacacgcttggcatcacgggtcgagcctcccttttccgggaagaacgcctccggatcggtttgcgcgcacaacgccttgtgctgccaagatacatcgccatcaggtcggaatagtccccacaattcatgccatggctcttcggctgaatcgtcgaccacaccccacatgcgattctccttgcctattgagcttttcatacggactaaattacacacatgcaatttcgtttttgtcaaattctttctcgtgtcattacatcatttttatggaactgtgtgctatggcgcggacacgatgccctgatgccgttgcacatgatattgtgccgttcctgcgcaggaacaccatagcgcaggaacacccggcggatgctgtgtcaaagtgtcattcagacaatcgacagtttcaggaggggttatgacgcaggaatcaggtggggcggatccgcatatcaacccgccaagcttcattcctgcgggaaatcgacgcacccgaccttccgggcaggtgccacgctccttcgcccctgcccgcgcctcacgtcagtcaggtcaggctccatcggcccgtccgtccgtcacgggaaatgacatcgaagagcctcaaccgaacgccaacgccacggcaagcgccaacgtcacggacaacggcaggcggactccgcccagtttttctccgaaaaccggacgtgccacccgcagcacggctccggatgccgccgcaccgcgcagcattccgccgtcgcgagcgcggatgtcttccggctcatcccgcaacgccgtgcgcaatccgtcggatatgccggtttcccggccctcatcgccagcagcaaacgtgtccacgaagttcagccatattggccggccggcggcggcaacggcgaaaacggtaacggcacaccggccgcgcgccttgcgcatcatcttatgcgcgattgcggtactggtggcggcgttgattctttctgttttcggtgcctggcaatgggtggacagcaaactgaaccggagcgactggctgaccgacacccccaacacgccggcctcgacctggctgattcttggctccgacgagcgagacggttccaccgattacggcggcgtggacaatatctcaggcttcagaaccgatacgattctggtgctgatcaagcctaaaagcgggccgagttcgctgatttccattccccgcgattcgcttatgaacgtcgataaccagtacatgaaaatcaatgcggtggcgcagattgccggcaagaaagccttggtaagcaacgtcgagcagattaccggccagaaaatcgaccatgtggcgcagatcaagttcggcggtctgcagaacgtggtgaacgccttgggcggtatcgaactgtgctatgacgaggatgttcaggattcctattccggactgaactggaaggcgggatgccatacgacggatggttccactgcattgtccttctctcgtatgcgatacgccgacgcgcgaggagacttcggacgcaacgaacgccagcggcaggtcatctcggccatcgtcaaaaaggcttccagcagtgggaccctgaccaatccgtccaaagtcgtggcagtgtccaatgccgcgatgagcgcactcactgtggatgaaaaaaccaacccttacacgttgctcaccatggcgttggcgttcaaaagcgccaccggctcgaatggcatctccggcagcgtgtactggtccgaccctgattattacgttgatggcgttggctcctcggtgctgctcgatgacgccaggaacaccgaactgttcaatcagcttgccgacggcacgcataaggccggcgccgtgggcaatctggcggaaggctgaccgacgctttcccggagcccatcggcttcatcgtcggcgcatgatcgccaccattgcctacaccaccaatcatgcacgggcaaaatgtcatgtggataactcggcaagctagaaccacataccttgattcgacttgcgctttcggcatgcgttcccccacgctggaagcatggcatcacagcagaacgattcgaagcgacattccgcccatacggcatccgccgtatcccgggcgaagcaccgtttgggcgcgccgccattgcgcgcccgcctgaccatgcttgccgcggcgtgcccgatgatcgcgcaggcactgatgatggtcatactgctgttgcacgggcaatggctgttcgccgccatgatcacgccaggcatattcgcctgtctcgtgtccctgctgctgacgctccccccacctccgggcccggagaagacccccgccccgcaacaggcaacgatcgatatcggtatcacggacgatgccgatgcccgcgccgcagacctccgtcatgcgccgtcgcagccgatagaatcgctgctgcacttcgcacgcctgccatggcgcaccattgtgggccattggcttgaaccccttgaccttgcggtgccgatcggcatgaccggaagcgagccgctgaggctcgatctgaaccgtcaggggccgcatgctctggtggccggcaccactggttccggcaaatccgtgttgctgcaaagctggtgtctggcgctcgcctcgatgaacgggcctgagcatctgaatttcgtgtttttggatttcaaaggcggttccgcgttccgcaaactcgaacggttgccgcataccgtgggcagcgtatgcgatctggatctggcgcatgccgtacgcgcgttgcgtgcgctggaagccgaactgacacgccgtgaacagctgtccgccgctgtccatgcttccgatatccgtgatatggtcaatccgccaccgcgcctgatcgtggtcattgacgaattccatgccctgaaggaccagctcccggattatgtgaatcgtctggtgcgtattgcctcgctcggcaggtcactgggcatgtatctgatcgcctgtacgcagaatccgatgggtcaggtcagtgccgatatgaaggcgaatatgtccgtcagcatttgtttacgggttcgggaccgtctgcaatcatgcgagctgcttggtgatggtcgtgccgccgacctcagtccggcaatgcccggtgcggcgttctgcaacgattccgaacaggtgacggcattccgctgtgcaacggcgcgcgatatcgatgcggtatgccgccagatcgcgttcgcatcgcggttcgtcgggagcccgccgcagccgtccctgtttaccgcgccacttccccggcacgtaaaagaccggactgtggccaatcacgcaccgcaacgcattcgatttggacttgccgacgatggcatcaacctgcgagaagcgacggtatccctcaccggtggcaatatcggtgtcatcggcccgcaggggcgcggcaaaaccacgttgctgaaaacattggctcgacacgccagcatggctgatggcttggcggtacgtgtcagttccccgcatcgccgggtatggggatcgcaatggcttcgcaacggccgctgcacgccgtatgccagctcggatgcaccaccgcctccgcatatcgtgtggttcgtcgacgacgccgatgagttgttcgacccattccgcaccgacgagcaggcgctgtctttcacacatgcgttggccgatgagtccgtcagcgtggtattcgccgtcagcacgattcgcccgatacgtataccagagcattgcaataccagaatcgtgttcccgtgcggggaacgaacgtctgaccttatggccggagtccccgctcgcctattggatacgatgagtcatatcgatgccgacaacgcgggccgggccgtgctcatcgagggcacatcggcatgtctggtgcagtgcgcttcgtgaaaacttcggttttttctcggcgaaacctcttgaaaatcaccacggttcgtggttaccttggtactggacttaaggaacaacaccagccacggggcttttaagggaggcaagcaatgagcagcgcttttgattggcgagccaaggccgcatgtcgtgacaaggatccggaactcttcttcccggtgggcaacaccggtgcagcctatcagcagattgaggaggccaaggccgtgtgccgcacctgcaaggtgattgatgcatgcctgaagtgcgctctggacaccaatcaggattacggcgtgtggggcggcttgagcgaagatgagcgtcgtgcgctgaagcgccgcgccatgcgcgcccgccgttctcaggccatgcagatgcaaatctgatgttttgattatcgcttcgtcatactaggaaaccctcccacttgggagggtttccttatttttgggcttcgcatcactcatcctgagcggccctgagcttcatatcaagcaccacgcgggtgccgcctccgcggcgcggctcccaatgcacggaaccaccgaaatcattggtcacaaaggtgttgatgatctgcgtgcccaaaccagaaccggaagaacgagccaatcctccctgttcttcggagccgagaccggaaccgtcatcctcgaccaccacattgaggttcgggccggagcggcccacggaaatcgtgatatggccatccttgcggccttcgaacccatgctccaccgaattggtgatgagctcggtcagcacgagggacagcggcgtggcatcctgagcgggcatcatgccgaacttgcccatgtagttgatatcgatgtgctggtctttcatcgtggctaggtccacggccatgcgcagcaggttggcaatcaccttgtcgaagtcgacgacctcgtcggcggtctggctcaatccctcatgcaccatggcaatggtctgcacgcggcgttgcgcctcctgcaattccttcttgacctcatccgacttggtcttacgagcctgaagcctcagcaatgcggagacggcctgcaggttgttcttgacacgatggtgaatctcggaaatcgtagcgtccttggtctgcagctcctgctcacgacggcgcagctcggtgacgtcacggcatagcagaatcgctccgatacgaccgttgttgtcatataagggcagcgagcgtatcgagacggcggaacggttggcgttgagttcggagtcgaccgcggctttgcccgccagcaccaacggcagggtttccggaacggggtcgttctccttcaacagctgtgtgccgagttcgctgaggtaatggccaggcatggtggtcagcaggccgagacgcctaaagcagctgatggcgttcggggctgcgtatcgaaccacgccgtccatggtcaggatgatgaagccgtccgccacgcgagcgatatggcgctggctcatcaccgaatccttgtaggggaactggcctcgtggaatcatctcgtacagctgtttgcccgcgttaatgctttccgactcatatcgaccgttggattctcgtgtggccatattggtctcacgcacgaccaagcccaaggtcttgccattgtgccgaaccggcgcgtacacgttgcagacggtcgccttgcccacggttctcaataccgtggagcggaacaccacgctggagagcatggcggcgtccaattcgccgaccatgtcatccggcatgacgtttcccaccacgtcttccgcccgtagcgtcatcacggtggatgggcggcattgttcggccaccacgtatttgccgtcaccgttctgtaccagcagcagcaggtcggcaaagctcagatcggcgatcacctgccaatcggcaacgagatgatgcagccactcgcggtcctcgtcgtcgaagtcggggcgcgttgcaaggatgtgtgaaaaatcagccatgcccctatcatacgcagacacgtcgccgccattgcggcaagccacacgggcaagtatgacgactattacgacatcgcatcttcaataccgcaccaatcgcgttgcacggctgcccgccgttcaggcggtcatcgcctcatacacctgagaggacaatgcggcgatctgctgctgcgcggttcccgagaccactcccgaggtcataaccaccatcacataatcccgttctgttccgtccgcggccttgccccacaccacggcggcatcattttccacgccggccagttcaccggttttattggccacctgaatgccagacggtactccggcgggtattttggcgcgtcgcgtctgcccgagcaatacgtcaagcatggagcggctggcttcggcggaaaccagtttgcctcggtacaatgcagcgaggaatctgccgcaatcggaagccgacgtccagttctcggtgccggtcccgtctgtgccggcatcggacaacacccgcaactgcttggatgagctgaagccgtatcgggcggccgtaccagtcacccgttgcatgcctgtggccatgtcgccatcgccgaccatcaataccagctgattggtggcagcgttcgagctgacggtgatcatctggttgatcagcgaggtggtatcttgcccgcccgcggccaaggtgccggcatgttgcttatcgtacacggcaagcatcacgtacagtttgatatccgaagccgccaccatgggctggccgccgacgctcacggttttgcccgtggccagatcctcgacatacaccgaccaggtgcctccattgccggccacagctgccgtgaccgccgaggacacatctgacatccgcttctcttccgccaccgtggtcaggtcgggagcaggtgccgccttgcgctccaaggtgacatgcacagggcgttgttcgtgtttcgatgacgccgttgacgacgatgccgacgctgttgccggtgagtccgatgccgaggcgacgggcgatgttttggcgtgcgatgcgccgagaccgttatgcgcgtacatccatccaccgacgccgattaccaaagcggcgatcagggcggcgatcaggatcaatcccacgacgctgcctgttgcacgcgtgtcgctactatgcttggtatgccgagccaccgtcactgccccaatgtcttgtcaacactggccagcacccggctcatcaggtccgcggccaccgactgcccctgatattgggtgacaacggccacggcggccttatgaccattggcttcgacgatggcgaagtaattccaggtgtcctggatgccttggcctcggtgggcatgcacgatcatgtcggacggaatggttacgccttcggaagcaatgtccacgttcatcaatgacgcgcctcccttggcgtccactgcggcgagcatgcgggccgcatcgcgggaggaaccgtaattctcataaccggcattgctggccgccacatcgccgaaatcgcggttgaacgaggtgcccttatacccatgcgaagatgcccacgaattgacgccgctccagccacctaccgccgcggccgccatattgccggcattgttgtccatggaacccatcatcgcgtttgcctgcgctttggcgttgtcatcgccattgtcctgggccgcaagatagaccggcagatagagaccggcagccacgaattgcttgccggactgcgacgtggtcgcgatggtggcgtcctctgaggaatcggcgtatgttccatcgatgaccatggcggagacggccacatcggaggacgagtatgaatccgcgatgtcagacaactggctggatgtgatcaccggagtggaaggcttcgacttctccgtcgagcttttcttggacgaatcgtcgctgttcttgtctttggcgctatcagacgtgttcttcttggccttggacttggcgtcagaggaatccgtcgtgccatcatcggcggaatccgacgcatcggacccggtcgactgtaccgatgtttgcgcctgcggctgagctccccacaatcccatgctatgggtgacgaacaagccgatgaccaacgccacgacgcaaatcagcgcgatgagcacaatcaccaccgctttggtgtgatcgccgccaggacgcccggcgggaggttcaggagaagcaggtgccgcagggccagcggtcatgggtcccggtgccataggccccggcaccgcggaacccggcgccgttggcggcgcgacggcgggcaacggcgccgccggctgcttcaccagcgtcagcgcgttatcgtcataggcaggggccgccggattggcctcgggctgctccaatgggcttccgcactgcgaacagaaggcatttccttgctcgttggcaaacccacactccgtgcaatacaccatcaccgaaccccttattgctgtgacgttctcatcttcggattccatagtatcgccaccattgggtaatagtgttcgtgtgagtcggtattgacaagcataaaagttacgctaacgtaggttacggcagcgtaagaagcgtatcgtcaactcgtgaaacgggggcatcaccatggcatcaacaaccgacgacgcggaaaagacgatgcatcacgacgctcataacagcgcgacgattgcagaggatgccatcatcgcatccaagcgtcaggcggctatcgaggcgcgcgaacaggcgttgcaggccaaggctgatgccgtacgggccaaggcccagttcaaggccgaggccattcgagccaaagccgaggagaaggcccggcacaagctcgccaaagcggagcaccgtgcgctgaaaatcgagggcattgcccctgcggaagtggaacgcaagattcgtctcgacgtgcacggacgaccaaagccgttgatgcgcggctggattcacgcgattgccgctcccctgtcattggcggcaggcatcgtgcttatatgcctggcacatggcgcgagtctgaagtgggcgtgtgccgtgttcatgacagcgtcgctgattctgttcaccaattcggcctgctaccatctgggcgattggagcccgcgcgtcaccgatgtgctgcggcgtatcgatcatgtcaacatcttcctgctcattgctggcacgtataccccggtttcgtttgcgctggaaccgttctggcgcaatgtgatcatcatatcgatgtgggcgtgcacggccatcgccatcgtgattcatgtgatctggatcaatgcaccacgctggctgtatacggtggtgtacatcatcttcggcatctacggcctggcttatatggtgatgttctggaattcgccgtatgcggggccagccgtggtggtgctgctgtgcgccggcggtgcctgctacatcctcggcgccatcgtctacgccttgcgcaagcccgacccttggcctcgcgtcttcggcttccatgagattttccactgcggaacggtggccggatatgcctgccatatggtggccatctacatggtgatcgtctcgctgtggcaataaacgctacgacatataagtatgcccccgcctacgggggcatactagtcacttataactcaggccagcggcttggcggccttgaccgtcacggacagctcgcggccgttcggtgcggtgtaggaaacgacgtcgcccaccttggcaccttcgatggccttgccaatcggggaatccggggtcatgatgtcgtagtcggtgccggccacgatgtcacggctgccgagcacgtaggtcatctcgttgccgttgagctcgatggtcaccacagagccctcgcccacggtgccttccggggcattctcgatgatcttggaatcgcgcagcttgacggtgagctcggtgatgcggccctcgttcttgctctgcgcctcacgggcggcctggtagccgccgttctcggacaagtcgccctcggcacgcgccacggcgatcttgtgcgcgatttcctcacgcagctcgccttcacgatgggcgagctcttccttcatcttgttgtatgcttcctgcgtcagcaggtagaccttgtcctcagccatatcgtcctcctgaaccgttgtcgatgctgaaacaattttcgttatttatgacaaaacgccggctatgaccccggcgttcgtcatgtgctgacctatggtcagcgggtggaaatgatgtcgatgacgaacaccagcgtgtcctcgccgccgatgccggcctgcgggatgccgcgggaaccgtagccgtattccggcggaatggaaaccaccagacgcgagcccacgttatggcccggcacggtctggtcccagcccttgatgacctgtcccacgccgatgccgaagctggcgggctgatgacggtcgaagctggagtcgaatggggtgtccttaccccacaccacgccgtggtagttcacggtgacggtgtcgccgcgacgcacgatcgggccgtcgccctcggtcagctccacaaccttgaggcccttcggggcttcgggcgccgggaactcgataacgggcgtggtgccgaattcggcgttcacctgaggcatctgatctgccattagtcctccttcaaagacacaatgcgccctaccttagcaccatcggcgaatcggcggtagtccttcatccctgtgcgatacgacacgctggccgtatacgtcgattccggtcatcatgctggtgaataccagacatgtcaatcagcattcgacgacattgacggcaagcccgcccttggaggtctccttgtatttggccatcatgtcttcaccggtctgcttcatggtttcgatggcctgatcgagggtcacgatgtgtgagccgtcgccgagcatggccatacgcacggcgttgatggcggtgttggcggccatggcgttgcgttcgatgcatggaatctgcaccagtccgcccaccggatcgcaagtcaggcccaagttgtgttcgatgccgatctcagcagcattctccacctgttccggcgtgccgcccatgactgcggcaagtccggccgccgccatcgaacaggccgagccgacttcgccctggcaaccgacttccgcaccggaaattgaggcgttgcgtttgaacaggtatccgatggcaccggcggtcagcagaaacgtgaccacgccctgttcattggcgttgtccacgaaatgccagtaatagtgaagcacggcgggaatgatgccggcggaaccgttggtcggagcggttacgatgcgcccgcctccggcattctcctcagagacggccaaggcgaagagatccacccatgcggcgtcggaagactcgagcacggcgtctttgcgccggctatcgcggcgcagcacatcggaattcgaagcgagacgccgatacatcttcggcgcgcggcggggtacgtcaaggccaccgggcaatgtgggctccgccgaggtgcatccgtggtccacgcaggcgcgcataacacgccagatggcatcaatatcggatcggacctggatgcctgagcgtgaagcggtttcgttggcccatacaagttcggcgatgctgagatgatgttcccggcacaacgacaccagttcggcgcatgatgagaacgggtagggtgcctcgacgccgaaatcagtggatgatgattcgtccgcgtcggcaaaggaggtgccttccggaggacgttcatgaatgccgatcatcgggtcttcgggagcgcctttgcgcacgaatccgccgccgatggaataccagacctgttcgtcgaccaagcttgcggcggcgtcgaaagcctggaatcgcatgccattggggtgcgcggccatgcgcttccattgttcgaacaccacgtcgcggtcgtagtcgaaatggatgcgtttgaggccggcgaggttcagagtatcgtccaacgcgcaggtctcgcggatgcgcatcatgtggtcggtatccacggtggccggcagattgccttcgagcccggccatcgcagcacgatcggtgccgtggccgagaccggtcagcgccagagaaccgtaaagcgtgattttgacacgtgcggtgcgatcgaccaaatggtcggccagcaacgaggaggcaaaggcatgtgccgcgaccatcgggcctacggtgtgcgaggatgaaggtccgacgccgatggtgaacatgtcaagcacactgaacatttggctccttctcccctgctggttcggcatgccggtgtcaccaggcgtcatgccatcacgatatcgtattccagcctagcgcccggaatctttcgctttgcgcgatgatggccgcgcgcgtcgtgccggcgagcgataagtcagtcagtgagatagtgcggagaacatcataaccagtacgatgataccgatgatggccaatacgatctgcaccaccatcagcccgatggtcagtcccttcttggtggcgattttgggtgcgtacgcctgtgccaacaggaaggcaatgaagccgaacaccgcgtagttgacggtcagggccatcacatcgctgttcgacaacaccacgccgttcagcggctggttcagcgtgttcatcatcgtgctcatcacgaacatgccccacacaccgtagccgattaatccgacgacgccgtacagccatggcttgagtttgtcgttggcacgcagggtcagggcttcggcacaccacaacagggcgaagccgacgatgtaggtgaacgccacggcgatcagtatcacgatagtcgcccacggcaggagtgcggccacattgccgatcatggacagatagaatcccgagcaggcgatggcaccaacggtgagtgcagtgcccgcaatgacggcttgggcaagcatggtgggcagggcgccttgttcgactcgttcgacatcggtccagcgtgaagccatgtggattcctcgtttcatcaggtacatcgtcacaacgccacatagcctaacggccttttgtttcggccttataagctctccacatagtaagctgcgagcccctctgacgaggggagctgtcggcgaagccgactgggggagagaccgcggcacagccgcaaaaaacggcatcggccacaggccgatttcaaggtgcctccggtgggactcgaacccacaagccgaagcgatcgattttaagtcgactgcgtataccatttcgccacggaggccaacttttctattataagctatctcctgccctgagcattgcttgcgggttgctgcgcttcgtgcagccgtcgcggcatagccgctcccttcgcctacaaacagcccagtgggctgtttgtagcagccggtagcgatagcgtcgccggcgtcgcatataacgcaaacagcccaccgggctgtttgcttaacggctcagcccgctggaggcacttaccacttacgctattgagccagcaaccggcgaccataatcgagcacaatgccgtccagcagcccgtgttcgctggcgacgaacgaatcgatggcttcaccatgatcggccttggcggcttcgctgacacgcgccagcacacggctccagaccacagcgccgccgccgaccacatcgatacggccggggtggatggtcttgtattcgcggcgctcggcgcgcgtcatcctaaggaacttgtcgtccacggcataggcgtcttcaaggctcaaccgatgcccgtcgaccacggtgtgatcgtattctttcaatcccatagccaaggcggtcatcgtggtcaccgtgccggacacaccgatgatggtacgggccttgcctgcgtccacggtgcggaaggcctcatcgatatgctcgtcgatgtccgcaacggcctcatcgatctgcgcctgggtcggcggatcgttggtcagatgacgttcggtcatgcgcacggaaccgatgttcatggagaatgcgccctgaacctgggtggtgggcgcactgacgccgtcgccaccgatgaccagctcggtggacccgccgccgaggtcaaccaccagatagggggcgggcagatcgtcgcgattgaccacggaagtggcgccgaggaagctcaggtcggcttcttcagtgccgggaatgacttcggggcgcacgccgaggatacgttcgatctcatcttcgaattcctcgcggttttctgcatcgcgagtggcggaggtggcaacgaaacgcaggccgtcgatgggatgctcggcaatcgcaccggcgaattcccgagcagccgcataggcgcgttccaacgcttcgtcggcaaaacgatgggtcttgtccacatcctgaccaaggcggatcacacgcaggatgcgcggcaccacctcatgcatgccatcggcatcgacacgtgcgattttcagtcgaatggagttcgtgccgcaatcaatgccggcgacggttacggattccttgctcattgccttctcctcgtatcccttagtgcgtatgaatggactgttcgcggtggctcatctgttgatcaatcatccagcgtgcagcggcagacggtcggatcgaattcgtctttgacgcgttccagcaccaaatcgccaatggggttgacgcccggccccataaccaaggactgggccagcagggcatgcaggcacttgacgcgcaccggcatgccaccggccgaagtgccttcaatatgctcctcactgtcgccaagacggcctgccagttcgtggcggaatgccagatacaggttatgggcctgctcatatgcggccttgagctcctcgtccgaggccaacatgtcgttgtattgctgcatcacgccggcggcctcgacgtgggaggcggccttgacggcttccggaccggtcagatagcacgtggtggggaaagggattccgccgggcaacaccggacgggtgattacggcaagtggcctaccgcagacgcatcgcgcccccacggcgaccatgccgcgcgggtatcggccgagctgacgctgcacctggtcgatgtcatggtcgttggcgggctcggcaagcatggtgtcgacaagggccttggccttggcggcgatatcgatggtcactgttgggttccctcccctgtgttttgctgggtgttctgatcggatggggtgttctggtctgacttatcggactgcttggatgagtcgttggatgacgagtcagaggaaccggaagtatcggatttgccggactcgctatcggtcacaggctcatcggcctttttgagcgagtaagacagttcgctgtaccatggcaggacttttttgttgctggtattggaatcttccgttttctgggattcgcgatcggagccggtcacggcttcgggatgcagcacacgcacggcctgttcgccggggaatacgaagccgaggcgttcacgggcctgggcggtgatgtaggccttgtcatcccaacgcttgatatcgttctccaactcctgcttttgggcgatcagcgaggcttcctcacgcttgaggccattgagctcggccaggttcagggcataagtgtggaaggtggagaccagctggatggtgccgagtgcgatgatgaacagggagacgaagaacgctatgggccccgccgacccttttttcctgacttgtgctttgccggttttgccaggtttgccggtacgggacgacttgctcatgtcacatgaaaatacccgccgcattcgacttgacgaacacgacgggtatcgagcttcagtggaaactcacgcctttacgggcgtttcagctcacttggccaagtacttcttgcaggccttgaaggcgctgtagccggcgtactgagcggtggagccgagctcctcctcgatctcgagcaggcggttgtacttggcaacgcgctcgccacgggccggggcaccggtcttgatctggcgggtgttcttagcaacagccaggtcggagatggtggtgtccggggtctcgccggagcggtgggaaaccatggaggtgtagccgttggcggtggccagctcgatggcgtcgagggtctcggtgacggaaccgatctggttcagcttgaccagcagggagttggcggcgccgaggtcgatggccttctgcagacgagccgggttggtgaccagcaggtcgtcgccgacgaactgcagacgatcgccgaggcgagcggtgatggcagcccagtcttcccagccttcctcattgaacgggtcctcgatggagacgatcgggtactcgttgatgaggttctcgtagtagtcgagcatgtaggcggagtcgcgctcttcaccgtcgaagcggtacttgccggtctccttgttgtagaactcggaggaggcgacatccaggcagatgccgatctgcttgccaggctcgtagccggcggcggagatggcgtccatgatgtacttgagggagtcctcgttggacttcatcttcggggcgaagccaccctcgtcgccgaggccggtgttcaggccttccttcttcagaacgttcttcagggtgtggtaaacctcaacgccagcgcgcagagcctcggagtaggtgtcgaagccgtacggggagatcatgtactcctgaatgtcggtggcgaagtcagcgtgagcgccaccgttcatgatgttcatgttcgggaccggcaggatgtggccgttggtgccgccgatgtagcggtacagcggcaggccggcggactcggcggaagcgtacagagcagccagggagacacccaggatggcgttggcgcccagcttgcccttgttcggggtgccgtcgagctcgatcatcaggtcgtccagagcgcgctggtcagcagcgtccatgccgatgaccttcggagcgatgacctcgttcacggccttgaccgcgttaagaacgcccttgccgccgtagacggacttgtcgccatcgcgacgctcccaagcctcagcttcaccggtggaggcgccggacggaaccagacccttgccctgagcgccgtcttcggtctccaggtagacctcaacggtcgggttgccacgggaatccagaatctgacgcgcgtacacgctttcaattactgccacaactactccttaaaacggttgtgtatcttgaatgacattcttaagagtagtgcgatttgtggacgttgtgaacaacacgcccaaaatttattgttagcgctcacaatgccgatgcgccgcctgattgcaaggcagtacggacgaaatcgctcagtcgacgtccttgccattgaggtagtcgatttcactgtcggacaatttcagttcgctggctttgaacgagtcctgaatctcctgcgggtttctggccgagggaatcgtgaacagatattggtattgcgcaagttcccacgcgagcgtgacgcgctggtaggagcagtcgtgggacttcgcgacttcgcggaaccggtcgaacagatgctcgttgaacgggtcaaggaatccaccgagcggcgaccagcagacgaaagccaaaccgagtttttcgcaggtctccaacgtgtgttcggggtcgcggtgaaccggggagaactggttctggacggccacgagacgatcgcccaaaatgttgtgggcggcttcgatgtccgcgttgtcgattctggagataccgaccgctttggccacaccttcgtccacgagctgcttgagtgcgcccatctggtcttcgtacggcacctgcggatcattgcagtgcgagtagagcagatcgagcgtatcgacaccgaggcggcgggctgattccttggcattggcgatcatggtttcgggtcgggcgtcggcctgccagccgtagttgccgttgccgtcaagcgtgcgcagccagccggttttggtggctacgagcacctgatctttggggccatgccacgagtgcagagcatcgcggaccagatattcgccatagcccatatcctccggttcgccggtgccgggtgcgctgggcagataataggaccaagccgtgtccaaataacggactccggcatcgagcgcggcatggatggtctcgatcgcctgatcacggttggaggggcgcccctcgatggcgagcgccattgtgcccatgccgaggcggggaatctcatagccggcaagtgttgccgcgtgttggtttttcatcgttgtggcctccatgccaagtcatcgaggagttggttagtccagaggactacctggtcggagctcatggggccttggcccagggaaccggtgaacggggtgggtacgatgagctggtgggtgaccgggcggtattgggcgcctttgtaaatacggcccatacgcatctggatggattcgggcgggtcgatacggccgatccgcacgcggttggattgcgcgagaatctccgaaatgccgagcttgcgggccttgaacttcagacgggccacgtcgaacagggtctcgaattcgaccggcggcttgccgtaacggtcggtaagctcctcttccagatccttcaaatcggcctcgttgcgagcggaggcgagcttgcggtacgcttccagacgcagcttgtccgaatcgatgtactcgatcggaatcgacgcttcgatgggcaggtcgatggacacggccaccggctcgacgttctcttcgggctccttgtacttctccacggcttcggacaccatgcgtacgtacaggtcgaagcccacgccctcgatatggccggactgctcgtcgcccagaaggttaccggtgccgcgcaattccaagtccttcatggccacatcgaaaccggagccgagcgccgtgttctgcgcgatggtggcgagccggtcatgggactgctcggtcatcggcttggacgggtcgtacaggaagtaagcgtacgcgcgctcgcggccgcgaccgacgcggccacgcagctgatggagctggctcaagccgaaacggtcggcatggtcgacgatcagcgtgttcgcgttggatatgtcaagacccgtctcgatgatcgtggtgcacacgagcacgtcgatgtcacgatgccagaagtcgcggatgatctggtcaagctgcttctcacccatcttgccgtgggcgatgccgacgtgcgcttcgggcaccagcgtatggatcttgtcggcgatggacgcgatgtcctgcacgcgattgtgcacgtagaacacctggccgccgcgcaacagttcgcggcgcaccgccgcggtgacctgcgcgtcctcgtaggcgcccacataggtcagcaccggcaaccggtcttcgggcggggtggccagcgtggacatctcgcgaatgccggtcacggccatctccagcgtgcgcgggataggcgtcgcggacagggacagcacgtccacgttggtgcgcagggctttcagcgtttccttgtgttccacgccgaaacgctgctcctcatcgatgatgacgagccccagatccttgaacttgattttcgggttcagcagcttgtgcgtgccgatgaccacgtccaccgtgccggtttccagaccctcgatggtctcgttgatctctttggtggtctggaatcggctcatggccgccacattgaccgggaaaccctcgaatcgttcgctgaacgtctcgtaatgctgctggacaagcagcgtggtgggcacgagcacggccacctgcttgccgtcctgcacggccttgaaggcggcacgcagtgcgatttcggttttgccgaagcccacgtcgccgcagatgaggcggtccatcggcacgggcttctccatgtcggatttgacctcgtcgatggtggtgagctggtcggcggtttcctgataggggaaggcatcttccagttccttctgccatggggtgtccgggctgaaggcgaagcccctggcgcgctggcgggcggagtacagcttgatcaggtcgtcggcgatctcgtggacgtgtttgcgggccttggccttggtggccgcccagtcggagccgccgagcttgttgagcttgggggcttcggcaccgatgtatttgctgacctggtcgagctggtcggtggggatgaacagtttgtccgccggggcgccgcgcttggaaggcgcatattcgatgaccaggtattcgcgagtggttttgttggcgccggtgccgatggtgcgctggcgcatttcgatgaaccggccaatgccgtgctgctcgtgcaccacgtaatcgccttttttgagttccaccaagtcgatggccttgcgccggcgtttcggcgttttggccacggccacggccgaagtgcggccggtcaggtcgcgttcggtgagcagggcgattttggcggctttgtccacgaagccgtcgatggcctgagagcggatgacgtcgaaattggcgatgccggtagtgttgatcgcgcgcctgagcctggccaaggtgccggccgcagcggcggtgatggtgacgtggaagccggcgtcgagcaggccttcgatgccttgggaggccttggcctcatcccctcggaattcggccgggttctgggcgtcgagctgcacatggccggtcagcgtggtgtccacgccgaaactggtgaggcgaatcaccggatgttcggagtattcgagggagctgatggtttccgcatagtcgaggaagctggcttcgtcgaagctgatgggcgcgccggcgccgtggccggaggcggccacatgccagctggcggccaggaactcgttcgcggtttttgccaagtcttcggcggaacggcgcagtttctccgggtcgctcaggaggatcacggcgtgcttgggcagcatggagcccaccggttccagatggtccacgagcgcgggcatcagggattccatgccttcgaccggaatggcgttggcgatggattcgagcatgtcctcagcattgggaatcgaaccgaccaaggctttggcgcgggcgcgcacggcgtcggtcagctgcagttcacggcatgcggtggcccagatggtcttgaggccgtcgccgtaggtacgctggtcggaggcgtggaattccttgatggtgtcaatttcatcgccgaagaattcgatacgcaccgggtgcggtgcggtgggcgggaacacgtcgaggatgcctccgcgcaccgcgaactcgccacggtccatgaccaggtccacgcgcgtgtaggcgttttcgatcagacgtttggcggcttcgtcgaggggcaggtcctcccccacggtgaacacgagcggctcgacgtcgcccagtccttggacgaccggctggatgagcgagcggatcggcatgacgagaatgcgaatcgggccgaacatcggatcggtatcgctcggatgcttgagtctgcggaacacggccatgcggctggccacggtgtccgcgcgcgggctcagacgctcgtgcggcagggtttcccaggcttcgagctgggcgatgtcgtccgggtcgccgtcataccaggagcgcagcgagcccacggtctcttcggcttcgcggccggaggccacgaccagcacgaccggcttgccgggtttgccggtcacaccctgcccgatggcggcggccaaagccgggcgcaagccttcggaaacaccggccagaacggaattgtcgatgtcgtccgaaacctcgatgtcaccagtggcgagtctaaggaaggtcttgtcctgttccagctcagacaggatgcctaccagtgagccgttgatcaggtccgggtgcgtcgcctcaccggccattgaacttctcctgggtcttggcaagaccgcggaagatgatgtcctcggcggcgtcggcgccgtcagccaggaattcgggcagctgcttgcgctggtccggaccgaatccgcccagcacccagttcaccgtgttgtcatgcgcgttcgcaccgcgcttggagtgaccgacgcccatgcgcacacgcgcgtatttcggcgtgccgagggaacggtcaatcgacttgatgccgttgtggccccctgcggagccgcctgccttgaccttgatacgaccgaattccaagtccatgtcatcgtgaatcaccacgatatggtcgggctcgatctggtaataggcgctaatggaagccaccgcattgccggaatcattcatataagtcagcggcttggccagaaagaacttgacggtgcggccgtccaggttcatcacgcttttaccgagcatggccagacctttgtggtcggcgaagttcaccgtccaacgttcggcgagcacgtcggcggtcatgaagcccatgttgtgccgcgtgtcctcatattttttgccggggttgcccagtcccgcaatcagccagaaatccgatgccataatccactcctcgtccgtcttcctatattcccgtatgcacgttctgtacgttccgtacgtcatgcgcgcgttcgcctcgcgcactggcccatgcccggccggattcaaccgtcaagattgtactcaacgccgccgtcaagccttggaatcggcaagcagcagggcacggcattgctcggcatccatcgatcggaccgatgaatggtgaaacgcttcgacgtcacgagtcacgatgacgtcggcgtcattgtcctcggcaacggcacggatgagcccgtcctcgaagtcgggctcatcggaccggtacgacatacacgcatggcgttccataagtggacggatgtcgaacaattccatcagtccaccgatatcgtctcgcgccgcccgctcctcgccataatgcttgcgcaacacgcaatacacgtcattcaatgacgataccggcgccatgatctcaatgtttggctgtgcaacggcttccatgagcaaatcaacacattgtttatggaaaggcgctcgtttgtcattgcacaaatcgagcagaatattcgtgtcaaacagcagtttcatcccgtcccccaaatcgttccatacgtgcctgcgcgagaatctcctcatccgaaagatcgccttccgcctccggcaaattccggtcggcgaaacgttgaatcaactcctgctttttcctacgctcccgctcctgaatcagggagagcgtcagacgctcgaattccggcagttcccccgtatccgcaaggtagtcggtcagatcacgaatcaggtccgaataggtgcgcccattacgcttaagcactttctccgcgtcgcgcttccgttcggcattgacgcgcgccgtcaccatggccatagtcatatcgcacctccttgtaataccagtattacaagagatggagacgagtgaatcgcgtctattaggcggtgtcgccagcgaccttttcgcgctgtttgccgttgaggtaccagtaggccagcgccacgaacagggccgccgaggatattgccgagcgtggctgcggacaggttatagaggattcccgacacgtcgagcgccgcgacgcccgccgcgtcggcgccgaaaccaaacgttttggcgaccaggcccatcggcaggaagaacatgttggccacgcagtgttcgaagcccatcgccacgaatccggcgatcggcagcaggatgcccagcaccttgtcggatacggagcgcgcggcgaatccgatgcgcacggccaggcagacgagcacgttgcacaggatgccgcacacgaacagcgtgtcccagcttggcgtcactttaacatcaactccggttggaaaaaatctcagtatgtagcattcggttctcaaataggagaaacatgcagcggcaatcaacaacttgtcgtttacgacgccaagcaagggaaacagctcagacagatgacgcttccctgcaatcggatgacatattgcgggacggcagcggattttgggcgttcttggcgtggcatcccgcaagcgttatcgcacgttatctgcaccgaatcataagaatggcagaattccaatgatttcgcaggaagagttgcgggacgcgagctatgtgcatcgtttgacgtgtgtggcatcccacgtgattgcgggataccacgtcaaaacggacgaaaatcgcgtgccgtcccgtagtttgccgttatctgggataagcgcgtccgatatatggcgttcgaggaaaagagctgatccgatacaactttttagtgttataggacaccggaatccatggagagcaagggtaaaccgcctcgggcctacaggtccaaataccagtaggacatgtcccgcatggtgccggtggagtcggtggcagcggcgggcatgaggccgaattgggtgaagccgaagcggcgcatgagggcaatggagccgacgttatcggcgaaaatgatgccacaggccttgcgcatgtggcgggcccgcgcctcggtgagcagcctgtcaagcatgaacgtgcccactcccctgccttgccatgccggatcgatgtaataggccaaatcggtgacgccgtcatacccggcacgatcgtagaacacggagagcgcaccgaagccgatgattgaaccgtcttccgattccacaataaaaacgccgtagggcggcgtatgggattcgacccaggcgcggcgttggtcgagggtgcgcggggtgaggtcggcggtggccccacccgccaccaccgcagcgttgtagatgtcggtgatggcttggatgtcggattcgacggccggatggaaggtgtatggcatgaagttcctttgaatacgcaaatagcccgtccttatgataaggacgggctatgtcagttgaggtaaccgactcccttcagtcgccttcggcgatagctcccctcaccctgagggaagccaagttacttgtcgagctcgatggccttgttgagggcgtcttcaagctcctgctgcgccttgccgtaggcggtccagtcgccgttcttcatggcggactggctgtccttcatggcttgggcggcatcgttcaacgcctgctggagttcggggctgcggtcggaagacgagccggaatccgactttccgtccgtggtgccggactgaccaccattggtatcggaaccagattggtcaccggacacgttctcggcatcgcccgcggccgcaccggaattgccaccgaacacctgatccaaggcctcatccaacgtatccgcgaatccaacctgatcaccgaatgcgaccagcgtcttcttgagcaacgggaatgaggtcacgcccgaagacttgacgtacacgggctgcacgtacaccagtccgccaccgagcggcagggtgagcaggttgccgcgcaccacttgcgtgtcgccggattgcagcaggttcagttccttggatacatcggcgttggcgttgaagttgttctgcgcctggccggggcccggtacgttcgaatccttgggcagctcctgcaatcggatggtgccgtagttcgagcctatcttgcccttctcattgccggcatctgagtcgaccgacaggaagccggtcaggatctcacgggtggactggccagccggaatgtaggtggaggtcagcgagaacaccggttcctcggtgccaccggtctgcaaggtcaggtagtacggcggctgcaggatgtcctggtcctgctgggactgggattcggtcggatcgaccggcgtctgccagaagtcttcgcctgagtagtactggctggcagaggtcacgtggtacttggagagcagctcgcgctgtaccttgaacaggctttccgggtagcgcatgtggctcatcaggtcgccggagatatcggagagctggtggtactggccagggaagatcttctcccatgccttgatcaccggatcggattgatcccacacgtacaggtccacggaaccgtcgtaggcgtccacggtggccttgaccgagttgcggatgtagttggccttctgagagcccagggacgagaccgttgcggaagagacggtggtggaatccttggtggcggagccgaggtcggttatttgcgagtacgggtaggcgtcggaggtggtgtagccgtcgacgatccacttgacgcggccatcgaccacggccggatacacgcggccgtcaagcgtcaggtacggtgccaccttggccacgcgctccttgggggaacgatcgtagagaatctgcgattcgctggtcacacggtcggagaagagaatctgatcggagccgaagcggatcgcgtagagaatcctggagaacaggttgccgaccgaagggccgccgtcgcccttgaacgtggtcagagcaccttccgaaccggtcgggtagtcgaactcccaagcctgcgtgccttcaggggcaccgacaatcgagtattcggtggtgttcggcgagaagtagatgcgaggctcgtacttttcggattcggtgagcttgccctgggtggggatgccggattcgaagaattcgggctggccgtcggcggtcaccttgttgccgtaggcggccaccacgccgtaaccgtgggtgtacacggtgtggtcattgacccagttgcggttgtcattgccggccagatcgagctcgcgggcggcaatcacggtgtcctgggagacgccgtcaatctcgtacttgtcgaccgccagggtgtcggcgaaggtgtagtactgcttggactgctgcaactgtttgaacgtggggctgacgacctgcgggtcgagcagacggatctgcgcggtggtgtcggcctccttggccagagcgccctgctcacccttgtcggtcaccttgtattgctcggtcttgagcttgtcaagaccgtaggcggcgcgggtggcgtcgatgttgtgctggatgtaggtggattccatctcctgtgcgttcgggttgacgcggaagcgttgcaacagcaccggccatgccacggtgagtacaagacccaccacgaccacgacggcaatggaggtcaccggcacacgccaggccttgagcgcggcggaagcgcgcacgccgatggacgcctggccttcgagcgtgtgggagcgcatgagccagatgcccagcaccacgccgaggatggcggtcagcacggccatgatgaaggtgacggggatgttggcatgtacggcggtgtaggaggcaccggtgatgcgtgaaccctgcacggtgagctggtcgaagacgccaatcatctggcgcactgcccaagcgaacatgttgagcatcagccagatgccaagctggcgacggcaacgcttggtaatggagaacaggccgcgtccgttaaccggcatggtaatgcggataccgcccatcagcacatgcgtgaccacggaaaacacaaggcccacgcccagcagcatggccacggcggcgagcacgagcttcaggcccggcagcacgaacacgtagaagccgttgtccagaccgaactgcggatcggtggtgccgaacgactgcgcgttgaacatgagcagaatctcgctccagttcgcgttaaactgggaaccgaagatgacgccgacgatcagcgaaatcaccacggccacgcggcgagcggttttcgagctgacggatttgccgacctcgaccacatcgccgttaatgcgaatggtggaaccgtcggccgaatcagggcgtgctcgaatggccagccaggcggaaacgaagccggtcagggccatgagcagcgcgtaggccacccacagaccgattttcaccccgagctgggtccagaccacggactggaagccgagctgaccgtaccacatcagatcggtgatgaatcgggacaggccgaagaacagaccgacgatgatggccaaggccagcaccacgccgatcagaatcttgctgccacggctggctcctgagccaccggacgctggcttacgggtgatacgcggattggccggaccacgtggagggcgggatgacccggaggggccagcgttggtgttgtgggccggaccgtccccatcggcctcgacatcgaggatgatcggatcgtcattgttcgcattgttgcgtcgtgaatcgccgccattgccgaacagtactgagaaaggatcgttaaaagacataactcaagcctatcgaaagggcgggaggtcggttatgccctgagcacagaatgaggcaacatcctgttctacgctctgttctacgcttgccggtatggacagacaacggccacaacatatgcgtccctcagcacacgccacacgccaacttcggcacaggagcattccaatcgtggcggcaatatgtgctttggcggtggtgttggccggtgtggcagtctacggatggcatgtcggatggttcgccaaatccacatcaaacggcaacaccaccactccccagacctcccagacgagtgcgttaccgcgcaccgacgttccttccccgaagaagaacgacgatccggcggcacaagcccaacgtgcggtatccgccatgacgcttgaggaacgtgtgggacagttagtgatggtgccgttgttcgccggttccgaaccctcctcgttggcttcaacaatcgccgacgagcacattggctcggccattctcattggcaattggaataccggcgtcgatacggtcaagaccgcgaccgcgcaactccaaggatatgcgccggccggcaatcgtctcatcatcgccaccgatcaggagggtggtcaggtacagcatctgactggtaccggtttcgacacaatgcccagtgccgttgagcagggcacaatgtccgctgacgcattgcgtcaatcggcaggcacgtggggttcgcaattagccactgctggcataaatgtcgatttggcaccggtgcttggcacagtggttggcaatcgtgcctcaaatgctccgattggcgcgctggatcgtgatttcggattggatgcggccggcaacgccgaacatggcatcgccgttattgaaggtttgcgagacgctcaagtcggtgcggcggtcaaacattatcctgggttgggcgcggtaagcggcaataccgacttcaccaccgaaggcattctggatacgaccaccacgttggacggggccgaggcaggtgcctttgaccaggcgattaccaaggccgatcctgcaatggtgatgatgtcgtcagccacgtatcaatccatcgacccgaataatccggcggtgttttcttctacgattatcgacggtcatattcgcaacgtcctgaagtacacgggcgtggtgatttcggattcgatatctgccgaagcgttgagcagctacgatgtaagccaattgggagtaaatcttgtcgaggcgggcggcgacatgtcctgcatcggtcagacggattatgtaaagccaattgtggacggcctcaacgaacgggcgaagtccgatccggctttcgcttcgaaggtgacggcggcggcgactcgcgtaatgacattgaaaatcaagatgggactggcctgaccgttcatccttgcactggcgaggattgatgcgcgctgattcgcgctaatcctcaccagccctcgtacaaatgcacactagtcctcgtacgaatcgtcagtcctcgtacgaatacagaccatgcttgccgatgtattgcaccacgccgtcgggcaccagataccagaccggctcgtcgtgttcggcgcggcggcgtacatcggtcgaggagatggccaaggccgggatctcaagcgtatcgaccttgccttcgggcaaggtcacgccgtccgggctggagtagccggggcgcgtgacggccacgaagtgagcgaggtcccacatgaggtcggcgtccttccactgcatgatttcggccacggcgtctgcgccggtgatgaagaacagctcggcgtcgggatgttgggcgcggatatcgcgcagagtgtcgatggtgtaggtgacgcccggacggtcgatgtcgacacgcgagacggtgaatttggggttggatgcggtggcgatcacagtcatcagataccgatcctcggcgttggtgacgtgcttgtccagcttgaacacaggtcggccggtgggcacgaaaatcacctcatcgaggtcatacacccaggcgacttcagaggcggcgaccaagtggccgttgtggatcgggtcgaacgtgccgcccatgatgccgacgcgcaggcgtgtatgccagttgccgcgtgcggaaagcctgcctttgccgtggctgctggccccggccggtacggacaggtcggacatgcgccgttcggtttcgccttgggtgacggcaatgatttcggcgggctcggcggattccactgttttttcggactgaactgacgcagccgttttgtggctgccggtaacaccactcatgcctggccgccctcgccggcggcgtcatcggctgattcggtttcctcttcgatttcgccggcggagggattgtcttccttgggatcgatcttgcccatgtcttcatcccattcgtcttggaccacgcgacgaatctcggcgaaggtgggcagcgggaagtccggctggtagaggcggcggacctcggccacgcgctcggtgatgcggatgagcgtgtcggtcatgccgtcgaggtcgccgtcgtgctccatctggctgtatttgccgatgtagccttccatgagttccatgtgttcgcgcacgatcttgagctgggcatcgttgaggtccacgacttcgggtgaatcggtctcgggccagccgatgagcacggcgtccgcgtattcgagcgacgcacgctgggcggcggaggcgatgccgtcctcaatctgcacgaggaacacatagcggacgatgctgagccgttcggccgcgatcttcaggccgagcttgggatcgttgaggtcgatgtcgggccgcagttcgcttgccttgtttgccgtgtcagccgtagtgttcatgttgccgtcctcgttcatgcgcgcacctggcctgttccgtaaccgatccacttggtggtggtcatctcccgcaatcccatgggaccgcgtgcgtgcatcttctgcgtagaaatgccaagctcagcaccaaagccaaacacgccgccatcggtgaagcgagtggaggcgttgaccatgaccacggccgagtcgatgcgcttggcgaattcctcgatggccgcataatcctcggcgatgatggattcggtgtggcccgtggaatgcgtgttgatgtggtcgatggccgcgcccagatccggcaccaccttgatgcccatcttgagggccagatattcagtgtcccaatcctcctcggtggcgcggttgaggtcaaggccctcgatcgccgcgccggagatgatgtcatacgacgtggtgtcagcctgcagtacaacgttcgcctcggccaacgcggcggcgatctgcggcaggaattcggcggcgacatccttatgaaccaatagcttctcggcggcgttgcacacgcccacgcgctgggttttggcgttgatgatgatcgggatggccttggcgagatcaccggacttgtcgatgtagatatgcacgttgccggcgccggtttcgatgaccggcactttggagttgcgcacgacggcttggatcagacccgctcctcctcgcggcacgagcacgtcgatatggcctcgcgcctccatcatggcggtggcaccggcgcgtccgtactggtcgacggactgcaccagtgcggattcgaaaccgtgtgcttcaagcaccggggcgatgacgcccagcgtggcagcattggtgcgttcggcggcgtgaccgcctcgcagcaacgcggcattgccagatttaaggcacaggctggccacgtccacagtaacgttcggccgggcctcataaatcatgccgatgacgcccatcggtacgcgcgtctgggtaaggcgcagaccgttgggcagattgtatccgcgcacgatttcgccgaccggatcaggcaaggtggccacatgacgcacgccttgggcggcggcggccacgcgcggcacgtcgaacagcaggcggtcaagcttgcccgcatccatgccgttttccttggattcgagcatgtccagcgcgttggcggcttcgatgtccgcggcgtgctcgtccagcgcgtccgcaatggcgagcagcagttcgtttttggcttcggtatttgcctgtgcaagacgctcctgtgcgcgtgcggcctgatcggcctggcggcacaccgcgtcgaacacctcaggactcaattcatcgctcataacagtcaagcgtaactcacaacgcggctgattgcttactccgacccgcttgttatgggatgtctgacgttttgaatcgcaaacagaaccggctcccctccatctcaggcgggaagccggtgatgtgatgcgctccggtcagcgaatcatcactaaccggtgcaccacggtggattagcgaatcagcaaatcagtggatctggtccaggtcggggtagagcgggaagtcttcggcgagcttgtcgacgcgagccttcagcgcggtcacgtcggcggacggtccggcggcgagcgcggtgccgatgatgtcggccacctcctcgtattccttcggcccgaagccgcgggtggccagggcggacgtgccgattctcaggcccgaggccaccgaggccgggcgcgggtcgaagggcacggtgttgcggttgatggtgatgccgcaggcggcgagcagatcctcgccctgctggccgtccatctcgctgttgcgcaggtcgaccatcaccaggtgcacgtcagtgccgccggtcagcacgctgatgccgttggccttgacgtcatcggccagtagtcgttcggcaaggatcttggcgccgtcgagcgtgcgctgcatacggtccttgaattcgggggtgccggccaccttgaagctcacggccttgcccgcgatcacatgcatgagcggaccgccctgctggccggggaacacggaggagttgagcttcttggcgtattcctgcttggcgaggatgaagccggagcgcgggccgccgaaggtcttgtgcgcggtggaagagactacgtcggcgtacggcacaggactcgggtgcagacccgcggctacgagtccggcgaagtgggccatgtcgacccagaatttggcgccgacctcgtcggcgatctccttcatggccttgaagtcctcgatgcgcgggtaggcggaccaaccgccgatgatcatggccgggtgggtttcgagcgcacgctggcggatgatttccgggtcgatgcggaaggtctcggggttcacgccataagcctcggcatggtagaagcggccggagaagttgattttcatgccgtgggtcaggtggccgccgtggtcgagggccaggccgagcacggtgtcgccgggcttgacgagcgcctggtagacggcggcgttggcctgggcgccggagtgcggctggacgttggcgtattcggcgccgaacagggccttggcgcgttcgcgggcgatggtttcgacttggtccacgtattcgcagccgccatagtagcggcggccggggtagccttcggcgtatttgttggtcagtacggagccctggcattgcagtaccgctcgcggcacgaagttctcagaggcgatcatctcaaggccattgcgctggcggcccagttcggagtccagcagttcggcgatctcaggatcggtttcgcagatcggcgcgttgaaagcatcggtcgctttctgcgcaaggggtgaagcggtcatgggtgctcctttggtatgggcgacaattgattcgccgctgtcgccttactgtatggccggtttgtagccggactgtttcatgatatggccggtccccgttcgatggcaatggtgattttcgccggtttgaccggtcggctacgcgagacggacggcccttctgcccacggcccacgctaaactggtgtggattcatcatccctttcaggcagaaggattcatcgtgacaaccaccttccattccacccgtagcaccaccgattcgctgaccgccaagcaggcgattcgtaagggcatcgccaatgacggcggcctgttcgtttcggacgcgttgggcaagaccaaggtggacgtggcctccctgccgggcaagtcgtaccagcagatcgccgccgaggtgctgggcgcgctgctgccggacttcacggccgaggagctgggccagtgcatcgccgacgcctacggcgaacagtggtccgatgagcgcatcaccccactcaagcccctgggtgacgattacgtgctcgaactgttcaacggtccgacttccgcgttcaaggacgtggcgctgcagatcctgccgcgcttcatggcgcacaccacgccggccgatggcgacgcggacgagaagatcatgatcctcaccgccacctccggcgacaccggcaaggccgcgctggccggctttgcggacgccccgggcaccgcgatcaccgtcttctacccggaaggcaaggtctcccaggtccaggaactgcagatgaccacgcaggccggctccaacgtgcaggtggccgccgtggaaggcaacttcgacgacgcccagtccgcggtcaagcgcatcttcggcgaccgtgccctggccgagcgtctcgccggcaattcgcacgtggtgctttcctccgccaactccatcaacgtgggccgtctggtgccgcaggtcgtctactacttctccgcttacgcccagctgctcgccgaccaggtgatcaacgtcggcgatgaggtcgagttcgtggtcccgaccggcaacttcggcgatatcctcgccggctactatgccaagctgctcggtctgccggtcaagcacctcgtggtggcttccgacaagaacaacgtgctgttcgacttcctgaccaccggtacctacaaccgccagcgcccgttcttccagaccatctccccctcgatggacatcctcatctcctccaacctggagcgcatgctgtactacttgtccgagggcgacacccgtctgatctccatgctgatgaacgacctcaacaagtggggcacgtacgagatcccggaagaactgctggccaagattcgtcagatcttcggcaccggttgggccgatgaggatcaggtacgcgagtccatcaaacactgctgggacgagaaccactacgtgatcgatccgcacaccgcctgcggctactacctgcttgagcagatgccgcgcgacccgctgaccccgcgcgtgctgctctccaccgccagcccctacaagttcccgcgcgtggtgaacgaggcattgggcttcgacgccaccggcaccgacttcgagtgcatggatgtgctggcccacgagaccggcaccaccgccccggccgccctgcgtggtcttgagaccgccgacgtgcggttcaaggacgtcgtggccatcgacggcatggaggactacgtggagaaggccgcccaggcgctgtaaaacataccagcacattggctcccctcagagcggggagccattttttacatcagaattgcgtttacatcagtatcgcggcgactggcagtcctatggcgattgccaacagcacgatagtgccgatgatcacgctggggcgtgcgaggttgacggtccagccgacgccgaaacgtttggggatcatgatggcaggatcgtcacggttgatgtagatgatgccgccaatccagtgcaggtcatcgtcatacggcatggcattatcgtccgaaatgtcaccgccgtcactgtgccgaacaccggcatagacgcgcgccccgttctgcccgtaatacacgccgatcatcagcgcgccgaccagagccgccacggcgatgaacatgccgatgatgccgattagattgatatccagcacgccaatggtgacaagctgaacgcctaggcccaatccaccggctgccagcagtccgatgaccagcacgtagatgctccagacccgcgagaacacaccataggcatacccggtggcggcggggtggtcgggatcaatcgggtgcttggcgtagatgatcgcggcatggctggccaccatcaccgctgccagcaccacctgcgcgagcacggcgtaccaaatcaccatcggactcttctcggcccaaccgttcacattgccggcgatatccgcatgaatcggcacccgctccggcatccggtcatagcccagcaacccgacagcaatggtgacagcgagacaaacgacttgcagcacttcccacttcaagctcatcgggtcgggattgtcccgctcacctatcaatgctgcacggcgggcactggacgcctcccatccctgatcgactttgatggatagtactttgcggcgaaacatctgctgcagcacgaaaccacatatcgcaatcgccaccgctgcgatggacacagtccagaacgccgcgtcgactccgcagagttgccaaacggccagcgagaccagtatggcgcatacgccaagcgccaccgtaattcccgaaaacgcgactttaaatccgcgaatgcgcgtattgacatgggcggcggccggcactgtgacaccgaacacctcatgccggtcggtaacccatggaacccctgccaggccggcggtcactatcaccggcaacagtaaaaacgcacacaacgcgatgttcatcgacacgactgtattattcatcgttatctcccctgatttccttttgttgcaccgtcagtaacgctctgcgaggagcgcacgccgtatgcccgttcgcattgccgtttggtggcatcgaggaatgcggccgaatcaccgccgcgcgccctgtaggccaaggcaaggcgatagagttcctcgcccatccgctcatcctgtgcttcggcagttcggttcggtgcttctcccccgccgtcatgctcggcgacggttgcaccggcaccacgacgcataacgatgtatccctcgtcacgcaacagcgcataggccttgttcaccgtgtgcaggttgatgccaaggtccacggccagcgagcgcacggacggtaacgagtcacctggcgacagctcatcgcccgcgatggctgcgatgagctgcctgtgcagctgctcgtaaatcggcacgtcactgcgctgatcgatttccacaatcacggtcaattccacccctctcaagaactgttctatttgttctacatcaaatataacagttttgccgtatgagtcaagatatgcgaatctcggttgaacatccggcaatgggccaacggcgtgttgcttgaattttctaggaaggcgggaatcgccatgctgccggcgaatgggaaaatccatgtggcttgtcagattctgttcctgcaactgaatagtcccatgagggagtagacagcattgcggcgaagggctcggcccaaaccgcaataaagcgtgccgagcgccaaagccgccaacaccggtatgacgccgctgcaggagaagctcgcgaagctggacgaacttcatgggcggcaccgccgaacagcagtcgaccattctgttcacgctgttcgtggtattccagctgttcagcagtcgaccattctgttcacgctgttcgtagtattccagctgttcaacgccttcaacagccgcgagctgggcaacgccagcctgttcgccaatctgctacgcaataaggtgatgatcggcgtgttcgcgctgatgttcgcacttcaggtgctggtggtgcagttcggcggagcgatgttccgcaccgtgccgctgccgatcgacatgtggctgaagatcatcgcggtcggacagatgcgcggttagagttctttggctcggtagatgcggatggctataagcatggagccaaaatatgcgagcagacacaacacggcgagaacaagcgccgtatgccaccagatcgtcaggaaatcggcaatattcagcaatagccattgccagtcaacaggcaatcgggccagcagcgcaatgactgcatacaagccgacaatgaccgcgccagaggccatcatcatcttgcgggaggtgaaccggtatgcacaggccagcagcaccgacccaagaatgatagccaaagcgaagatggaagcacctgctgccaaggtaccaatccaccccatatctgctatatcgccaaagacaatgaagacgccgccgcatatcaccacgtccaaagcccagagcaggccaaccaccaacagaaaaaggtaccgacctacaacttgtgcagtgcgtgaaacaggaatcagccctcgcatggcactgtgccctgcagattcctcggatgacgcaggccccaatgcactcatacatgccatcgccgatgccaaacctccgagtccgcccatcagaccactggcaacgtgttcatcgacgtgggtcgatatcatcaccagcgataccacgatagacagcaccgggaaaaccagcagaaataccatattcgccacgctgaacagacccgtcccgacacaatcgaatcggcattgctttactacggatttccagctcatcgtcaccattcccttgaagcaaatatgcgagaggcaattacatacgagactccatatgccacaaccgtcgttgccaataccgcaataaccagccacaatcgttgcgcgatgatggcattcgcggcatgggccaatcctttggtcaccgaagcaggcaaaatagatagcagtatggatacagccaatacaacgacataaatcaccatcatcgtgacttgaagaccgcctagtttggtccacagataacccgtgggcacgataagcgcgaccatcagcgcggtgcagaaacctcccaacggagccgcccacagattgcccgcgaatgaccaatccggattgaccagcacttgcaacccgtcaatcagaacaatcatcgctatcgacaatacggaaatcaccaatccaaccacatatcgcgcggccacctgactcttcctcgaagccggaataatgccacgaagtcgatatccgttctgtaagtcagcaaccgccatggttagcacccacatggcgcaggcgaataccgtcatgatgacacccatgcgatagccgaagccatcaccataagcttcaccttgaaagatgacggagaacaacggtgccaacaacaacgagaacacagtccgttcgccgacgcacaggtaggccatatcgacgcgcaatgcagtggccaatgcatgttgccgagaccgcgacaccctcagtattgcctccatggccgctcacctcccgctcaagtcacgattggaatcatgggcattggtcagtcgaatgatgtcatcaatggaagccgattcaacgacaagccccgaaaccaccgacgcaacagcatcaagcctgtctgaccggaccagcgcatcgaatccggtggcatacgtatgtgagcccagcaccacgtccgcaggcagttgtgccagttcgtctggaccgcccttaatcaggcggaacgattcctcaaactcgtctttcggaccggtgtagtagagacggccatcggtgatgtaggtaatgaagtcagcggcacgttcgaggtcggcagtgatatgggtgctgaacagtaccgaatgttcgccatcctcaatgtaggcatgcaggatatccatgagttcgtcgcgggcaagcacatcgagtccgctggtcggctcgtcgagaatcagcagcttggcatcatgactcaatgcgatggccagcatcagcttcatctgcatgccgcgggaaagatccttgatatgtttcttgccgttctgtgcgtcaccaagaccgaaagtatccagatacttgcgatagcatccaccgtcccatgatggatacagtggcgcgacgatacgttcaatgttcttgacttgccactgttcatgcatgtagctgaagtcgaacaccacgccgagttgttctttgacgggctcctcgttggcgatgttgtcgaggccgagtacgtgaatcgaaccggcgtcgcggtggatcatgttgaggatgagtttgatgagggtggatttgccggcgccgttcgggccgatcagtcccatgatgtagcccttgggcaggtcgaaggtcacgtcgtccagcgtgaagccggaatcatagtgtttggtgacgtcggtgacctgcaacgccatcgcgtcggattcggatatggcggtcatggccatggtcctttcttgaggttatttcttgcggtattcctcttcgagcatgcggtccaatgcgtccagcggaatgccggcggctttggcgccccggcttgcctcggccaggctttcgcgaatctgggttttgagctgacgttgcatcagttcgttgcccttgtccatcacgaaagtgcctttgccttggatgttctgcaccacgccctcatcggccagttcgttgtacgccctggtgacggtgagtacggagatgcgcagctccttggcgagtttcctcaaggaaggcagggcctcgcccgccttcaactcgccactgagcaccgccgaatggatttgggttttgatttgctcgtagatgggttcaccggacacggatgagatgatcagtttcacctatgcccctttcgattgtggttgactagcaccccagctgtttagctgttatacaacacagtataactgttctgcttaactgtcaaggtgtgttacataacagctaaacagtgaacaaacaccttgccaacatacagtgtcgaaacatgggccgcgcctacaatggcctcgggaaggggcacctatgccaaacaacgccgttacgccgacagccccgccagcgggggtgtaactttttttatcacagcacgcgcggagcgtcgtggaagtcgaagaggacgccgtcggccaggtggcagatttcgggccaatcggaggcggaggagtcgtcgtgcatggcccagaccttcatgccgaccgatttggccgacttcatgccgaccagcaggtcttcgaacaccgtgcagtcggccggtgcagcacccaggcgcttggcggcgagcaggtagacgtcgggctggtccttgccgacgtcgttcgcatcatcgacggagacgatatcgttgaacagttcgaacatgccgacgtggcgtagcgccggctcacgcagatgcgggggcagcgaggtggcgacgccaagcttgacgccggcggccttcaggtcgtgcagatagccgagcgcgcccggcttggcctccaccgtggtggagtaggcgacactggccatgtcatcccactcctgcataagctcctcgggggtatctttcaggccgaatcgcgcgatggtgtattcggcgatctggcgaaactgcatggcggagaccgtggtcgtgtagtcgggcggaaccgcgatgccacgcttgttcaggaagtcgatgtcgacttggtcccagactcccatggagtctaggagggtgccatcgaggtcgaatatggcggctttggtcataggacactttccttcaacagttctcgggcgtggtctagggaggcttcggattcgctgccggagagcatgcgggcgatttcgtggacgcgggtttcgccgttgacttcggcgatggtggtgaccacgcccaaatcgtcgtcatcggcatccggcggctccttggtgaccacgaactgcgcgtccgcccacgaagcgacctgcgccaagtgggtgacgacgatgacctgcgcgctgcgggccagccgtgccagacgtttgcccagttcgaccgcggccttgccacccacgccggcgtcaacctcgtcgaagatgaaggtctggtcggcaccgccgcgcgtgtcggcggccaccagctccaaggccaacatcagtcggctcagttcaccgcccgaagcgcttttgcccatcggcaactgcggcgacccctcgaacggcgtaaacaggaacgcgatatcgtcgcgaccatacggaccgagcggatcatcggccttgtctcgcggcgtgacacgcacttccaaggaggcgcccagcatggcgagcgagccgagttcttcagtgacgcgcgcgcccaagtcggcagcggcagccacgcgcgcggcgctcagcacgtcggcggcggcgagggccgcatcgtacagcgtctgccgttcggattcgagttcggcgaccttttccggcgaggcgtccagatcctccaaatcgaacgccgccttgtcccgccaagcgagcacgtcggccaaggtggggccccaccgacgggtgaggtcgccaagctcgtggatacggccgttgatctggtccagatcctccacgctgccttcgtcgcccagctcctggctcagggcgaacaccacgtcgcccaaatcggcattgatggattcaagccgatcggcctgctcggcgaacgtgccgccgacgcgaatcgcgcgcaacgaggtcaccgcatgattgatgagttccacggccgaagcgccgtcggcggcgtccacatccacctgcgaggcatccagcgcgcccagcgccgaacccacgccttgggcgatgtcagccgcgttttcgatgcgttcgcggcgcgccttcagctcctcgtcctcccccggctgcgggtcggttcggttgatgcggtcgatggattcgcgcaggtagtcggcctgttggcgggcagaggattcctgcgagcgcaggcgttccagccgctcatccatggcggccagcgcatcccacgccttgcggtaggcggccagttcggcttcgtctccggccacccggtccagaaactcgcgttgccgtgcggcggccgcgattttcagctgatcggtctggccatgaatgatgaccagttcgccggcgatggcccccagcaccgaacgcggtacggacttgccgccgagcacggcccgcgaacgtccggaagcgcgtacggtgcgggaaaggaacagttcgccgtcttcggggtcgacgcccgcgtcgtgggctttggccacggccgcggcagcaccggtgagcccgctgtcagaatcgtcagaaccggcatcgtcaccggcatcgttggtgtcgccggaatgttcagatgcgacggcatcatccgcgagcgcgaaaatcgcctgggcccaagcctcgtccgccccggccgagacgcgcgaggattcggcggccccaccggagaccagtcggatcgcggagagcagcatggatttgccggcaccggtctcaccggtgatggcggtcatgcctgcggccggcgcaatggcggcttctcgaatcggccccagattgcggatatcgagttcttcgagcatcaggctcctgccttgccgtcgcgttcgcccggcttgtcgggctcggtaccagcgacaccagcgtcaccggcaacgccagccgcatacgcggccgccgggaacgtgtgcccgtgatgcagcggctggctcgaggcctcgttgcgcgcgtgctcgcgccaaccgaccacgggcagatcgaacttggagaccagacggttggtgaacggcacgccggagagtcgggcgaggcgcaaggtatcgcgcgattcgcgcaccatgacgcgcgtaccctgcggcagggcgcgctggcggcggccatcgcagcaaatccagccttcggacatggaatcgtccagaatatcgatggtgaaggtcgaaccggagccgatgatcagcggcctggcgaacagggcatgcgcggccaacggaatcaactgcagggccttgacgttcggccacatgaccggaccgcccgcggagaaggcgtaggcggtggaaccggtgggcgtggagacgatgacgccgtccgcgccgaacgagttcatctccacatcgtccacgcggatggacagttcgaccatcttgccccggtcggcgcgttccagcgtgatgtcgttcagcgcccaatcctcaatgggcttggtggtgccaggcagccagacgtccacatgggcgatcatgcgttcgtcgatcgaatagtcgtgggtggcgacccggcggatcgcctcgtcgatctggaagctttcgaattcggccaggaagccgacatgccccatgttcacgccgagaatcggcacctgggtgcagtggacgagttcggcggcgcgcagtatcgtgccgtcgccgcccaggaccacgacgatttcggtgtcgtccgacacgcacggcggctgcacgccgaaatcgggggcctcggtgttgtcgatgatggtgacttcgaaaccggccactcgcagctggctcaccgcctcggccactacggttccggtctgcctgagcctggtatgcgtcaccaccaccgcgttgcgcttggccatggcatcctcctgtcgattcggtcgcactgctcattattctagccgcagacaccgtcatcagtcgtacaggtgttcgaaaaatgccgcttcgtggcgcgtcgccgacaacgttccgcagagtcgattaacgtaaggcttcggcatacaatggcatacagccgcgcgatcaccgtacgcgtgccgtgcgcagcgcgatggcatgccgtatgaccatacagcagtatcagttgaggagcttgaggacccatggccaatgacttcgacgaatcctccgccaatgaggaggcctcgaagggcctgtcatggtggtattcggccgatgtactgagccgagacaaaagcgataaaaccgccaagcgcattcgccgcatcagcatcaccgaccgtctgctcaggcacccgggccgtctgtccatggtgtatttcggcgcactgatcatcatcgtcaccggcttgctgctgctgccgatctccacatcggacatcatcttcaccaacttcccggtcgcgttcttcaccgccgtctcggccctgtccacctgcggcattccggtggtgaacaccggcgaatactggtcgacgttcggccaagttgtcatcctattctccatccagttcggcggcctgggcgtcatgaccttcgcctcgatggtggctcttggcgcttcccgcagactcaaggtctcccagcgcatgcttaccgcgaacgaactgggcaccacgaagctttccgaggtcaaaggcgtactcaccgtggtattgggcacctccatcatcgccgaggtgcttaccttcgtgctgctgctgcccgacctgttccgcgtgaaccacggcaatatgggacgtacattgtggcaggcgctgttctacgcggtatcggcctacaacaacaccggtttcacgcctgacgccaccggcctgcatgtgaaccgttggggcgtgggactgccgattctcatcagcgcattcataggaacgctcggcttccccgtggtgctgaatctggtgcagtgcgcacgccgacatctcagcccgaaacgttggacgttgcacaccaaactcactttggtgaccaccgctgtgctggtggccacctcactggcttggttcctgctggtcgagtggggcaataccggcctgttccccgcagacggtcccggcatgaagatgcgccgtgcgatgagcgccgccgtcatgccccgctccgccggtttcgatatttcctgggtgcccgaagtcacgaatgagaccaaggtgttcatgagcatactcatgttcatcggcgcaggctcctcatccaccgccggcggcatccgtgtcaccacgttcgcggtgattctcttgatttgccgcgccgcattcaccggccatcgcgatgtcaccgtgttccgccgccgtatcccccgccgcgtccagatgaccgccgtgtccgtgaccacggcctgctttgcgctggttatggtcggtgcgatgatgctgatgttcaccaccggctgcgcgttcgtggacgccgtgttcgaggcctgctcggccttctcgttgggcggttattcggtgggcgtggcaagcgccggcaatccggccagcctgtttattctgtccgccgagatgattgtcggacgacttggcccgttgaccatcgcctactccatcagcagaccgatggctcccgaacctattcgttatccgcaggaaaacattatcgttggctgatcggccattcaatcggcacacagaaatccggcatagagaggaccatcatcatggcagcaaaaccgagcggcaacaaaagcgtgctggtcatcggcctgggccgtttcggcgggtccgtggccgccaccctcgaccagatgggtcaggatgtgctcgccgtggataagaacccggagcttgtggcccgttggtccgcgcatctgcccaccattcaggccgacatgaccgatgtgctggccatcgagcagatcgacgcctcccagttcgacacggccgtcgtggccatcggcgacagcatcgaggcttcggtgatcatcaccggcaacctgctggatgccggcgtttccgatctgtgggccaagtccgtgtcccaggagcatgcgcgcattctgcagcgcatcggcgcccgtcacatcatcaatgcggagaccgatgccggcaagcgcgtgggtcatctggtggccggcaattatctggattacatcgaaatcgacggcccgtacaccgtcgtcaagatccacacgcccctatacgcggtgggtcgcagcatcgaggacgtgcaggtgcacgacaaatacggcgtgaccgtggtgggcctcaaggccccaggcaaggagttccagtacggctccaaggaactggtcatgcatcgcaacgacgaactcatcctcatgggcaagcaggatcagatcgaccacttcatccaaggctaacccccctaactgcgctcgctatacccccctatctgctcacatcgtgaccgatataacccccctcaacatggatgcgctcattattggggcaataagccataaagctgtacgtccatattgagggggctttatcatcatgggcaagcatacgcagaattgcatgttgataggcaaaggagtctacggcaccataggagtggaccaacgttcccgtcttgccgatggcgcgcattttcacaccatgattgtgaccagcaccctcgaggcctcagttatagaaggggacaaactggtcatcaagagtggcattgtgcggtgtgatggtgatattcgcgtatccagcatcagcggcagcggcgacatcgaagtcggcggcgacattatttgcgatgaaataacctttaccggcaaactgcgatgcaacagcgatatcgtttgttccggaaatctgtccgtcaatggctccctaggcacccgtcatattagcggtcagacagtccgcttgaacggcgtgttgaagggtcatgacgtcaacagcagggctctggaagttcatccactgcgcagtacgatgttttctcgttttgatatggatgggtatgaggatggcagcatggttcgccatatcacagccgtcacggttgaagccaaccatctgcaatgccggactttgacggcggactccgccatgctacgcaacggcagtgcggtggaaagcgccacgtgtgccagcgcaataggcatcgaccgtacctccagcgtgctgctggtgaacggagactgccgacgcattcatctcaagacagcgtaaagcaggtattcctcattaccgtgggtgccgatgatgggactatcggcagtggccaccacgtcaagtccgtgctgttcagcacaggcgaccacgtcgtgcaatgcccgctcccgcaatgccggatcttccacgatgccgtttttgccgagtcctgcccgcccgacctcgaactgcggtttgaccagtaacacaatctgcgcaccgggagccgcgatgcgcgcgattaccggaatcacataggtcagggaaataaaggagacgtcggagacgatcatcgccggccggtaaggcaggtcgtcggcctctacttcgcgaatgttgacgccgctcatttcgatgacgtgctcgtcattggcgatgcgcgggtcgagctggccgtggccgacgtcgagcgccacgactttggccgctcccccgcgcaacagtacatcggtgaagccaccggtggaggcaccgatatccagacattccaagctttccggcccggtaaggccattgccggcaaaggtctcgaacgcgcccaagagtttgtaagcgcctcgggagacgtagtcgtcgcccttatccacggcgagttcgctgtgcccggctttgaccatgaacgatggcttggtgatggtctcgccgtccacgcgcacatgcccggctttgatgagtcgctgcgctttggcccgcgattcgaccagtcccgaagccacgagcatcatgtcgaggcgatcaagtggggtcgcgggatcgatatgttgctcggtcatataccttcctttcgacccaccatccaccaacggggtggctcggcatggacccaccatccagcacttcacgtcatcttccgctggcgggagaatgaatctcctctgctagctgcggctgttatcaagctcgtgttgtaacgattccagcacgttgcgataggtctcaagcttgcggtcgttgtcttgttcatcaatatccgcaagttcggggtatcgctcggtgaccggcgcgtgttcgctatccgtaggcataggactatgcctcgatggcgaacaccggtaccgtggcctcgctgagctgtgcgccttggtcggcggcttcccatgcggcgcatacggcggcacgcaggccgtccatactggtggggtcgctgacgtgtacctggccgttttcaaaccaagcgctagccttgcggcattcccaagtaccgctctcgtcgcggaccggctccggttgggcttcgccgagttcacgcagatcaagggcgatgaatgtgggcctcaggtgtgccggagccagcatcagttcggtcgggttggtgacaccggtcagcaccgccagcgaatcatagtcaccgcggttaccggcctcgatatcagtgtcgagtcggtcgccaatggcgatggacgcctccttgggcaccagatcgtggccttcggcggcgttcagttcgcgggcctcatcgtacatgtacgcttccggcttgccagcggaggcgaccggttcgacgccagtggccgtgatcacggcgcgaatcatcgatccgcaaccgggggcgatgcccagttcacgaggaatcgtcaggtcgcggttggtcacgaaatacgtggctccggcctcgaccgcgaacgcggcatcggccatcatctgccaagtcatatccggataccagccctgaataacggcctgcgggcggtcctgaggaccgtccacgatggtcaggccgttgcgggtgacctcatcgcgcaaatgctcggcgcccaatacctgtacgcgcgcgccggcgggcaacgccttggccaccacacgggcggccaccaccgaagaggtgatgacctgccacggctccacgtccaagccgaagcccttgagctgatcggccaccacgtgctggaagcgcgaggagttgttcgtggtgtattcgatggtcatgccggcggcttcggccgcacgaatggaatcggctgcgtattcgaccggattcttgccgcgatacaccacgccgtcgaggtccagcagcgcaagctgataggcctcggcgagcgggcgatcggtgcctttgaggaaacgggtcattacgccgctcactcctcggtttcggtctcggtctcgtcggactcagccggttcaacggcatcgtcagcggactcggaagactcctcggcttcagattcctcagattcttccgatgcatcctcggactcagcattttcgacatcggcctcatcggactcggcatcgccgtcttcagcctcgtcgtcctcatcgccgtattcctgctccggatccggggcgtactgcgcctcgtccggatcgatgccgagcttctcgagcacgtcggagtcgtcggtgatgtcttcgagatcgtggtcaatcaccacgtcgtcgctgttttcgtcaatctcctcgtcggcatactgatcctcaagacggtccagcaggtcattaagctgctcggcttccttgctgcggccggcctcttcaaggaagtactgctcggcctgcacggcacgcatacggtactcacccggaagaccctgagagcggccgacggtatgaaccacttcaatggccttgtcccacatctccaaatcgccaagggcaccggcatacaccaggaacatctcgaccttgggagcgccatgcagctgcttgccctcatcggacagcgccagttccacggccttcttcggttcaccgacaccacgctcgcagtcagcgatgaacggcaggtagtcgaggaagccgttcatacggtaggcggtacggaactcacgcagggacagcttgtagtcgccctgacggtaggccacgaacgcgagcgtctcgcgggcaaagtcgatgcgggaggcctgacgggccacccacttggcgtgctccaaggcaagttcgggatcgctctcctccagcgcgaaagcggcgaggatgtgcagaccgatgttctccgcatgctccttggacaggccgcgcagacgttcgcgctcatccttggacagcatcgaccattccatgcccttgggcatcttgggctcgtcgggacgacggtcggtgtacgggttctgcgaggggaagctcatcgtgccgtcggagttacggcgcggacgcctcatgtattcagagcgcttctcctcacggtactggcgcttctcttcctgcgaaaactcgcggaattcgccgtcacgacggttgttgtcgcggcggtcgtccctgcggaagttgcggcgatcgccatcacg

SEQ ID NO: 797 - DNA, 4442 bp, Unknown
  R14_18m  MAG No. k141_4769
cgaagagcatgatctccggcttcatggccagagcacgggcaatggccacgcgctgctgctgaccacccgacagctgggaggggtaatagtccatgcgatcgcccagaccgacgcgctgaagctcggccacggccaggtcacaggcggctttcttggactggtgctgcacgtggatcggggcttccatcacgttctccagcgcggtcatgtgtgggaacaggttgaagcgctggaacaccatgccgaggcgagagcgctgtgcggcgatctccttatcgtccaaggtctgtagcatgtcctggccgtttttggtcacgtgcttgtagccgatgagttcgccgtacacctcgatggaaccgccggtcagggtttccagctggttgatcagacgcaggaacgtggacttgccggaaccggagggccccagaatcacggtcacagtaccgggcataacggttagatcgatgcccttgagcacatgcagcggcccaaacgccttgtgcacctgcacggccttgacagcaggaatcacggaaccgtcagccgccttgcgcacgaccggggcaacactggtgatgtcattcgtagtcataatcgcgctcccgccttatgcattcaatccgacaaatgtggtctggttgagcttgtccacgtcatccttcggttcaccgtcggtcttacccggcaatggcgtctgcttgcccttggtgcccaccggtcgggcatcgaagcccctgccgaagtgcgcctcgaggcgggactgcacaaccatcagaatggaggtgatcagcaggtaccagaagcaggccacgagaagcagcggaatcggcttgtagatacggttggcgatggcgttggtggcgaactgcagttcgagagtgaacggcacggcggtgaccagcgaggtggtcttcagcatgccgatggtctcgttgccggtgggcgggatgatgatgcgcatggcctgcggcagcacgatgcggcgcatgatgagcgtgcggttcatgcccagcgccttggccgcctcggtctggccggggtccacggcttcaaggccggcacgcacgatttcggacaggtaggcggcctcgttcagggccagaccaatccatgcggcgttgaatgcggtgaccaccacgttggagtcgatgctccagaactccaccgaggtgaacggaatgccgaggctgatcttaggaatcagcacggcgaacagaccccagaaaatgagctgcgtgtacacaggcgtgccgcggaagaaccagatgaagaaccagctgacgccgcgcagcaccggattgatggatttgcgcatgatggcaagaatcaccgacaggatgatcgccacgaccatggagatcacggtaagctccaaggtatagcgaatgccttcaagcacgttctcgttgaacaggtacttccagacggtgggccaatccagtcgcggattggtaatcaagccttgaatgagcatcgcggcgagcagtaccacgatcactgcggccacaatcgggccggggcgcttgaccggcaacgccttgatgcggttggggatgttcagcccctcaccgtcgacttctttcttcgccataatctggttccttggatgtgttaggcagcctgaactgcaagttgcaactagcgttgaaccttagtgcacgaatggggcgactgtgttacaaacagtgcgccccattcgaattttcgcgacagcttgtcgactattcgacggccgggttgatttcggccttgtccagtgcgccggattcgacgccccagtgctggagaatcttagtgtaggtgccgtcgtccatgagcttttgcatggccttctgcacggcttcggcggtctgggaatcgcccttcttgatggcgatggcgttcggcacttcatcgaagtccttgccgagctgttccagctgaccatcggtctgggcgatggcgtagccgacaaccggggaatcggcgaagaagacgtcggccttgccggtcaccacagcggtggtggcgtcggtctgctgcttggaggactggatggtgatgtctttcttgccgtccgccttgcactgcttggcggtcttgttgatggcctcttcctcgacggtgccggtctcgacggcgacgttcagaccgcacaggtcatccgggttcacgttcttggggttgcctttggccaccgcgtagcccataccggcggtgaagtaggagacgaagtccacggactgcatacgttccttggtgatggtgaacgcggcgatgcccagatcgtacttggagccgatggccggaatgatcgtatcgaagttggaggagacgatttcggtctcgagaccgaagatgttgcccatggcgcgggcgagatccatgtcgtagccgatctgggtcttgccgtcggcgtcgaggaattcggccggggcgtaggaggggttggtgccgatggtgagcttgccgtccttggtcacggattcaggcagcagtgcggcgatggtgtcatccttctccacggagctgacatcgtagctggtgatggtggcggcatcggagcccttggcggaatccgtaccggcatcggccttgtcggaggcgccgcaagcggcggtggcgaacagcatggccgagctcagtgcaatggccataatggacttcagtttggtggactgcataatcgtttcttcttctctcttacgccgcttcaacggcaacgatcaacggttaagcatatttatacactacagtgcatacatatacaaaaagactcccgccgcagggcaacgggagtcttcatagtaaccgaaactactcgacggacgggttgatctcggccttgtcgacggcgccggaagagacgccccacgtgtcgaggatcttcttgtacgtgccatcatccatcagcttctggatggccttctgtacggcctcggcggtcttggaatcgcccttcttgacggccacggcctcaggggtcacaccaacgtcctcgccgagggcctcgagcgtatcaccggtctgcttgatggcgtagccggcaaccggcgtatcggcgtagaagatatcagccttaccggaagccacggcggtagtcacatcggtctgcagcttggaggactggatgtcgatggcatccttaccgtccgccttgcactgctcgttatccttgttgacttcctcttcctgggtggtaccggtctgcacagccaccttcacgccgcacaggttcgaggagtcgaccttgttcgggttgcccttctgcaccacgaacgtggaaccggccttgaagtaggtcacgaagtccacagcctccatgcgttccttggtcacggtgaaggaggagatgccgatgtcgtacttggagccgacggacgggataatcgaatcgaacgtggaggagacggtgttttccttcagtccgaacactgcggccagcgccttggacaggtcgacatcaaagccgaccggggtcttgccgtcctcggccaggaactcggccggggcataggaagtatcggcgccgacggtcagcgtgccgtcgccggccacggaatcgggcagcagtgcggcaatctcgtcgtccttctggatgctgctggtgtcgaagccttgaatcgaagtgctggacgagtccttggatgaatcgccgctcttggatgcggtgtcggtgccgtcagtcgtgccacaggccgccacggcgatcagcatggccgcgctcagggcggcggccgcagcggattgtattcccttgcttagagacattggatttcctctctccggatagtcagctgggcgggtatgtttcccagatggttccagagcgtaggagtgcaatgctacggaagcgttaatcgtgggcgaaatgacccacaacgcggacatcctacccttggctcccctccggaggggagccaagggacgggactagtggcgcatgttggcgtagcgcatggcgcgtagggcttcgcgcttgtcctgctcttcgcgcagggcctggcgcttgtcgaattccttcttgcctcgggccagtgcgatctccgccttgacgcgaccgtccttgaagtacaggctcagcggcacaatcgtgtatcccttggcctcgatgccgcgggcgagcttggtgatctgcagtcggtgcagcagcagcttgcgcttgcgcttgggcgcatggttgttccatgtgccgttcaggtattcggggatgttcgcgccctccagccacatctcgccacggcggtcgatggagatgaacgcctcggacagcgatgcgcggccttcgcgcaacgacttgacctcggtgccggtcagggccagccctgcctcgtacttgtcttcgatggcatagtcatgccgggccttcttgttctggacgatgagtttctcaccggtttccttgggcatgtctcctcctttcgtgggcaataactcgtgagtagcaactcgtgggtagcaac

SEQ ID NO: 798 - DNA, 18878 bp, Unknown
  R14_18m  MAG No. k141_4789
cttcactccggatgcacccgtcctccacgaaatcaagaaccacagcgaagctctggcacaggcggaagcaggcgttgcagccatggccgccgaacgcaacaaccgctggtacccgaagttccacatcgcatccaacggcggctggatcaacgacccgaacggcctgtgcttctacaagggccgctggcacgtgttctaccagctgcacccgtacggcacccagtggggcccgatgcactggggacacgtctcctccaccgacatgctcaactggaagcgtgagccaatcatgttcgccccgacccttgaagaggagaaggacggcgtattctccggttccgcagtaatcggcgacgatggcaagctcaagttctactacaccggccaccgttgggccaacggccacgacaacaccggcggcgactggcaagtgcagatgctcgccgagccggacaacgacgagctgaccagcgccaccaagcgcggcatgatcatcgactgcccgaccgacaaggtcgaccatcactaccgcgacccgaaggtctggaagaccggcgacacctggtacatgaccttcggtgtctcctctgcggacaagcgcggccagatgtggctgttctcctccaaggacatggtccgctgggaatacgagcgcgtgctcttccagcacccggatccggatgtgttcatgctcgaatgccccgacttcttccccatcaaagacaaggacggcaacgagaagtgggtcattggcttctccgccatggggtccaagcccagcggcttcatgaaccgcaacgtcaacaacgccggctacatgattggcacgtgggagccgggcggcgaattcaagccggaaaccgagttccgcctgtgggattgcggccacaactactacgccccacagtccttcaacgtggacggccgtcagatcgtctatggctggatgagcccgttcgtgcagccgattcccatggaggatgacggctggtgtggtcagctcaccctgccgcgcgagatcacccttgacgatgacggcgacgtggtcaccgcgccggtcgccgaaatggaaggcctgcgcgaggataccctcgaccatggttcgatcacgctcgatatggatggggagcaggtcatcgccgatgacgccaaggccgtggaaatcgaaatgaccatcgacttggctgcctccactgccgagcgtgcgggcctgaagattcatgccactgaggacggtgcctacacctacgtggcttatgacgaccagatcggccgcgtggtggtggatcgccaggccatggccaacggcgatcgcggctaccgcgccgccccactgaccgacgccgaactggcctccggcaagctggacctgcgcgtgttcgtggatcgcggctccgtggaggtctacgtcaacggtggccaccaggtgctgagctcctactcctacgcctccgaaggaccgcgtgccatcaagctcgtcgccgagtccggctccctcaaggtggattccctgaagctccaccacatgaagtccatcggactggagtagctctctcacctccctcacagagggaagttttttgtgtgcccctgtcgttcgccttcgcctatactgatggacggcatataacacaatccatcacacgaccggcaggcgcgcaggctcctcaccttactgttccacgccccggccgcaagcgccaccagcaaaccggactggcgcggaaagcaaggtgacatcccatgtccatcgccaagcgcctcaagcgccgcatgcccaccgtcatcgccgtcatcgtattgctggcagtctgggaaacgtgggtggatctaggacatgtctcccccacgatgatctccgcgccaagcgagattttcgccgccaccatcgaaacgtggaacacgctcggcccggccgcggcgatcaccggctatgagggcgtggtcggcttcctgttcgccgtgttcttcggcattatgatcggcatcgcactgtactgctcgcacacgttcaacgcggcgttctatccgctgcttgccgccgcacaaaccatgccgctgatttccatcgccccgttgttcctgatttggttcggctttgagatttccggcaaaatcgtaatcgtggcggtattcggcctcttccccatcgccgtgcagaccgtgcgcggactagaagcggtgccccagttctattccgacgtcgcattgacctgcggcgcgaccccggtctggacgctctggcacgtgaagctgcgcgttgccgcacgtcagatctatggcggtatccgcgtatctgccgcatacatcttcgccacggcatccaccgctgaatatcttggcgcgcgcaagggcctcggcatctggctgcaggctgcctacaattcgttccgcacgccgctgatcttctccgccaccatcgtcattatcctgatgacatgcgtactgatgctggcggtgaacgccagcgagcgcatcctgctcggcccggccggcgatgacgaagaccccgacgcggaccagtagttctttttaccgtcaaagacacaagccggcggccagaaccgactgaacggggcggcttctcatgaggtctccagccctgtctctataatggaacagctttaccagcgtgtggcaaaccggctttcttgagctttcatagggaatgtcgggggcgctggtcgaacggaaatcaaggccctccatatcgttttctgccgacttccgttcgaagcaatcccagagaacgatagagagacaacgaattagggaaccatcattatgaagaaaagccttgtatccaaggccgctgccctcgtgggcgcccttgctatgactttcggtttcgccgcatgtggtcagaccaacaccgccgactcctccaactccaacacctccgacctcaagaaggtcactttcatgctttcctgggcgcccgataccaaccacatcggcgtgtacgtggccaagaacaagggctacttcaaggacgccggtcttgacgtggatatcgtggccgtggcccaggccggtgccgaacaggccgtgaacaacggtgtggccgacttcgccctgtccaacttgaccaatgtgggcatctacacgctgaagggcgctcacatcaagcaggtgctgcaggtgcagcagaagccgagcgccatttggtgcgcactggcgtccaacaccgccatcaagtcccctaaggatttggatggcaagaccttcgccaccttcggctccaacgagtccgacgccgtggtgcgccgcatgatccagaccgacggcggcaagggcgagttcgacaaggtgaccgtcggcacctccaccttccagaccatggaatccggcaaggccgatttcggcggcttctacgccacgtgggaaggcgtgcaggccgacatgtacggcccgaagctcaactgcttcaccgagcctgactacggcgtgcccggcaacgccgacgccatcggcatcatcaccaatgacaagaccatcaagaacaatcccgacctggtcaagaagttcactcaggccactcagaagggttacgagtacgcgtacgccaacccggatgacgccgcgcagattctcgtggacgaagcccctgacgccaacctcaagcccgaattcgtcaagaagagcatgcaggttatcgtcgacggccagtactggggcgatccggccaagatcaaggacggctctttcgtgctcggcaccaacgacttcaagggcactcaggaatacttcgacttcctggctgaagaagacgcctacaccgacagtcatgacaaggtgattcatgaggccccgcaggccaaggaccttggcaccgacgaattcctcggcaagtaatttccgatattccgagtttgaatctacgcaaaaatgcgtccttcccatgaggaaaggacgcatttttgcgtatcggccgataaggttattcatagcgaatcatgctaacaaggaggcgattccatggcccaacgtcctgaccgcattattgccagcatggataccggtgttgatgatgcgttggcgttggcgtatttgttggggtcggcggatgagtgcgagctgagcggtgtgatcgccagttatggcaatgtggatgcgaacacggcttatgccaatacttgcgcggtgcttgatttgtttggccgggcggatattccggtgtttttgggctccgagcatccttcttgggctgatgcgtttattcccgatgcagggtgtgcccagtttcatgggaaggatggactggggaatacttggctggcaggggccggggctctggctgatggagctggtgtgcctggtgatgacatgtctggggatgacatgtctgaggatgtgcccgatggggttgtttctgttggcgggtatttggtaggggacgctcatgctcatccggcgtcggggtcttgttctcgtgtgggtcgctctcggcctgtggaccgtccccagtcggctacatcgacagctctcgccagctggggcaaaaggaggcgctccgttgatgctgcggatgggattgagtatctgattgagcaggttcgtgagtttggccgagacgttaccgtgctggctaccgggccgttgacggatgtggatgcggctattactcgggcaccggatattgcaccgaaactcaggctggtgatgatgggcggtacgcttacccaacccggcaattgttgggatacggtggccgagacgaatatcatccaagaccctgaggccgcgaatcgtgtatttcattccggcgcagacatcacaatggtgggacttgatgtgactcaccagtgtttgctaccgcgatcggcggccgaccagtggcgtgcgacggggaccaagcgcgggcggttcttggctgatctcgcggacttttccatcaaggcaaatttggaagccgaccccgcactgttctctggcggcatgccgttgcatgatccgttggcggcggcggttgcacttgattcttcactggtcgattgttttgatcttgcgttgcgcgcggagaccaataccggtgatttcaatggagtacgaggccggaccaccggagacccggttgggctggtgaatcattccatgccgcatgtgcatgtggcacttggtgcggattcgggacgttttttggatgagtttgcagagaggatggctgaggtgtgccggtaactcccctcagtccgctacacggacagctcgaccgcaattacggacaagctgccgctcgcattcttctggctcgactctcgtctcgccttcgcctacaaacagcccatcgggctgtttgttttacggctcagccccctcaattttgaggggcttaacaaggactatttcacacccccagcaatcaaggaccggcttcgccggactcatcattacctggtcatgtcctatcggcctcggccaggcggcgtgaacgaacagtccaccggactgttctttatttcacgccgccaaatcgtcgatcgcggtggatgtaatggtcgatggagcgccatagcacgtcacggccgcagtccgggaagagttcgggcacgaagtcgagctcggcgtaggcggcctcccacggcaggaagttggaggtgcgctgttcgccggaagtacggatcaccaagtcgcaatcgggaacgtccggattgtacagatggtcggcaatcatcttttcagtcacacggtcgccggaaatcttgccatcacgcacttcgcgagcgatggcggcgcaggcgtcggcgatttcagcacggccaccatagttgatgcagaacaccacatcgatgaccttgttgttcttggtacgctcctcggcggcctcaagctcgtcgatcaccgacttccacagcttggggcgacggccggaccaacgcacgcgcacaccccactcgtccatctgttccacgcggcggtggatgatttcacgcgagaagcccatgaggaagcgcacttcctggggcgaacgcttccagttttcagtggagaacgtgtacaggctcaaataccgcacaccggcttcgatggcaccggcgatagtgtcgaacaccaccggttcggcggcctgatgaccattggtgcggaccatgccgcgctgcttggcccaacgaccattaccgtccataatcacaccgatatggcggggtaccttgttcttggggaagtcgggaatacgggcagggtcgctgaacggagctgcgggaatgtccaacgacgtgtaatcaacgttctcaaaagccatactcatgaatctatcaagcgcagcgaacgaatcgggcgttcgaggtaatactccccccaatcttcaaccaactcctgcacaacccgctccacaggcgcggcatcaagcaccgaccaatcgccacgaatcagtgcatcgaactggtttaacacgaacggcgcgatacggcgcgcatcggtagtgtggtcggcttcgcacatcacgccgccggacgcgatggacaggtacgccggctccgccttgccgcataccacgcaagtacccaatcgtggcgtccaaccggccaaggccaaggcgcgcatcacataggagtcgcctatggcttgcggggcgtgggattgtttggcgagcgcgttcaacgcgccgatgagcagccgatattggttcgtcagctgctcgtgttcggtgctggcgagtttatcgatggtctcgacgatgacgttggcggcctcatacgccgcataatccgccgcgatcggagcaccgtaagcggcgaccgcttcagcctgggagaccacgtcaagcgagcggccttcagcgataagcacatcgactcgcatgaacggctcgagcctggcaccaaagcgtgatttggtgcgacgcacgcctttggcgaccgcccgaatcttgccatgcccacgcgtcaggatggtgatgatacgatcggcttcgcccagtttggaggtgcgcaacaccacaccttcgtctcggtacagcgacatctcatctcctttccccgcgacgcccggcagactctactcaatgaagtagtcagtaaataaacaggccccagaaggcgaacaccaacagtatgtacagcatggtgaaggccaccagccagaacaggactcggcccagacgggtggaggcgagtaccgggtcggcaccggtgacgatgtctcgaacggattcacgacgagggggtatctgaatcagtccgcgggcggaagcgacctctatcagatgcataaagacgcgggaccaagcccatagcaccagcacggacaccacttggatgaccggccagctccaatacatgacgcccggcgtctcggtaggagcgctgccccatgcaagtttgaccacacccataatcacctgtccaagtccggcaaagaagatgagcaatgtggcaagagtggtgagggtcaaagtcagcagcgcgttgccgaaaccatgtgcgaaaccgagtatcacaggccgttccggtatcagcatgcccgcacgtttggcctcgcgtttctcgcgccgccatcgggcatccgccgcgattttgcggcccagcgccaccagtgccagcacgatggatgcgagcagcagcagtaccaccgtgacgtgcaggatcacaccatatatggtgccgacgcgtcttgccttcaaggcgcccggcagaccgattgattggtacagattggtgccggccaccttttcgctggtctgcgtgagtccggcggaagtgccgacggcccaatcgatgagatcgtccacataggcgtccgcaaacggggtgcccgcttcggactcatcccccagacgcagcacatggttggcgaccggatagctgcgcacggtcacgttccagttatcggctttgtgggcgttgtagagaatcgcacgcacaccgtcgacctgcgccgtcatcacgtcttttgaaccgtaagccacataggtgggtacggcgtaagcggcgggtttgagcgtggcgaggtcggaattgttcagtccgaacaggccggtgtccgcgctgaacacgcgttggacgatggatcgatagccctcgttcgcgccgacaagagtgaagtcctgggtgacgaaaaatcccagtgattggcgtgggctgaacaccatcgggctcagaagaatctggaaggcgacgtccggatcgtcctcgagcagatatgaggagatccatgtcgattcggaggtggcatagatgccgaccttggcggcgtctacatcgctttgggctcgtaggtattcgatgacctgatcatatgccttggctgaggccggataatcgcggttgatgtcggtggtgctccagacgggtttgtcgagcactgcggtcacaaagccggccgaagccatatcggaggccacgtcgccaaaggagttgtcacaggtgccgtatccggcaccgtgcatgaacaccacgccggggcgcttgcctgatgcgttctgaggttcccgaatcaataccttgatggcttggacgccgtccgcattggccttgccccgatcaccaggctccttggtcagattgccgtcgctggtcatgttcagcgtgatgtatcgctcggtgacctcatacgtgcctttcgccggcagcgtttctccggacgggttatcgaaggtgacttcggtatcgtcggtgagcgtggccatcgactggccggtgggttcgatgttccaaggcaccgtggtcaggttggaaatggagaccagcacgccgatcaggataatgaagatgggcaggctgaccatcagccggtgggtgctggtccacggcttggatcgaacagtcaggcgatgctcttcttcttgcgacacgtgcgctattgtaatctgaccgcgatatttacgccgagggcctattcggccgaatcagtgaccgggatgctggattgggaccacgaccgggcctgtggaattgacgggcacttggccgtcggcctccatttgggcggcgatatcgttcgctatggtgagcagcgtgtcgacgatctggtcttcgggcacggtcttgatgaccttgcccttgatgaagatctggcccttgccattgccggaggccacgccgaggtcggcttcgcgtgcctcgcccggaccgttgacgatgcagcccatgacggctacacggatcggcgcggtcacgtccttcaggccttcggtgacggcggatgcgagctggatcacatccacttgggcgcggccgcagctcgggcaggagatgatgtcgaacttgcgggggcgcaatcccatgtattccaggagtttgcaccccaccttgacctcttcgaccggcggcgcggaaagggacacgcgaatcgtgtcgccaatgccctcggccaagagcgcaccgaacgccaggcaggatttgatggtgccttgccaggcggggccggcctcggtaacgccgaggtgcaacggccaatcgcccttggatgcgagcagtcggtacgtttcaaccatggtgatgacgtcatggtgtttgacggagatcttgaaatcgtggaagccgacgtcctcgaacatgtgcgcttccttcaaggcggaggccaccagcgcttccggagtcgggccaccgtatttggcgtagagttccttgtccagcgagccggcgttcacgccgatacgcagcgagatgcccgcgtcggtggcggccttgcagatgtccgggccgacttcgtcgaacttacggatgttgccggggttcacacgcacggccgcgcagccggcgtcgatggcttggaacacgtatttggactggaagtggatatcggcgatgaccggaatcggcgatttgcggcagatttccggcagtgcgtcggcatcgtcctgactcggcacggccacgcgcacgatgtcgcagccggcggcggtcagttcggcgatctgctgcaacgtggcaggtacgttggccgtgagcgtgttggtcatcgactgcacggagatgggcgctcccccgcccaccggcaccgggcccaccatgatgcggcgggacttgcggcgcgggtgcaagggcgattcgctggtcaggtcgaccggatcaccggttttgcggaacggcttttcgatgggattttccgtattcaaggtattcatcattgcttgtttatcaggttgtcggcgcgtcggcgggcttcaagctcaagctggttcatttcctccacgtccgtgaacagcgggttaccacgaagctcggcgtccatctggtccagcacggctttgaccgtgtccacgatgccgaggtacggcagccgatgatcaagaaacgcatgcacggcctgttcattggctgcattgagcaccgccgtatgcttctcggaggcggccaggcagtggcgggccagttgcacggcggggaacgcctcatcgtccaacggctcaaaggtccaagttgcggcttgcgtccagtcgcacgcggcggccacattggtcatgcggtccggcgcggacaggcccagcgcgataggcagacgcatgtctggcggcgaagcctggcaaatcgtggcaccgtccacaaattcgaccatggaatggacgatggactgcgggtgcacggtcacgtcgatgcgttcaggcgacacattgaacaagcgggacgcctcgatgacttcgaggcccttgttcatcagtgtggaggagttgatggtgacaaccggccccatgttccacgtcggatgatgcagcgcctgctcgggagtgatgttctccatgtcgacacgtttccagccgcggaatgggccgccggaggcggtgaccacaagcttggcgacttcggcgtgggttccggagcgcagggattgccagatggcggaatgctcggaatcgaccgggttgatctggttctcgcgcacttgcgcgctgaacagcagatgaccgcccgcgactacggactccttgttagccaatgccagctgggaaccggccttgagcgccgcgatcgatggttcgaggccgatcgagccggtgatgccgttcaatacgacattcgcaccggatccggccatggcgatgaccgaatccggaccgccggtcacgcggacaccttgtacgccggcctgtgcgagagccgcttgcagtgctggaaccttggtctcatcaaacaccgcgacttcgggcacatggaactgtgcggcctgttgcgccagcagctcgatatgtgctccgcccgccgccagaccggtgacggtaaatcgttcagggtgacgcgagatgacgtcaagtccttgggtgccgatggatccggtggatccgagaatgatgacggtggagttggaggctatgctcacttttccttcttcgtatcgtcattgttcagtgtggggaacgacaggtcggggatatccgaatcgaagttaccgccaagcgggaacagcagcgggaacgaatcgttggaatcgtgcttatcctgtgacagctgagctgcttccgtgtcgtgggaggcggcaacgtattcagatgattccacagccggacgggagaccgtgctgtctgcaggctgactatcggatacgcgaaccggaatggagttcgtgttacgatccggcttgctggtgggagcaaaggagaccggcatggcagcggacgcagcctcgtcggcagtgctattcacaggttgcgctgccggggcggagggtgccggggatgaaaccgaacccggtacctcattcaatttcagcgcattcggtgtatcaaggctgggcatcttgggagcgaaggacggcgcatccaccaccggaagttcctgagaaaccgcagccatgtgggcgagagcggccagagaggaaccgtcctgcaccatatccacgggctgttccgcgaacaccgacggggtcgatgacggagctgcggattcgtatgacgactgtgccggagcaaacgagggggcgctgccagcggtcacaccggaaaccggcgcggacggggcactggcgggaggctcagccgcaacagctgcggtaggagccacggaaggcgtctcggagacgggcttcgccgcagactcgttggacgtatgcaccgggtatgctgcgggagcaaaggaaaccggctgttccgcattggtgttattggtgcttgtggaagcatcgaacgatgcaggagccggcgcataggcgatcggtgccgccgcggccggcgccgcgggagcaaccggagccggagcagtgaacaagctctgctcggcctgatgcagggcatcgaatgattcgtcatgagcagcggcagacggcgcaaaacgttcgtcagttgccgggcgctgcgttccggaagcgaacaatggcgagacgccgttcgcttgaacggtcacgttcgtggcggtctgggcaggagccgtgggctcgccggacacgaaatcggccacacgtgcataggattccaagcgactcagcaactgcacgcaggcgttcaggaagtaatcgacctgtcgctcgtcatagcctttcttgcccttgcgctgggtgaagatcacattgttgaccgtattcgcattgagatcggccaaagaccgtacatcgtcttcggtcacgccgtcaacgcccaatgcggccgccgccttgtccacaatctggtcgaccagacgatccacctgcttcttatcgtacgaaggctgcttgggcgctccggacttgaagcgttcgcgctcgttacgctccgcatggttctggacttcgtgatacagcttctcggtcttcgccttccacgtcacacgcccatgctgtgcgatctcccatgtggtctgcttatcgaccacggcacgttccagacgtccaagcgcggcgtcaacctgtgcgatcacatagccgttcttgcgcaaatcaaaggacacgttctgaatgtcatgctgggtgagattcatgccctcgctgtcatacagagcatgggcgcgctccaagaaagcgtccacctgagcggggtcatacccccacttgcgcttgcccgcacgtgcgatgcccgacttgccgtccccttcacgaagttcctgcgccatcggctattcgacctcctgctggatataaacactctgccacaactttacgtgactattgagacgcatctgaccaagaagaccgaaattcacgattttgtagcagtactgccggtttccttctgcgcgcatctcactgagatttcagaaccccttgccgaagactgtcagggaatatcgtcacagcccatgtctgtggaatgaggggattgcacgaagtgatgaaaaatgaaagtgggcaatgagggactcgaacccccgacatccaccgtgtaaaggtggcgctctaaccaactgagctaattgcccgcaaatgacaacaatagcgtatggccggcactgcgcgacacgtggtgtcgcatacgcgtgccgtagcgctcaatcgcgatgacattcagtcacgcccagcagcactacgcagcacgcgacgccagtcaacacgcttaaagtcaagcgtattgattgaggcttatcagcggcccctgccgaatgcgcgcaggcggatgccgttccagtccgagctgacggtcagcggggtggcggcgttcataccggcggtctgtgcggcggactgcacggtggaggagctggcggcacccgggcggccgggcttgggagtcagtatccacagcgggccgtcattgcccagtaccgcgtaggcgtcaacgatcgtatcggacaattcgtcctcatcatcgccgtcgcgccaccatacgatgacgccgtccacagcggagtcgtagtcctcgtccacgagatcctcgcccgtgagctcttcaatctgggcacgaatggaatcgtccacatcgtcgtcccagagccactcctgaacgatatcgccgggctcgaaaccaaattcttcagcgttctgtgatgccgtttgattcacaggggacacattagcaagtcttcgcgaacaaatgcgttaacgcggccgaaaatcgccgcattgtgggcagacccatgcgagtcgtctcaccagaaacaacgactggccgcgcgtgtcatgcctcgcaatgaggcaaatcgtcggcctgccccttgccaatggccaccaacgcctgatacgcctcgtccagcgtggcgaccttgacgtcgcgcagaccatccggcacgcggccggccaaatccgaacaattcgatgcgggagccaggaaccatgtggcgccatcgcgcttggcgccaagcatcttcagctctatgccgccgattctgccgactttgccgtccttgtctatggtgccggtgccggcgatggtcttgccgccgctctcgttggcgggggtgagtttgtcgatgagaccgagcgtgtacatcatgcctgcggacggtccgccgatgctgtccacgtgcatcgtcaccttggcgtgttgcaatgtactggcgtcaatgcccagttcgtccgcatgggctttggcatacgccagaccgacggcactggccgaatcctgggaaccggccatgtcctgttcgactttcttctgatactggtccgcactctggcccaccggtaccgtggcctcacgcggcatgacctccacctgcggattggcccaaccccagacggcctgcgcgttgatgatcgggtacccgggcacgccggacgcgttcaccgtggtcagcagcagcttgccggaatccttatacgtcgtcacgccggtaccggtgatgtcgataaccgcaccatcctcgaccttgcccagcacgtcttgggtgggtccgggcatctcgatgacgtacgggctgggcagcagcagaatcaccacaccaagcaacacggcgaatgcaccgacgaaatggcgtttcggacgagcggccgcataggcccgagcacggctgattccacgagataggcgcgaatcatgcttcacttcgaacgatggcatgcgcccatcccccgcttccgaatccgcagtcgggctcttctgctcctggacgaagtctggttcctgattcctgtggcgtgcaaacataccctacagtgtaagcggagggccgaaatcagccgaaaacgaacataaaccgaaaatattgctcggccacgagcgaacaggcccgggcagaccctacacttggggtaacacaccgcggcaaagaaggatacgcatggacgacaacgcgattcacgagtggctgatcaaatgcttcggccccattcagggcgagatggcctggcagcagatcagccagttgcctgaggagatccgtgaacagctgatgagtcaggaccccagccgactgcccaatccatccgaagtccagcagatgatggccgcgttcagcgccggcggactcaacacgatgggcgatatgcagcgcactgtcgaggaagggccgatcaacgtcaagctcgccaagtcgattgccttgcagcaggccaacgcctccggttccgcgtccagcgtgtccgccgtggatggcgaggcggctcgccgcgcgatgagtgaggcgaacctgtggctggataccgcctgcgagttcaatcccgcgcccggcgatccggatgtgctgacccgcgccggctgggtggaaggcaccatcgaccagtgggcgaagttcgcagctcctgtggccgagtcgatgaacgacgctttggcttcggtgatttcggagcgtcttggcggcgcgttcggcgatggcgagattgccggcatgttcgccggaccggtgccgattccgattcccgacggcatgaaagatccagcccagctgatgaagctgctgggcaacacgtcctttgccatgcagttggggcatgcggccggcaatctgagccatgaagtgcatggcagtttcgatcagggcatcgcattgctgaagaatccggctggtggactgattgcccagaacgccaccgaatacgcgaagatgctgaacggtgagactcctgcgcccgaggccgatacggccggcacttcaaccgactcggtcaatccgttctccacatccaccgacgcttccgccaatcccattggcttcacttcggccggcaacagcgatactccggcaactgacggcaccgcccaagtctccggctccgatgcttccgccgacgccgccgcgttcgaggctgcgctctccggattcgagaccaccgagaaaattcccgaatctgaagtgctttccttcctggccctgcaggaaatggctcacgcccgcctgtatgcctcggtaccgtggctgatgccgcgtttcgaggcgctcatcggcaagtacgcacgcggcatctccatcgatctggatgcgatggaggaacagctgcgtgacgccacgtcgatggatccggagtcgatttccggcgcggtgaatctcaccaaggtcggcatccccgacactcccgaacagcgcgaggcgctggcttcgctggaatcgctgctggcgatggtcgagggctgggtggattgcgtggtgtggcgcgccggtatggcccatctgcctcatatcgaacagttgcgtgagatgatgcgccgcgagcgcgcgatgggtggccccgccgagcgtacgttcgaaagtctgctcggtttgcagctgcgccccaagcgcatgcgcgaggccgccggattgtgggagatgatcaccgccgccgaaggccctgaaggccgtgacgccaagtggtcgcatcccgatctgctgccttcgctgcctagcgacaagcccgcagatggcgcgtctccgtcatccgacgccccttcaggctcctcttccgatgccaacggttccgcctcccaccctgccgcagatggcaagaccggcgatatcgattgggatgccgaactgtccaagcttctcggcgaagacggagaagatggcggcaacggcaactcggaggatacgcaggcatagtcaaccggccttcggccaattcccgctcctgaatgttcaggagcattcagtatgcatgaacgacgcccgtcacaaaaatcgtgatgggcgtctgtgttgcgctccataaccatccttggtccgcgcatacgacaaatgcagcgaatcctcagctcgggtgatgcccacatacataagccggcgttcctcttccagcgcatcccccgtttccggcgaaccgtacggcaagagtccttccgaacagccgatcagaaacacgtgcttgaattccagacccttggatgcgtgaatcgtggaaatcgtaacgccgggatcgtcgtttgcggcaagtccggtggcgtccaaacccatcgcctccaatagcgcacgtttggacgcggcatcgtcggcgagcgcggatgattgccatcccgaatccttacgaacgcggtatttcagtcttgcattgcgcaaagcggcaccgaataccggctgttgggcgttgatgcgggtgagaatcgcgcaatcggacggcttggctccgttggcgaccaaccgggcgatgcgtgccgccacgccctgcgcctcttccatatcgctctcataagcggttcgggtaacgcgcgggccggattcgcgggcggaaaccagtttcaggtaatcctcacggttcggcgcggccgcaagcacccggttggcgagattcacgacttccggcgtcgaacgatagtcggtgttgagattgacatcggcggcgagcggcccgaattcatcggcgaaacgcagcagatcccagctggaagcaccggcaaacgagtagatggtctgggccggatcgcccacgacgcatacgttgcggttcatcgcgctcttgccgtcaggtcctcccccgcccagccacagggtcagcagcctgtgttgcaggggcgagacgtcctgatactcgtcgacggtgagccagccgatggtggaacgaatttgggcggcggcttcgggaaaatcatccatgatatggcatacgagcagcagaatatcgtcaaaatcgatttcgccacgcgaggtcttttcctgctcgtaggcgctgtagacgtcggcgaaccgagcggtgtcaagtccggcgggcggttgcctatgggcgatggcacaggcccgggcataatcttccaccgccaccaacgagattttggcccaattgatttcggcgagcacatcgcgaacggtcagcggatcggcatcggtacgtgcggtggcgcggatgatcgcgcgggagacgacgtcacgctgatcttcgatcacatgcgggaatggagcctcgcatatgtccgcccagacgctgttgagctgatgcaatgccgctgagtggaaggtcgcggccgtgactccggcagttcccgcacccgaaccggaacgtccgacaccttcccctacgccgagctggcccaaccgtgcgcgcatttccgccgccgcttttaccgaaaaggtgacggcaagcacccgctccggcttccatgccccggtggcgcaggcataggcgatccgccgcgtgaccgtgcgtgttttaccggcacctgcgccggcgatgatgcgcaccggcccttgcaacgtagtcgcggcggtacgctgccgctcatcgagcccctcaagaatcccctgcgcctgttccatgcgtccattgtggcacgattcgcgctcacggcacgactcacgcctatggctgaatcgggctcacgacaaaacatcgccagaatcatgcgttttgcgtgtcattctgcggtgcgaatcgccacggatgtattagtgtggaagggtgatgaaacgtagcgattatatgttggcggcactcgcctcagccgtcctgccgaatctgggggtggccggcgtacgcgagaacgtgcaggccagcgcaaccgacgaggccaaaggcatcgatcagaccgtgatccaagatgcctcgggcaagttgtacgacgtatacgccactgacagcaaggaagggcgtacacgtctgatccgccgtgtgaaagcggcgcagacactggcagccgcgcgcgagcttggtggcctcggcttcgatatggaccgtgtggtcgcattcgtccc

SEQ ID NO: 799 - DNA, 17309 bp, Unknown
  R14_18m  MAG No. k141_4893
atcggacgcacggaacacggactggcagaacgtacgattgcgatccgatatgctggagctgatcatcgattcggcccacccatgcagaccgaccgtgaaccactggtccaacagccagaaagcacccagatcacgcgcgatcccatccaacggcgtggcacagggcaacttccgctcccacttcagcaatgacctgtacgtgcgccgggcacccaccggcatcaacagcgaatccggccgatcgtaacaataaatacgagacggaccatacttgaaaatatgacgcgtgggccctgacgacctctcaaagaacggcatgacaccaccatacgaccagcatcgccgcgtacacaatacacatcacacgcggccggcaagaaaaccgcacaactcctgcgccaccggtagcatctgcgactccaaaccggggttcatgaaacggtcgtagatattccacctatcgcacagggacacccacagatacgcccgccccgaagcaacaatcacattggagtgcaacggatgagcggacaatacctgcaacacattctgcggcggccccaccaactgtggccgaaccgcatgccccaacaaatcgcttaccgagcaccacgcatacccccctgcgaacgagccggcacaggcaacaccaccacctgcatataccgcatggcgtaattactcaaaaagccattattgtcatacacattcagcgtgaacgtcagccacggtcccttgctgtagaacctgttcacccgcatattacgcacggcttcgccacgaagcaccaccgtgcttccagcatcgacggtccgtttggcctgccaatcacgcgcatggaccgaatacgtgaccgaagaaactccgggagccggctcataacggatctcaaccagcacaggaaccccgaaaccacggaaaaagcccaacacatcatcgcaatgcaaacgcacgccaccacgaacgacgcgatgacgccgttgcgataccaataccgccacgtcggccacatgcgctgcctgacacggaccatacgccagccgagcaacgaaccagccaccacgaacacgcaccagacaacaatgccgtaccggaaaaccctacccacccagaaaggaaaaccagatttatcagcattcagcagccacagcacgccgacgaacaccacggcctccagcatgtaccacggccaatccaactgccgacgaacaaccgcaccggcaacagcatccacacgatcccacatcatcaaccttctctcatcaaaaaccgcttcgtaaggcaaccatacagtcagcagtacggacaacaagccggctatcacacgtaccagcacagctcctgtgccacacaagcagcatctgcgactccagcgccaggggccatgtaccgcgaatcattgtcgcacacattgatcggcgtccacaggcaagccaggccattcgtcaccttcatgctgtcatgatttccgtggaaggccggggtgagcgctgcagaagcgcagacgatggccagtggggtctgttcgtccgtccgccatggacagtggccggccgaatacagcctcatgcctgtgggacggcacgcggatttggccggtttccgcgcggcgtcccgcaggaacgtgggatggtagagaaatcaatcgtttgacgttcgtggcgttccacactatcaaccgccagaaccgcgcaatcacgccaatccccgttacggaccataatcatcccccgggctctctgcgggacggcagacgaaaaaccgcgaaatccgcgcgtcgtcccgcacttcgcccggtccacgaacaggacaagcatcaccgatagaccgaacacacatctacagccgcgacaagaaccccaacagctagccgcccgccccggatatcgccgtccaatagtaaatcgagcccaaaacgcaaacccaaagcactgactcagataataaaactcggattttccaccacagacagcgagaaactctcccctataccaagtagcgtacatgccaccttgctcgatagacgaacaatgagaagtatcggttaacgggcatgccgggcaggtcgatgggctctggcgcgggaacgaagacggcgtaccagcacgaatgggccggcaaacgtgatcgtatacaacacgacggcgaggaacacgctgagccatgcggtgaacatgcccaacggcatctcctctaccggagtggtctcggctatgcatgcaacgatctatcactccgatgttgtggtcagtatgcgcggcagttgttcgtcacggttgaggaaagaacgcgtttggcaacgaagtagcgtacgccggccttcctcagtgcgggtgtataccatggtgcaatgcgtcaggcagcggtccaactgccggcgcagtatttcggcgtcctgctggcggcgggcaaatatggacgggaatgggaagcttacaccatacgtgcgcacgccccattccttgccgatgatgacatatcgcggattgttgatgggcgcgagtagctccttcataacgccggcgaacagcacctgctcgcgccgcgaaccaccaatcagcatggcacgcaacgccgtgaatctgcgacgtgtctggcggatcgaggaagtcactcacctctttgcctaccgcgttggtttctaggcgctcaggttccgcagtcgccaaatgccagacattggccaccttatcggggtctgcggccacgctgcggttggcggccatgctgtatgcttcactgcatcagtgtaaggcatgaatcaataggttttgagccccagatcgatggtgagaatgatgccggcgattacggcggcggcgcgcatgatgtttgcgggaatcttgcgggtgatgggcggggcgatgtacccgccgatgaagcagccgatgtacagcatgatggcggccggccaatcgaccgcgccttggatgatgaataccactgaggcgctgatgttcgcgcctgtgccgatcagggttttcaatgcattgatcttgtggaatgggccgattttggcggcatcaagcatggcgagagccagggtgccggcgcccgcgccgaagtagccggagtagatggcgactgccaccacgcccagccatacccaccaggaatcctggctcatgggctgcacgagttgttccggcgggcggtgaggtgcggtaggggtggttgcgcgcttggcggcatcagtggcatcggtggcttcagtggcttcgatgtgcttgagttgcgcggtggcatccgcggcggcctgcttggcctgcatgcggccgcgcggattgatggcgatgatcagcgagctcagcaaaatcagcactggtgcggcgaattcaaagacactcgggtcgagtttgagcaacagaaacgcaccggccaccccgccgaacgcgccaatgaccacatacgtaatggagcgtaccgcttggcctttgagttctttgcgcgcgcccatcacgccaccgatgcccgtgccgaccacgccaacggtgttagaagcgtttgccaatacaggcggaatgccgaacgcgagcaaggccgggtatgagaccagtgacgatgcgcctaccgcatagcccacgaatcctgcgccgattccggccaacagaatcagtagtaatgaagttatggaaaagcccgcaatcattccccgtatccttgtcgctcatcgaccggcacattgccggccttgagcgagaatacgctgttgaggattggttgcgggttttatgttggaatgtggacgtagctcctcgcggaagcgattccctcagtcgcctgaggcgacaactcccctcgcacccgaggggagccagaaggaaatcagagcgcttcgttgtattcgcgaaccttgagggtgcggtgggaggatgccacgttttcgacgatcagacgcttcagggcgttgtcggcggcaatgtgctcgtccagccaggcgtcaccgagcttgaccagcgtggcgggatcggcgtaacccgggtacaggccgttgagcaaagcctcggccatgtggtaggtcttgttcgcccagatccagtcgacggcctcgaaataccgggcggcgaacggctcggccagatcggggcgcggggtggcggagaagccacgggccacggcttcgagctgggagttggtcagctcgtcgttgtggagtgcctgatcccaagcccattccttggcttgcgtcgtggccatggaggcgcgggcgccgtaggcgaactcgcggttttccgtggtctccttcttggcgagctgcgcgtccacgtcgtcgttggtcatctcgttgacggaggtgagcgcttggacgatggtccacgtgaagttgttgtcgatttcgaggccttcaagacgcacggtgccgtccagcagaccgtgtgcgttggcggcgaatgcggcatcgccctcctcgccatagcccaggtaggcggtggcgagctggaactgggtgtccgagccggcttcggcggcgttggccagggtccacagctcggcggccacgtggcgcagcacatcgtcgcggcgggctggcgccacgtagtggtgggcggtggtgctcatgcaggccagcgcgtaacggaaggtggtggattcggtttccgtggccagaagacgcagggtcatgtccacgaagcgttcggccgggaattcgccgtcacgggtcatatcccagaaggcgagccaggtcacggcgcgggccagggcatcgtcgaaacgatgcaggttggcttcggcgaatgcctgggattcggcgtcgaaacgaatcttggtgtaggtcaggtcatcgtcgttgaccagcacgaatgccgggcgcggcttgcctgccgcggcctcgacgatggtggtttcgccatccacgtcgagttcgaactgctcggtgcgcacgatcttgccggtttcggcgtcttcgttgtagaagccgacggccaggcgatgcggacgcagcaccgggtgttcggccggcgcgctctgggtgagcttcaattcggcgatggtgccgtccgcgtttacggtcaggccggtggcgatcgtgttgatgccggattcctccagccacttggcgctccaggccttgagatcgcggccggaggtcttctccagttcgctcagcaggtcggccagagtggcgttggagtaggcgtggcggttcaggtagttgtggataccttcgaagaactgcgtgcggcccacgtagaatgccagctgcttcagcacggaggcgcccttggcgtaggtgatgccgtcgaagttgacgtaggtgtcgttgaggtcgttgatcggggcgacgatcgggtgcgtggtgggcagctgatcctggcgcaacgcccagctcttctcaccggagcagaaggtggcccaggcgtcatgccattcggtggcttcggcagtggccagcgtggaggtgaattcggcgaaggactcgttgagccacaggtcgttccaccacctcatggtcacatagtcgccgaaccacatgtgggccagctcgtgcagcacggtcaccacgcggcgctcggccagcgcgtcggtcaccttggactcgaacacgtaggagtcacggatggtgaccatgccgatgttctccatagcgcccgcgttgtattcgggaacgtagatctggtcgaacttggcgtacgggtagggcacgccccaggtcttggcgtagaacgcgaagcccttcttggtgatgtcgaacaggtagtcgacgtccttcgcgaaggccttggccaacgactgtcggcagtactgggccatcggcacggtgcgaccgtcttcgttcaggtattcggtgtgccattcggcgtacgggccggcgcagatggcggtcaggtaggagctcatcaccggggtcggctcgaagtcccacagacgggtgctttcgttcggcttgtcgccgagggtgccgtcgagggtttcgcgcggatcgtcctcgatggtggcaaccggcatgttggaggtgacgatccagctggcgggagcgagcaccttgaaatcgaaggtggccttcaggtcaggctggtcgaacacggcgtagacgcggcgcgcgtccggcacctcgaactgggagtacaggtagatgttgccatcggacgggtcgaccgagcggtgcaggccctcgccggtgttggagtaacggcacttggcttcgacggtgacctcgttcttctccttgaggtcggtcagttcgatgcggttgtcctggaaggccacggctgggtccagggacttgccgttgaggtcgatggatgtcacttcgtcggcaatcaggtcgaggaaggtcgacgaaccaggcttcgcgttgaagcagatgagcgacttggaaccgaagttcttcgcgccgaccgtcaggtcaaggtcgacgtgataatgaatcggcgcttcgataacggccttacgttcttcggcttcaatacgagtgagattagaaccgggcatgacttcaattactccttacggtcgtccctggataatccggactacttggtttctacggtttcgacgtcctgggcgatgtcggccacgacgggcacgatcatcggcttgcggtgcagctggcgcgcaacccagctgccgagcgtgcggcgcatggtctgctgcagcttgtaggtgtcacgcgtgccctgcatcatctggtcgttgagctgttcgacgatctggtgacgcaccttgtcgaactcgctttcgtcctcggccacggcgttcaggtagatcttcgggccggtgacgacctcgtggttgtcggtgtcgaccaccacgaacgcggatacgaagccctcggtgccgagaatgcggcgcttttccagctcgtcatcggtcagctcgccgacggaatcgccatcgacgtacacgtaaccgcacggcacggagccgacgaccgcggccttgccgtgatacaggtcgaccacgtcgccgtcttcggccaagaccacgttctgcgggtccacgccggtcttgacggcgatcaggccgttggccaccaggtgacggttctcgccgtggatcggcatggcgcacttgggcttgacgatgttgtacatgtacagcagttcgccctcgttgcagtggccggacacatgcacggcggcgttgtcgcggttgacgaccttggcgccgagctgcacgagcttgttgatcaccttgtagacgccgtgctcattgcctggaatcagggagctggcgagaatcacggtgtcgaactcgttgatgtggatgtcgcggtggttgccgtcggcgatgcggccgagtgcggccatcggttcgccctgggaaccggtgcacatgaagacgagcttgtcgtcctgaatgtcgttggcctgcttcaggtccacgacggtgccttcggggatgtgcaggtagccgaggtcggcggcgatggacatgttgcgcaccatcgaacggccgacgaacacgaccttgcggccgtacttgtgggcggcgtccaccacctgctgcacacggtgcacgtgggaggagaagctggcgacgatgatcttgcgggtggcctgggcgaacgcttggtcaagggccgggccgatggaggtctcgggcttgacgaagccgggcacctcggcgttggtggagtccatcatcagcaggtccacgcccttttcgccgatcttgccgaattcgacgaggtcggtgatgcggtggtcgagcggcagctggtcgagcttgatatcgcccgtgtcgatcagggagccggccggggtcttgacgtagacggccagggcgtccgggatggagtgggtgacgttgacgaattcgaggtcgaaggggcccaccttgagcttctcacggccggcaacctcaaccttggtggggttctggtggtgttccttgcacttggcgtccacgaaggcgagggtcagcttggagccgatcagcgggatgtccggacgcagcttgagcaggtagggcacgccgccgatgtggtcctcgtggccgtgggtgagcaccagggcgtcgaccttgtcgagacggttcttgatgtagctgaaatcgggcaggatgagatccacgcccggctgctcctcctcggggaagagcacgccgcagtcgatgagcagcaggtgaccgttgtattcgatcacgttcatgttgcggccgatttcgcctaagccgccgagcggcgtgatgcgcatggagcccttgcggtacttcggcggggcgatcagcacggcatcctgctggggtgcggtggcctgccgggtggcgttgatcttacgggacggcgtacggctgttggatccgttggcgttgcggccgcgcgcggaaccgcgacggcgagaattcgtgttcttgcttgttttcttttgttcttgtgccataacctttttgggatttctgttgtggtgcctctgctctgtcatgcaggggcggcgggctggcaacccgtatgcagcgtttcgggcttacagcagtccggcagcgcgcatgccctcttcagccttgtcaagctgagtggcgtcgggaccgatgttcggcagacgcatggtggtggaggggataacgcccttgaccttgagcgcagccttggccatgacggcctgatagccgtcgccattcaacgcgtggacaaggggggcgagctggttggcgaggcgacgggcggtggtgatatcgccgcgatcgaatgcctggacaagctgctgcatggggttggaggcgacgtgggcaatcaccgaaatgatgccgacggcgccgatggagaggaacggcaggaacaggccgtcatcgccggaataccaggcgaggccggtgcgctgctgcttctccactgcggctgcaagatcgccggtggcgtccttgacagccttgacgtgttcaagttcggccagtcggtcgtaggtttcgaccttgaccttcaagccggtacggccgggaacatcgtagacgatgatcggcttttcggcggattcgtcgacggccttgtagtggccgacgataccgtcctgcgaggggcgggaatagtaaggcatgacgacgagcaccgcgtcggcgcccgcttcctgagtctgttcgaccatacgcacggtgtgtgcggtgtcgttggagccggcgccggaaatcaccggaacgtcgacgacctccttgacggccctgaccagctcgaccttctcatccatatgggtgacgggcgattcaccggtggtgccattgaccaccagaccatccgcgccatcggcgacgaggtatttggcgagcttctgcgcggcggcgaaatcgacgctgccgtcggatttcatcggggtgaccatagccggcagaatgcggccgaaaggtgctggctcaagaaggtgcatgtcatgctcgctcatagtgttcaccgtacttcccattgtggactcttatactacgtaccttgattgttgctgaatgcgtggcattatggccggagccggtggcaatgccgtgatgcgcgtcccggcgcgcttccctgcctgaaatgcgggggcgactactggtcgactgcgggtcgattactggtcgactgcgggtcgattacaggtcgaggaagcggtcgaggccgatggtcaggccggccggagcgtcgccggcgagcttacgcacggcaagcaggacgccgggcatgaagctggtgcggtcgaagctgtcggcccgaatggtcagctgctcgccggcgttgccgaagagcacttcctcgtgggcgttgaggccgcgcagacgcacggcgtgcacgtggatgccgtcgaccacctggccgcgtgagccgccatcggtttcggtggcgtccggcacgggggcgagtcctgcggccttgcgcgcttcggcgatgccgtgggcggtgtgaatggcggtgccggagggggcgtccaccttggtggggtggtgcagttcgatgacttcgacggattcgaagtatttcgcggccttggttgcaaagtagtcggccagtacggcggagatcgcgaaattaggtgcgatgaagaccttctgggtttcgggcttcgggccgttggcgatggcggatttgacctgggcgagtttctcgtcggtccaaccggtggtgccgaccaccacgtccacgccttggccgatcagggtcagcacgttgttcaggctgacggacggcacggtgaattcgacgaccacatcggtgttgtcggtggtgacctgggtcaggtcgtcgccggcatccaatgcgagcgccagctgcgtatcctcggcgttgttcaccgcttcgaccacgtgcgagcccatgcggccctttgctccgaccaccgaaaccttgatcatgtcttcttccctgtctacccgtacctgcccggcaatgtacccggaacgttttccaatcggcaatcagcctatcaccgccaagccctcacgccaatatcccgtccacagaatcgagctccctctgacaagccgaaccgtgaagtcgagctccctctgatgagccgaaccgtgaagaaaacgccggaggcgtttttaggtgagggcgaacgacagtgagcaataattcagttggccgaaagccatcattaattgcgttcgagctggccgcgaagcggactgagggagagaccccggcgaagccgccaaccatccatcaggcgtagcccgatcccgtttcacccacgccgcttggccaaggcccatccggccaacgccaatggcacggacgccagcgtgaagatgaatggcagcatcatgcccacatgagggttggaggcgtcaagcacaatgccggccacggacgagccgatcgatgtgccgaccgtgcctgcggtggttacccagctcagtccttcggtcagggattccgccggcaccagatccttgacgatgaggttgccggtggcgaacgtcggcgagacggtcaggccggcgaggatttcgaagacgcccagcaggatgagattgtccattgacagccggaagaacacgtagccgacggtcagcagcgacaggaacatcaccatatgcgcccaatgggagcctttgagtcggcaagagccgaacaccagcgcgccgatgcacgagccgaccgcgaacatcgccaattgcagaccgaggaagggctcaagtcccatggatttcatggtggcggtgatggacacgtcgaaggacgtgaagctcatattgaacacgatgaacacggcgagcaacggcagtacgccggcatagagcaatacgctcttgggcttggcaccgctacgtttgagctggcgcagggtcagctggtcggcatcttcgcttgcagcgtggctgccgtcatcatgcgcggccacggtgacctgttccacgataaccggcggctgggtggatttcagcgagaagaatatggtgccgccgataccgcatgccacggtgggcacgaacagttgggataccgggtgcacggaggtggccagccaagccgccagaatcggccccagaataaagacgatctcgtcaatggcggcttccatggcgtaggccgtgttgagcagctgttcaccatcttccacaccgcgcaacgcataggaccagcgtgttcggaccaatgcgccgaatgagaactgcgtcagacccatgatgatggccaggacgaacagcagcggaatcggcacgcgcaccaacgccgcgaaggcgaaggcgagcatggccacgatctgcacggcgagcgcaagccggcccacgcgggcttggccgaaacggtcgaaggcgcgggcgtagaacggggtgacgcagctcatggccagcacataggcggcgctcatggtgccggcgatggtccaattgtcgtagagatggttgagcgccagaacgatgccgagactcatcatggagatcggcaatcgtgccaccgcgccggacaggcagaacgccttggctccgggcagcatgaacaggcgctggtagggcgagtgggcagcggacgacttcgaaaccgcgcgagtcgtggacacaataactccttactggtgcgttgtccggcacgtgcgcccgcccacacgtgccatccgagggtagcggttcccgagcaacgtcacgcggtgcgtttcaaccgcggaccggtacgtggccagtcgtcttcatcgtcggagatgccttgcgatgcataaggtctctccaccggtgaaggccgtccgatgctgtacaggtcatgagcctttgggctcagtcgttgtcagattgttcgggaatgccggagctcaactcggtaaggatttcctgtttggttttcgcgcgggcgtgaagctcgcgcaagccctcgtcgggctcactgacatagtagagagtggcgtcgatactgtccaattccacaccttcgaccgctgccagcagcagtcggtacatgtcgagctgggcgagtttgcgggtgatgtcgtctggcttggtgggccgacgaccggttttccagtcgaccacggtaaagcgtgcggtggtgctggacgggtcaagtccaccgatgaataccgcatcgagtttgccattgaccaggcccacgcccggcacgtccacgacgatggcacgctccgtccacgccgggatgcgcttggcccacgatgattcggccagtctgcgctgccacgccaccagcttggactcggtggcattgtcgctgcttatggaagtggcggatacggcggatacggattgttgagccgtgggctgtgggacagcgggctgccgtgtggatggcttgcggcattgccgctcccgttcggccaaatcggccaacatggcttcccgggaaacgaatcccgcatcctgacctgtatgcggcatgcttggttcggcttcatatgccagtaccgcttcatccggcttaccggcattgatgaattgctcggcccacgcatggaactgcgtgccggcctcggccgccggagacgatatgcgcggaatcgggcggataatgctacgccagtagaggcgctcctcccgttcgttcatgccacctacgcgggcttgcaggcttgtcacgttctggcgtcctgcggccagaacgcgttgcgccttggctttgactgcctcatcaagcgactggccgctggcggcatcggccatcaaatcggcgtcgtccaccagcaattgtgcccgttgcaggagtgggccggcgtcttggtgctgctcaagtgacgaggaatctgcggcgatgacatcgatgccgcgtgacagctgttcatgcaccgcgtcgctgagggtagccggccacggcaattcggcggcggcattcgtctgcgtaatcggcgtttgccacgcctcccccaccacggcgtcaccgtatgccgcggcatgctctccgataaagaacccttcgggagtggcaatcgcttcgccttgcgccgagatcagcatgggcttcccggcattggcggcttgcagccgttccacacagtcctgagccgatatcgcatgctcatgggtttggagcgcgtcatgcacttcaagccagaaattggatggctgagcggcgcgagagcctttgggcaccactgacgggtcccgcccggattcgcccgtataggcgcaataggtcatcagggcatcttcccgcgcacgggtaagcgccacatacatcaatcgacgttcgtcggcatgcagccgacgcccatattcctccgcctgcgtcaaataccaaccggatgcatccacttcttccacgccatcgccgaattcgcgcatggagccgaacacttcatcatcgataagctccacatcatccaaagccgccaacgatgcgatggggtcggcttccacatcggcatcatgggggaatcgcggcaaaatgccggcatcggcgcgcataggcacgggcacggcggtggggttggtgagccaggagtcggcggtctcgtgatattcgggtgcggtccagtgaccttgctcggtgcctcccgtatggtgttcgtccagcacgatcttgagatggtcgccctgattgctggggaatccgccggcggtaagccccactaccgcaacggcatcccattccaaccctttggactggtgtacggtcatcagttccacatccaccggagcgtcggggagactggcggcttcatcctccaccgaagccagatgatccacccatgtgatgaacccatgcaacgagggagtttgctcagcggcaatctcttgcgtgtacgtatccaccaaatccacaatcgcatccataggcatatgcgccaaagcgggattggcgcggtgctgcggattatgcagcacaccggccaatacggtgtcgatgtcaagatccaacgcttctatgccggcgcgaatcacgtcgcccagtggccgcccgacggcatcatgcacctgacggagcatcaccgcggcccgggttatggcgttgcgcccgtgtgcgctcaaccgttcaagcagttttaccaggtcgccgcgtagcaatacgtctggcaggaataccgcattggccacctgatcgcggtactcacgcaccacagccgcccattcattcgctggtgtatccggttgggcaaggccggcctgcaccaatgcttggaagcgttgttccatgttctgttcttcagcaaaacgggccaacatagtcaaatccgctgcggacatggtgaatcgtggcgtggccagcaagcgcatcagcgatcccgtatcggtgtggtcggcggccacgtgcagcaacgccatcagatcgcggatttccggacgttccagcagcgcggaatagccgaccacgaatgtggtcaatccggcctgttccaatgccgactgatattcgggcatatgtgatttggaccgaaacagcacggcgaccggcgctttctgttcgcccggcatctgttcctgttgttcggctgcggaacggtgccgtgcgatggccgtcttgcagaaacgcactacggcgtcgatctcctgcccggccgtggcgaagcccagtactcccaatgttccttcgggggcatcaggcatggggtcgagcgatgagacatcgacctcacgcatcaatgagctggagggacgcgacggattggagcgcaacggcagcgtgagattattggcggcttcgagcactatacggctgttgcgcctggtgacggacaacgggaatggcttgtatccggcaggcaggtggaaatcttgctggaacatacggaatgcaccagggctggcaccacgccatgcgtaaatcgactggaacggatcacccaccgcgttgacggcggacctccgtgacgcatccacatggaacagtgctgccagcagagcggcctgcgtggtggaggtgtcctgatattcgtcgagcagcacatggctgtacctgcggcgcgtgcgctctccgatggaggggaagcgctcgataagctgatacgcggcaatggtgaagtcggagaattcggccatattgcgttcccgcttggcttgggcataggcctccaccagctggagcagaatatcgcgtttgcgtgtggtctccagcagcgcaccgcaatgataggcgcagcgggcgtgcaaatgttcggcacggtcatcgagcttggcttgccagctggcgtcggtatctttcttcagtcgtttgatcttggggattttcggctcgtcctcgggcatgggttcgtctgcgacggcttgctgcaatcgattgatgaatgccgaatcccattgccgtacttgattgatcgcatcatcgaagctggtgcagccggcaccgatcatggcactgccaatggcatccgacaacgccagaacacggttcgccaaactggagaaggcgccaaaatcctcactgaacgccagatccatgtgactgtcgatgacttcggtggccagttgaagcgctccggctgcgctcaatggttgcgtgttctgatcgaatccgacaagcagtccatattggcgcacgatggtctggaagaaggcgtcatacgtgaaaatggccggcttgaggaatgcccgatcagacaccgtggcggtcgtagagcccgccatatcaccggccactgcggcggagacgcgttccagcagttcgcctgcggccttgcgtgtgaaggtcaggccaaggatgcgttcaggcgccacacctcgattgataagcgcgatgatgcgttgggtcatcgtaaaggttttgccggaaccggcaccggcaaccaccagtacgtcagcatcgactggcgcatcgatgatggcggcctgttccgcactgggagtgaacgtgctcatgcttgcctcgtttcgaaaatcgtgtcgatctggcccgcacaggcagggcagacgttcttcatacggcagaatccgatatgggtgtcttgcggatgggcctcgatggtggccgacctgctggccgccgcggcatagaatacgcgggcgatcatggtcagcgaccataacgtctgcgtaccggcgagcgcggcgaattgcgcccacgcttcggcactcacaccttcgggaggagtagccggatctatggcgggtatgtcgaagaaacggttggggtctttataccagtatcgtggcgtgaacggttcggcattcaacgaaccatcagtgaacagcggcggctggaaggcaccttccggggcgtagcttctggctggtgccgcattctgcccgacatggaacagcgcgctttggctgatatgcggcattgcggcaagtgccttggcaccgcgcggcccgtcttcggggaacacgaggccaagctgatagcacacgagctgcagatcattgaaaatctgtttgaccgtgggcgttctgcctgttttgtagtcaatgaggcgaatgcattcgccgccgtctgcgagtacgcgggtttccatacggtcgatgcgcccggacagtctcacggtcagatgctcgtccatgccttccggccaccctccgaccagtgctcccatcagacggaccagcatgttccgatcgatcgggtgcatgccgggcacggcattgtatgcgtcgagtatgtcacgcacatcgaatcgtgcggcaaactcccgttcgcattcggcaccggccaatgcgccaatgctgaagttgctggagttcttgccaagatacgtttccggatcggcgtcgctgcgcacaaagtaatcggcgatgttgcgcagggcatctgccgcggactcgtccttacgggtggcctcatagcggttccgggtgtcggctatggcattcggatcggggcgtttgctctgatagatggcattaagccgtgccgtgacagcctcgatgcggcgttccgtgccggccgtggagtccaagcccagtatggccaacgtctgggcattgtgggaaagatggtccagcccttcctcgctgccttgctgtgcaaccgcatggatgagggttccgaagctggtggccacggagctggggcgaggaccggc

SEQ ID NO: 800 - DNA, 15271 bp, Unknown
  R14_18m  MAG No. k141_5060
aggtcagggcacgttctttacggtcgactgcgaagagtgtctttccgaacggaatatcaatgccgccgttcttggagtagcccttccacgcaacggtaggagcggtggtgtcgatggcgaacgactgcgttacagtcggcgtgcccggcagcgcggagttcaggcttacggtgtggttaccggtcttcaggtccagtccggcatcgccgcagtccatggcaccattcgtaagattatcggcatcgcacaccgggattgtggcaccggtgccgtcggcagccggaacggtcagcaacttgataccgttcgccttgagcagggcgagttcatcggcgaagtatgcgctcgtgctgctcaccgagaagccgccgaccttgctgtaatacgtggtgccgttgttgacagcacccttatccggggtggtaccggtcagattcagggacagaccagtgccggcattcgggtcaacaataacggtcttcgcgtcgagcaaatcgctcaacggcttcgcatcggaagcgctgccgaaccaattggtgaccgtaaccgtggtcttggtcaggtcggtcttgccgttaggcacggtccatgcttcatctgccttgaccgtatcggtcttggtgccgttgccattcggatacgtcacctcataagacacgacattggctgcctcagccgcaaccggagtaaaggttacggacggcgacgtggtcgtgaaccaggtaccgtcggtcgcgtctttgtctttgcctttcagccaatcagtatcaacaacgtcgccgaacaccgccgtatccacggcggcgggcttggtgctgtcataagacaattgaggagccgtgatggtgctcgtgccgtcgccatccttgaactgattcaggtcaatggcggcatctgccgctgtaggatcagccggcgcggcaactgtcacatcgagcgtaaccggatcaccgctcagagcgaacgccggaccatcattcggctcaacggtgtaggtgtagccgtcctgcacattgcctgtacggtggaagtcgccatacttgacttccttgacgcccaagatgcccacggtcacggtaaaggcaatcttgtctttatccgcaccttcgtattgtccgttacggtcaaattggcccgcggggaaaccatcaaacccagtaatcgtcacgcccagacgaacattcgaggcattggtgcggccatcggtcagcggctgggcattatcggccaccttgccgtccttatcggcggcataccaagccagatccatcttcggcgtagtggcggcagccggctgtgccttgacggccttgaaggagcgtgcggacaccacggagccggtggtctgctcgggcttgaggtcggaagtcgaatcggcgctggctaccacggcggtagcacccatggcaagagccgccacagccacggccgcaccgatcaacgacttgcgccagaaactggaattagttacgaagctcattacttgttcttccctccacgaaccaggatggtacgggattcatcgtcgtcggacgatgcttcattcgtcttgcggaattgcatcagcgaggtctcgccctcgtccgccaattcggcggcggaagccatggacaccggaatctcaaccacagattcgagtgcggccttggtacccagacgggtgctttcgtcttcctcgtccaccacagccggagcggcggaagccttttgcttggcaccgggcactgcggacggcttgtcttcgccggggcgagtaatgccacccttggtgctggcggaacccagagagccggaaccggtaccggtcaccgggcggaattcgatgtcgctggtgtcatgcgtaccggtggtggtatcggaaagggcacccttcttgcgcttgcggcgcgagccttcgcccagattctcggcgttggcccacgaaccggcgcgcactccacgcagttcggcgatctcacgttccgcgcgcttgccggtcagggcgtcacgcacggcgggaatgttgaacttgcggaacagcactacggccacgaccgcaagaatcacggccaaagccaggaatacgactgccagagtcctatagatatcggcgttcacttggcgtcccccttgatatcaacgaaagcgttggcgatggcgtccttggtgggcttttcggcctgttgcgcggctttcttgctggcatccagctcatcggtggtggtttcggtcttgtcggcaagcgatgcggcggcatcggccaaatcgctcatctgctgttgcgtgatgccgtccgcgcggaacttgcgcgggtacacgcgcaacgcatccaaggtcaggttcgcggattcgaggctgatcacaccgttatcttcccgagcggcggacttcaccagttcgttcagcttgctgaagtacggcttgtacttgcctgaatcggatccttcgttgatcagcggcacgatctccgtattgaagtcggcgatgtcggcgtagatcttggcgagcttgacgttgctgaagctactctcttgtgccgcgttgtgcatccactgcgaagcggcgcggatgcgggcgtatcgctgtggatcggtgttggcggcggacgcgctttggccggccatcttggagccggagtagtagtaccaatacatgcggccggtgtcgaagctcagctcggcccacttggtggagtccttgcgcaacgagtcggcgtgctggttgatcagcgtgttgtagatctgctcttcgtcgtcgctgaaatcactgtcagcggtgtaacgcttgatcagctgctcgtacggttcaatggcattggtcttgatttccactgcgcgcacgtaggcggcttctgcggcggatgcgtcggtggtctgcgccgcctggttcatccagtagtcgtaatcggtgttctgcgcgtggttggctagcaccaggctgccgccggcgagggccaggcagaccacggaggcgatcgccgtgccgaggaagccccaccacttggaattcagcgccttgcggtatgcggcgtcttcctgcttgtagtgtttcagcgcatacgcgaagtcggcgcaggtctggaagcgatcgtccggattcttgctggtggccttggcaatcaccagttccaagccctgcgaaagctccgggttgatctcacgaatcggcacaatgccgttcttgcgcgggtgtgagccagtcagcaggtagaacagggtggcaccgagcgcgtagatatcggtacgtgcgtccacggtgccgttatcggcgaactgttcgggagcgccgaagcccggcgtaccgagctggcggtcgtcaccgaccagcggcttgctgtccgcatccttaccggtctccagtgcaatgccgaagtcgataagcttgattgcgccctcaggggtcagcatcacattcgagggcttcatatcgcggaagatcaccggatgcttgcggcggtgcagatagtcgagcacatcgcacagctggatgccccaatcgaccacgtcttcttcggactgcgggccttccttcttgagcaggctcgccaaggtctggccttcgacgtaatccataacgacgaacaggctgcccttttcttcgatcaggtcgacgatacgtggaatcgccgggtgatcgaagcgcttaatcatattggcttcgacggtcaggctcttaatgaccaagtcgcgctgcaccggatcagaggcactgcgaatttccttgatggcccattgcttgttcagcgaggaatccattgccagatagacggtggacataccacccttgccgatctgggcaaggatcttgtaccgcttgccgaccaatgtgtttaaccccaccataggtggccctccaacacttgtctcttctcttacgacttccgtgcacgtaccgagccacaaaccactgggagcggtacccgcactcctaagttgccacactacccccgtaaatcgacaagaacaatactgctgtctgaaaatgcgagatggcccggaaccacacgagttccgggccatcttatcggggggggaggagggttactcctcgatgtcaggctgaccgccctgatcggagtagaaatcatccgggttgaagtcgtcgccgagcttcagatcaccgaactcgagattcgagaagttcaggtcggacaggtcggcgtcggagaaggtcgcgtcgccgagatcgccatcgccgcccagaccgaagttcgggtagatggtgtcgcggatggccttgtcgggctcgaccacggcgttgcggtagcgggcgaggcccgtaccggccgggatgagcttaccgatgatgacgttctccttgaggcccttgaggtcgtcgaccttctcggagagggcggcttcggtgagcacgcgggtggtctcctggaaggatgcggcggacagccaggagtcggtggccagcgacgccttggtgatgcccataagcgccggacgaccgacggccggacggccaccgttcttgacgatgttgcggttgatctcgcggaagcgggcattgtccaccagctcacccggcagcaggtcggtgtcgccggagtcgatgatggtcacgcggcgggtcatctggtgcacgatgacctcgatgtgcttgtcgtggatatccacaccctgggagcggtacacggtgtgcacttcctccacgatgttgacctgggcggcgcgcttgccgaggatggtgaggatcttcttgggatccacggaaccttcgaccagctgggtgccaaccttgatgtggtcgccgtcggcaactttgagcggcacgcgcttggagacctggtaggtgatcggcttgatcacgccgtcttccttcggcgcgccggaatcggcgtccggggtcaggatgatctggcgaccgcgatcgttctccacgatcttgatgctgccggcgaactcggtgatcggggcctcacccttcggggtgcgggcctcgaaaagctcggtgacacggggaagaccctgggtgatatcggaggccgcggccacaccaccggagtggaaggaacgcagcgtcagctgggtaccaggctcaccgatggactgggcggcgacgataccgacggtctcgccgacatcgaccagcttgttggtggccagggaccagccatagcacttggcgcacacaccgcgcttggactcgcaggtcagcacggaacggcacttgacttcctcgacaccgtgggccacgaggtcgttgagcacgtccatggacagggcgtcgtcgcgcttgtacagcacggtctgtccgtcggccgggtcgatgacgtcggcggcgagcagacgggagtacgggccaccgtcggcggccttgacgagcaccaggttgccgtcgttgtcgcgctcggcgacgcggatgggcagaccggccttggtgccgcagtcctcttcgcgcacgatgacatcctgggagacgtcgaccagacgacgggtcaggtaaccggattctgcggtacgcagtgcggtatcggccagacccttacgtgcaccgtgctgggagatgaagtactccagcacggacaggccgtcgcggtagttggacttcacaggacgaggaatgatctcgcccttcgggttggccacgaggcctcgcatacctgcgatctggttgatctgcatcatgttgcctcgtgcaccggactgcacgatgatggccaggttggaggtcgggtcgaacttctcctcgacttccttggacacctcggcggtgcattcggtccacaggtcgatgagttcctgacggcgagcttcctcggtcagcagacccatctcgtagttggcgttgaccttgtcggccttggcctcgtactcggcgatcttctcgtcgcgctcgggcggctcgttcacgtcggagaacgcgaaggacacaccggaccacggtgcgcgggtgaagccaagatccttcagggcatccagcgtggcggccacctgctgggtggagtaacgcatggcgatgtcgtcgacgatcttggacagacggcccttggccacctgctcgttgacgaacgggtagtcggtcggcagagtctcgttgaacaggatgcggccgtaggaggtggcgaacagcacggtgccgtcgtggaagcgctcttccttgacgacctcgtcctcaccttcgcgcgggtcgagcaccttgacctcgccgggctcccagttcttcggcagcacgaagctctcgggcaggcggatgagcaccttggcctgcatgtcgatctcgtggcggtcgagggccatttcggcctcttccagcgaggagaacacgcggccctggcccttggcgccttccagcacggtggacaggtagtacagaccgaggatcatgtcctggctcggcatggtcacggtgtgaccgtcagccggcttcaggatgttgtcggaagccatcatcagcgagcgggcctcggcctgggcttcggcggacaggggcaggtggactgccatctggtcaccatcgaagtcggcgttgaaggcggcgcaggccagcggcggcaggtggatggccttgccttccaccaggatcggctcgaatgcctgaatacccagacggtgcagcgtaggtgcacggttgagcagcacggggtgctcggagatgacctcctcgagcacgccccacacttcggcgtcgccgcggtccacgagacgcttggcggacttcatgttctgcgcgtagttcaggtccacgaggcgcttgatgacgaacggcttgaacagctcgagggccatcggcttcggcagaccgcactggtgcatgcgcagggacggaccgaccacgatcacggaacggccggagtagtcgactcgcttaccgagcaggttctgacggaaacgaccctgcttacccttgagcatgtcggacagggacttcagcggacggttggaggcaccggtgaccgggcgaccacgacggccgttgtcgaacagggagtcgacggcttcctggagcatgcgcttctcgttgttgagcatgatttcaggggcgccgagctcgatcagtcgcttcagacggttgttacggttgatcacacggcggtacaggtcgttgaggtcggaggtggcgaaacgtccgccgtcgagctggaccatcgggcgcaggtccggcgggatgaccgggatcacgtcgagcaccatggcctccggcttgttgccggtggtcaggaaggcgttgacgaccttgaggcgcttcagggccttggtcttacgctgctcggaagcgtccttgatctcctcgcgcagttccttggagatggtctccaggtcaagggactgcaggcgcttcttgatggcttcggcgcccatgcagccgtcgaagtaatcgccgtagcggtcctgcatctcgcgccacaggtccacgtcgtcgaccatgtcgccgggcttgagcttcttgaacttgtcgaagacggcgtccacacgggcgatctggtcgttgtagcgggtgcggatggcggccatatcgcgctcggcaccgttacgcagcttggtgcgggccgggcccttggcctcgccggcctcctcaagggcggcgagatcctcttcgaccttcttggcgcgggcttcgatgtcggagtcacggcgctgctcaaggcgtttgatctcggaatcgaactcgtcctgcaggccgggcagatcgttgtggcgctcgtcctcgttcacctcggtgaccatgtaggaggcgaagtagatcacgcgctccagatccttcggggtgacgttcagcaggtagccgaggcgggaaggcacacctttgaagaaccagatgtgcgtcaccggggcggcgagctcgatgtggcccatgcgctcacggcgcacgcggctgcgggtcacttcgacgccgcatcgctcgcagacgatgcccttgaagcgcacgcgcttgtacttgccgcaggcgcactcccagtcacgggtcgggccgaagatctgttcgccgaacagaccgtccttctcaggcttcagcgtacggtagttgatggtttcaggcttcttgacctcaccgtggctccaaccacggatgtcatcggcggtggcaaggccgatgcgaatcttgtcaaatgcgttgacgtccagcacttgttaatccgtttctgttcttgagaccttcccaagctccccttgtcaggggagctgtcagccaaggctgactgaggggtagtgcaaaccggaaaggtctctgtacgttatctatttcacgttggcggagctacacgcggcgtattgaccgcatgcagcccgagggatcactggtattcgggctcttcggccttctggtcttccttggcggccgcgtcggggcgggcgccaatgttgaagccgaggtcgtcagcggagctggccggatcgtcatcctcatccttcatgtcgatggccacgccttcggcgttgagcacttcgacgttcagggacagggactgcatttccttcaggagcaccttgaacgactcagggatacctgccggcggcaggttatcgcccttgacgatggcaccgtagacgcgcacgcggccgtcaacgtcatcggatttggtggtcatcatctcgtgcagcgtgtaggcggcaccgtaggcctcaagggcccacacctccatctcgccgaagcgctggccaccgaactgggccttaccaccgagcggctgctgggtgatcatggagtacgggccggtggagcgggcgtggatcttgtcgtcgaccaggtggtgcagcttcagcatgtacatgtagccaacggaaatcggcttggtgtacggctcaccggtacggccatcgaacagggtggccttgccgtcggggccgaccagacggtcgccgtcgcggttcggcagcgtggtggacagcaggcccttcaggacctcgggcttgacaccgtcgaacaccggggtggcgaccggggtgttcggctcggccttctcggcaccggacggaaccagcttcttccactcggcttccatgttcgggtcaagggagatatcccaaccggagtgggcgatccagccaaggtgcagttcgagcacctgaccgaggttcattcgggaaggcacacccagcgggttcaacatgatgtcgaccggagtaccgtcagccaggaacggcatgtcctcttccggcaggatgcgggagatgcagcccttgttgccgtggcggccggagagcttgtcgcccaccgtgatcttgcggtgctgggcgatgtagacgcgaatcatctggttgacgccgttgggcagctcgtcgccgtcctcctcggcatcctcgcgggtgatctccttgacgccgatgacggtaccggtctcgccgtgaggcacgcgcagggaggtgtcgcgcacctcgcgggacttctcgccgaagatggcgcgcagcaggcgctcctccggggtcagctcggtctcgcccttcggggtgaccttaccgaccaggatgtcgccggcctcgacctcggcgccgatgcggatgatgccgcgctcgtcgaggttggccacagcgtcctcgccgacgttcggcaggtcgcgggtgatctcttcggcgcccagcttggtttcgcgggcgtcgatctcgtactcctcgatgtggatggaggagagggtgtcgtcctgcacgaggcgctgggagatgatcacagcatcctcgtagttgtagccgttccacggcatgaaggcgatgagcaggttcttgcccagggccaggtcgcccttctggatggcaggaccatcggccagcaccgagccggcctccacacgctcgccatcatggatgatcgggcgctggttgtagcaggtggtctggttggaacgctggaacttggccagcttgtaggagctggtggtgccgtcgtcgttcatcacgcgaatcaggtcggcggacacgtaggtgaccacaccgtccttctcggacttgatgacgtcgccggaatcgttggcggcgcgccattcggagccggtgcccaccagtgggcgctcggattcgatcagcggcactgcctgacgctgcatgttggtacccatcagtgcacggtggccctcatcatgctccaggaacggaatcagggaggcaccgagggagaccatctgacgcggggagacatccatgtaatccacggagctcaccggcacatcgaccgcctcttcctcgccgactcgggcaagggcggacttggagacgaagttgccgttctcgtcgagttcctggttggcctgggcgatgacgtggtcgagatcacggtcagcggtcatgtactcgacctcgtcggtcacgtggccgttgacgaccttgcggtacggggtctcgatgaagccgaacgggttgacgcggccgaaggtcgccagggagccgatcagaccgatgttcgggccttcaggagactcgatcgggcacatacggccgaagtgggacgggtgcacgtcgcgcacttccatggaggcgcggtcgcgggacagaccgccggggcccagtgcggaaagacgacgcttgttcgtcacaccggacagtgggttgttctgatccatgaactgggagagctgggaagtgccgaagaactccttgatggtggcgttcaccgggcggatgttgatcagggactgcggggtgatggcctcggcgtcctgagtggtcatgcgctcgcgcaccacgcgctccatacggctcagaccggtacgcagctggttctggatcagctcgccgacttggcggatacgacggttgccgaagtgatcgatatcgtcgacgtccacgcgcaggtcaacgtcttcgccgttgcgcttgcccgggaaggtcgccgcaccgtcgtgcagggccaccagatacttgatcgtggcgatgatgtcttcctgatggagggaacggtcgttgaaatcggcctcgacacccagcttgcggttgatcttgtagcggccgacgcgggccagatcgtagcgcttggtgttgaagtagaaggagtccagcaggttcttgccggcctcgggggtcggggtgtcggccggacgaatcttgcggtagaggtcgacgagggcctcgtcctgggtctcgagggtttccttctccagggcgtcgagcaccagcgggtagtccttgaaggcctgggcgatctcggacttggtcatgccgatggccatgaggaacacgatggcggactgcttgcgcttgcggtccacgcgcacctgcggctggtccttcttgtcgatctcgaactcgagccatgcaccgcggctcgggatgatcttcgcgccgaagacttccttatcggaggtgcggtcctgctggcggtcgaagtagacgcccggggaacgcacgagctgggagacgatgactcgctcggtaccgccgatgatgaaggtgccgtgcggggtctgcagcgggaagtcgcccatgaacacggtctgggacttgatctcgccggtgtcgccgttctcgaattcggcgttcacgtacagcggagcggagtaggtgtaatccttctccttgcactcctgcacggtgtggcgcggctcctcgaagtacgggtccgagaaggtcagggacatggtctgtgcaaagttctcgatcggggagatctcgttgaagacctcgtcgagaccggaggtgtgggccacggtgttggtgccgttagcctcatcctcttcgacacgcttcttccagcggtcggaaccgatcagccaatcgaagctgtcggtctgtacgcccagcaggtagggcacatcgatgggttccttgatggaaccgaagttcacgcgatccgacgccttgtgcagatcaatgtcatgctggtcggcgcgtgcgatgatggtggtggtgttcgtcgtagactcagtagccaatggacgttccttatcgctcgctaatatgtggtaattcccctgggagcgccggcatggccaccatatgcctatgcggacgcttcattgtcgacggcatgcccgcaatatgacacacctcatgcgaagtcaaaagaatactgatatgcgaggacatttttagctcccgctgacgagggagctgtcgagcggagcgagactgagggagagacccagcgtccaaacaccaaccgcaggtcctaccccaccgtaaacgtcaccggatcgctcttcaccttcggatgatccttcaaactcagctgcgccacgtacgttcccgcattgaccttggcccaatccgactcatccgtgcattcggtgagcgtggcgttcgcatcggtattccacgtgaccttctgaacgtccttatcacccttggacatcagcagcagacgtgaatccgccggacacacatcggacttgtaaatcgtttcctgaccggaagtaatggtgagcacacggccggaatcggccccgtccaccaaacagttgcctgacccctcgtgcacgatggtcgcggtgaaatcaagcgatcctcctaccggcacggattgggaggccgcggaaagctgcaatgtcacatcactggccgagcaatccttgacgttgctgactttcttcggagccggcgtggcgtcgcgggaaatcgcatacacctcgtcatggtgaatcatcgtgttcacggcaccgataccccggccaaggctgtacacgcagaatacaatcagcgcgattatcagcagcaacaccgtgccggccacgatacgccgacgacgatagatggcctgctgctttttgctgatcctgcgcttgcgcggcttgccggaacggtcgtttcgggcgggcccgccggatggcccattggccccggtgccggctccgcgtgccgttctcgcgcctgatgtgttcctctgcactgccataacccttccagtctacggtcaccacacccatacacgcttggggagcccgccattttcacaatgtcagctgggtaatcgcaggccgccgtccagaatctcgatcaggccgtcatcgtcaaggctggcgatgcaggcggcaagctgaatctggtccttccaaagcttgtcggcatcttccctgggcaacgtgactccagcgggaagctcgcgcagcgcggcgagcaccagaccgcgcacctgtcgatccgtgccttggaatcgttggcgtgggcgggtgcgacgctcccccagtccggggcggccggccttgaggaacgcgcaatcgtcggcaatcgggcaggtgtcgcataacggcgatttggccgtgcagatcaccgcccccagttccattaccgactggttccatgtgaccgatgggcgttcgccacgatgcagtcgggagcgtttgccgccacggatagtgctgttcacggtatgttcggcgctaccggcattatcggcgacgtcagcatcgcgcccgagaatctcgtctttgggcagcatgcggttcgccagcgcgcgttcggccgggctggccgctcccccgcgcgattcgacgccaaggaacacacggctcagcacgcggcggatgttggtatcgatcacggcgattcgttcgccgaacgcaaagctcagcaccgcggaggcggtgtaatcgccgatgccgggcaatgcagtgagttcgtcatacgtacgcggcagtttgtcggcgtactgctcggccaccacgcgggcgcattcctgcaatcgcagcgcacggcgaggatagccaagccggccccatgcggtgatcacatcggctttaggtgctgcggcaagagcacgggcgtcaggccagcgtgccatccaatcgttccaatacggcaccacacggctcatctgcgtctgctggctcatcacctcactgaccagcacgccccacggcgtggcccgtccgaagcgccatggcaagtcacgcgcattggcctcccaccatgctcccaatcgcaaagaaattgctgtgtcgttcatcgttcttattcttagcagctatgacgaacgaggcaaaacacaacccccagagcacaccgaatccagcaaatcccgaaaccaaagtcgagaaaatgttcgaatacggctatcgcaagtcgaattacgggccggacgagctggtgaccgacgcacacggcaaccccatctccgtggtggacgcgatgctttccgccgagaaggccgccgccaccgaaaccgtgacgccgcacctgtgctattactcgccgcgtattcccggcaacaccggttcggccatccgcctgtgcgcagtgaccggcacgattctgcatctggtggagccgctgggcttcaacctgcgcgacaccaagctgcgccgtgcgggcctcgactaccatgacatggcccacgtggtgttgcacccgaatttcgacaacctggtggagtcgatgcccaattcgcgcatcatcgcgttcaccgcgcacgccaccaagctctacaccgaggtggaatacaagccgactgacatcctgctgttcggccccgagcccggcgacatccccgacccgatggacatcatggagggccctcatgtggccgaacaagtgcggctgcccatgcgcccgtccctgcgttccctaaacctcaccaactgcgcatccatcgccatctacgaagcctggcgccagctcaattttgcgggcggagcgtgaggagaaggcccggtgggccttcgagtaacgacgccgagcgaacgccgacaggcgcgagagcggaaacactgagcttcgcgcagtgatgaacgctgaatataaggccacctgcgtttcgaggggcggatttggcatccgccggaggtctactgccgcttcaaggggctgtcaaaggacgagaccccgagtatggccgttgaaatatcaatgcttgtactcggggtcttcatatataccagcccctcgaaacggaagtagacctccagaaaggtcggaatcagcccctcgaaacgggaatagacctccagaaaggtaattcgagctggtatctgccttcaaagaggtacattcgagcgtttgcagaatgctatctgccttcaaagaggtaccgcaatcgagaaaccccgggtatgagtgttgatattccaacgctcatacccggggtttccgcatataggtacctctttgaaagcagatagctctccgcgaggggccaaatgtacctctctgaaagcagataccctaccgaatcaattcttgaagctgtgaatcggcgcagggattcggccgccacgggtcacgaaggcctcgcagctggtctggttcaccggaatgatcggcgcatagcccatcaggccgccgaagttggccatctcccctacgcctttgccttccaccggaatcacgcgcacggcggtggtcttctggttgaccatgccgatcgcggcctcgtcggcgatgatgccggaaatggtggctgcggtggtgtctcccggaatggc

SEQ ID NO: 801 - DNA, 3432 bp, Unknown
  R14_18m  MAG No. k141_5175
cgtgttcgattgacggctgcaacgcatcgagctggtcggacagcttcgactcgtcgaccaccggcagttcgagcagggatcgtgcggccgcgtgcaggtagtcgttcaacgcctcgatgcggcccggctccagcgggtaagccgggtcgttctccaaggtgacgtccaacgttttgcgcaacatctcatgctgcgcgctgcccatgatggccgcgcactggtcgcggaacgtcatacgagaatttgccggctgacgttcggacagtacctgcggaatccacgcgccgccctcccagtcggcgcgcatgtcgttcttgaacagcgacatgttatggtcgaacaacggcgccggacccagaatccggccggtacggttgtcgcgcaggaacccgtggttgttggcgtgacggtcctgattgacgatgagcgcgtcgaacactagcatcgtgcgcatcgcctcgaacgattcctcggacacggcgcgtgcggcggcgaggatctccgggaacgacgccagctgcgtcgccgcatagaacggcacgaacgacacgtccttcgagttcatcgaaccgcacaccgacgcgagcttgcccttccaacgggcgatgcggtagtcgaccgcgttcacaccgagcctgcgcgccagctgcgaggcgagatactcggaatacggttccaaaccggcgttcgcatacccttcggaacccgccttccacagttccagcccacgttccgtatgccgccacgccttcgggaactggccgtccgtcgtccactcgctcgacaggccgatcgcatgcttctcgctcgacgtataccccgtgtaggccacgatggcgagcgtctcgtccaacggattgtcatacaggttgatgtccgcgaacttgaggttctcaccgtcgcgttccgcccagaacgaatcgttgaccgacagtcccttgcacaggtcgatgatgcccagcgtatccgcaatgttcaaccccgcctgcgcgagaacctgcgtggcgaactcacgattcttcggaatcgtgcgccgctccagccacgtcgtcagcttcgcattatccggctccggagccaacggaaacggcagcaacgcgcgcttcgactcatcgaaccagcggacatgcgcctcgatcttgcccgccagcaggccctcgccatacgacgcatcgaaccggagcagcggatcatcatagagccgcagcacgtaactcgtcatatccggcccctccaatcacaagcccgctccaaagtcatatcgggcgattcacatatgaagaacaactgtctacagtatagacaagggccttggaacgcgggggcttcactctgaagtcaagtatttgatacaatttggtgcaaaaagatagtaaatagcaataaggagtggctatgagcatgcagattgccacgcgagttagtgacgagcaggctgcgttgtttaaggagacgaccaggcagctgggcaccaccccggccgatgccctgcgtatgttcatcagcgcgttcaatgattaccgtgggttcccctatgaggtgcgtttgccacgaaatgacgtggagccgtttgcgtccgagcgggacgctactgagtatgccagtcgtctcgccttgaggatgtccgatgaaacgaggtgagatttggacgttgcaggccgatggctacgccagcaagccacggccggttgtcatcgtgcagagcgatgccgtcgatcggttcgattccgtcatcacttgtctgctgacctcatacgattcctccgacatcgacacgcgggtccgcttggaaccaagtccggagaacggcctgaacaaagtgagttacgtgatgacggacaagatcgtcaccgtcgaccgcaaactgctgggataccaagtcggcgtggctgatgatgcagccatggcgaatatcggccgtcagctcatgcgggttctaggtttgctgtgacgtttgggatggctggcgggcgtgcgtctacttgtgacatcgtttatgcacccttgaggccgtatgatgatggcgtcgaattcaagctctccccaacgtctaagaaatggcttccttcatattacggtcatacgaccaacaccatatgaaggaagccattatgaatggtctaacggcaatcagcttctcatacgtgattgccagtcattcaccgaatcagccgcggttgtcgaacatctgcagcagcatcttgctgggttcgacggcatagacggtgtgcggcagacgggcgctcaggtagacgatgccgccggccgtaagctcgacttcacggccttcgccgccgacgcgcagcttgccttccagcacctggatggtcacgggcatggccgcggtgtgctcgctcagtgcctggtctttgtcgaagccgaacagcacggcgcgcaggccgtcctcgcgcagcaccgtacgggagacagtggcctcctcctgaatatcgatcaacgaggccaagtcttcgatgaatccaagatgcggctcggtcgaaacggcgtggccttcggcgtcgtgggcgtcgtgcttgcaggcgcagtgcttggcctcacccgcttcagcggccgcggcttcgccatgcttgcagtggcactccttcttcgcgcccggctccgcggctgcgccctcggcgtgctcgtgcttgcaggcgcagtggtgttcgccgttggcggcagccgcttcggctgccacggcggctcccctacgctgcttgcacttgcaatgctgctcgtcgcgccctgccttgcatgcggtctgctgctcgttctcatcggccatgatgttctcctattcgtcgcgcgtacctcacatacgcgtcatcgcttttacttgtttcccattatccggccatcgttgggccggcacaccgctgttacgcttcgggcttgcgcacctcatccttgacggattcgtccaggttgtccggctacaggccgagttcgtgaatcgagtaggtgccgccggcgcgcagtagtcggaaggcctcgccgataatcgcctgcttgccacgctcggcctgcatggtaagcatggcttcgccgatcaccacgtcggcgctgttggattccagaccggtgtcggcggcgtcgcgctgcacgcagcttgccggaatcgtggccttctcactggtgagtttggagatgatgtccacgacctgcggatcgcggtccacgccacggtagctcttggggtcgcggtcggactgcgtcaggagcagctcgcggttggcggcgggtttggtggcggtggactgagatgcctgagaaggctgcagtgtagtggtcatttgtcgtgatgctatagtccacagcccgcccgcacaagggtttttcgctagaaatcagccgaatgtgagaatgctcacccgagtaggcgcctgagcatgcggctcagggacgattcaggggatgctcaggggtcccgtcacc

SEQ ID NO: 802 - DNA, 3476 bp, Unknown
  R14_18m  MAG No. k141_5184
cagttgccgatgccgtggagggggatggtgggccgattccatctgccgatgatgtaccgatgtacgcagcatcttcagcgcaaccttcctatgagcagtctcagaccgccggcaaaccatgccagcctggggggagcgccaagaacgtccagaatgctaaggatgtcaagagtgccaagaacatccagaaacagagcatcagcgcgcttactgtggtattcggactattaggcgtgattatcggcgtgatcgcgctggttttcgggtgcatatctccggatcggatgatttcgctgttctcgccgaatccgcaattgctgacggctattatctgcgccgtagtgggacttattctggtaatagtggccgttgtatgggccatagtcggtgccgtcaagaagagaaaatagcgttacaaccattgcattacggtcccagtagaagcacattatgacgggagccgaccgttctatgctgatggggggaggcatagtaactatgaaacggatttcggcgcggcgggtagcgagcgtcatcgccaccgcgatggcgatgacgctggtattcgccacacttggctgggcgatgatgccgcaatggaacacacggccctacaccaagcacatcgctatcgcttctgccgacaccaccatcacccctgcccatgcgaacattccccacgaggggcgatatagtacgcgtgaaacccgactatccatcaagaccggcgacggcgtcacgctacccgccgtactacgtgaaccggtcgacgctcccgggccacgcccggcttgtctgttcattcacgggtccggtaccagcggtgccgaggatttcggcgatatcgccaacgccatggcctctgccggcatcgtgaccttggtgccggccaagcgcaacgacaactacaccgtgctgcatcgcgactacccgcgttttgctcgcgaatacgggcgttcgctcgacgtgctgcgtggcataagcggcgtggaccccgccaaaaccggcatctacgccgaatccgaaggcacctggatcgccacgattctaacctcgaaacggcaagacattgcctttgccatacttacatccgcaccggtgttcaatggacgtgagcaaatggccatggctgtcagcgcctatacgcatgaggccggcgcgcccaagcccgtggtcaaagacatggccaaattgatgtcgctggactacgcgccattcgatctggcctatgccgactttgatgccgaccggtatctgaaatccctcaccatgccggtgctggtgaactacggcacctacgatacggccatgcccatcgaacagggggcgcagcggatcatcgccacggccaacaagtccggcaacgagaacgtcaccgtacgctattttgccggcaaccatcagatgcgggctggtgagggcttattcaccccgaacctgccattggccgaaggctatacgcaagcgctggaaaattgggtgaacggtgtgactgccggaaccaaagccgatggatgggcaacgccccaagtcgccggtgcgacacctcaccagcgcttcgccgcgccgcaacgtaccagatccggtatcgtcggctcgctcggcgtgctggccggtctgatggtggcagggcccgtgctgatcgtgatggcggcgatattaggtattggcttgactgtgttttcttggctacagacgttgctggccgggcgacgtagtgtggcgactgtgcgggccatgcatgcgacgccgagtgggctgggagccgcccaacagcgtacgttgcacggcattgccggcttatctgccggtatcggcacagcggtgatggtgattaccgtgctgttgtatggctatatgagcgccgtaggcgtatcggctgtattggttatgcctcaaccgcagttgttttcccttgggtggagggcattgcaggtgctgaccgtgctgttggtcatgctgttcgcgtgggaactggaacgtatgtggcggtatcgcgccagcattatcggcgtgcgtcgtgtcatttgcgtgatggtgacactggctgcacttgtcacattgacgatattgtctttctgggggttgttcagtctgtgatattcacggtcgttaccggctccttcccgaatatgtgccactgagtcgccgtgagcgtcacaaattcgggaaggtggatggggcgtgacggcgtggaggcactgtcgtcagcgctgagcggcttcagcctcatccaaagtgtcgaaaccgccgagctggactgtgtgcaacaaggtttcctcagtgatattgcgttgcgggctggctgcggcgcgctcgctaatcatcacctcgtagagctggaaggtccgttcggaatacgtaccaagctcgccgcgcagataggtttcgaatgaggtggcagatggtgtgtcttcggtggtggtgagtacgcgcatcgcctcgccgagcttggggtagcgctcgcggaaatccttggcccaggcgacttgctgggcgatgacctgttcctgacgggccacgcgctcttcagagggacgcggaatatacggctctatgttcttcgtgaaatcttccggcgcggtggaggccatcatgcggccgtatttttcggtcacgaggttgcggcccacgtggtcggccgcgtcaagatcagcggcatagctggtgagtaatggccgctcccatgtgaggaactgggccagccgcatctggtggaacaccggccagttgccttggcatgccgcgcgtccaccctcattgttggtgcgctggaactgatcccattcatggcgcacaatagcctcgcgcagttcatcatcagtcagttcgttggtcatcgacgttcctttcactaatatctccctctgatgagggagatggcacggcgaagccgtgacagagggagggaagcggcggctgtactgaggtccctccctcagtacagccgcaggctgacagctccctctgatgagggagctctaaagcgccggatcatcagagggagcttgaatctacaaacttttaagcaccggatcatcggagacgatgtggtcctcgacatacgggcgctgccattcgaggaaggtctcgccggacgtggtcaggtgttcgcgtttgagttccctgacgatatccaccgcaatctgctccacaacatcgttgattttctcgattgctggagccgcgcccttgccgccttcgccgaatccggccccgccatagcaggctgtcgaactcaatcgcatcacggtttccaactgttcgcccacgttcggcaacagcgcgaacatcgagccagacagcttgcgcaatgctgcgaactgccacttgtaatacggcatatagcccaccaccatcggcacgttaaccaggaacaccaacgaggcggtggcctgcacgaactcgtggatggacagccatgcggccgcgccgtcgccgcgcttcaacgaacgcggcagattatattgaccggc

SEQ ID NO: 803 - DNA, 8956 bp, Unknown
  R14_18m  MAG No. k141_5213
ggactgatgatcctcatgaccatcatccgcgtgggcgcgcgatacggctaccagatgtggatggagcgtttcggccagaactcggtctaccgcctcgtctccgacgaatacgagaagctgcacgagctcgacttcacgtacttcaaccacacacgcaccggcgacatcatgagccgcctgacctccgacaccgacgcgatccgccactgcctgagttgggtgagctatcagatcgccgactgcgtggtcatgttcgtgggcgccctgtgcgtgatgttcgccatcgactggcgactcgcgctcgtcctggcctgcgtcacgccgttcatttttgtgctcacgcgcggcctgtccacgcacgctcacccgctgttcttctccatccgcaactcgctggcctccctcaactccatggtcgaagagaacatcgagggcaaccgtgtggtcaaggcattcgtgcgcgaaccgtacgagaccgaaaagttcgacgagcacaacgacgattacatgcatcgcaacatggccctggcctacaactcgcgcaagtacatgccttggctggacggcctcggcttctcgctgcagctcatcacgctcggcctcggcggctttcttgtcatcaagggctacatgaccctcggcaatctggtgagtttcaactccttcctgtggatgatcgacggcccggtgcgccagtccggctggctcatcaacgactggcagcgattcaacgccagctgcatcaagattcgtaagctgctcaccgaacagccgcgcatcgtggagaagcccgacgcggccgaagccgtcaagcaggcggtcacgatcgtcgagcaggtcaagcacgatgatgaggctaccggagcgcccggggcttccggaacatccggtgcccagcagtccgccgaacgcaagtcctgcccgctgcacatcaagggcgacatccgcttcgaccacgtcagcttcgccttcccggacgacccggagaccccgatcctcaaggacctcgacttcaccgtgcccgccggctccaagctcggcatcctcggcgaaaccggcgcgggcaagtccacgctcgtcagccttatctcccgcttctacgacccgaccgtgggccatgtgctcatcgacggcatcgacgcacgcgactggccgctgaccaccttgcgctcgcaggtgtgcatcgtggcgcaggatacgttcctgttctccgacaccatcggcggcaacatcggttttggtgccagcgatgatagcgacgaccgatatatccagaaaatggcccagatcgccggcgcggacaatttcatcaggtcgatgccgcagggttatgacaccgtcgtgggcgaacgcggcgtgggcctgtccggcgggcagaagcagcgcctgtcgctggcccgcgcgctcgcggacaatccgtcgatcctgattatggacgatacgacctcggccgtcgatatggagaccgaggcggagatccagaagcacctcaaggagatggacggcggcaagaccatcgtcgccatcgcccaccgcatctcgtcggtcaaggattccgacctgattctggtgctcgagcacggacgtatcgtcgaacgcggcacccacgccgaactcgtggccgcacacggccgctactgggacatctaccacaagcagctcggactccagtccggcgccgcacaggggttttagaagaggacttatggcacaacgcaatacattccgcgaggatgaggagctggaggagtccatcaacctccacgacatcgctcgcgtcggcaaatatatcaaaccgtatatggcacaggtggcgcgcattctcgtcgtcgtcatctcgatgagctgcatcgtcgtcgccgtgccgtacctgaccaagatcatgatcgacgaggcgatcccgaacaaggacctcggcaagctcggcatcctcgccgtaatcctcgccgcgctgatcgtgctgtacgagttcgggctgcgctaccgcacggtggcgatcacgcgcgtcggccagctcatgctcaaggacatgcgccgcgatatcttcacgcatatccagacgctgcccttcagctacttcgattcgcgcccgcacggcaagatcctgatccgcgtggtcaactatgtgaacacgctttcggacacgctgagctccggtctgatcaacgtgatctccgacgtgttcaccttcgtgatcactctgatcgtgatgttcgtgatcgactggcagctggccctgtggagcttgatcctgttcccggtgctcatcatctgggtgcgcgtgctgcagatcttccagcggcgcgccttccagaagctctccaacaagcagagcaacctgaacgcctacatccacgagtcgatcgccggcgtgaagaccacgcagaccttcgcgcaggagcaggcccagttcaggaccttccaggagcagcagggcgaggtgcgttccgcgtggatgcacgccgtgcacatccagttcctcatgtggccgggcgtgcagaccatctccgtgatgaccatctcgttcatctacttcgtcggcgtgatgggcttcgggggcgtgaacgtgaccaccggcgtgctcatcgcgtttgtcggctacgcgaacaacttctggaatccggtgatcaacatcggcaacttctacaaccagctcatcacctgctcggcgtacctcgagcgcatcttcgagacgctcgacgtcacgccggagatccgcaacaagcccgacgcggcggacctgccgcagattcgcgggcgcgtcgacttcaacgacgtggtgttccgctacgagaaggacggccgtaacatcctcaacctcgtggacttccacgtcgaaccggggcgcacgatcgcgctggtcggcccgacgggcgccggcaagacgacgatcatcaacctgctgtcgcgcttctacgacgtgtccgagggctcggtgacgatcgacggccacgacgtgcgcgacgtgacgctcgcatcgctgcgccggcagatgggcgtgatgctacaggacaccttcatcttctccggcaacgtgcgcgagaacatccgctacggcaagctcgacgccaccgacgaggaaatcgaggcggcggcgaaggccgtgcacgcgcacgagttcatcatggaactgcccgacgggtacgacacggtggtggaggagcgcggatcgaccctgtcggccggccagcgccagctcatcgccttcgcgcgcgtgctgctcgccgacccgcgtatcctgatcctggacgaggcgacgagcaacatcgacacgcgcaccgaggaggcgatgcaggccggcctgcagcatctgctcaaggggcgcacgagcttcatcatcgcgcaccgcctgtcgacgatcgagaacgcggacgagatctgctacatcgatcacggacagatcgtcgagcacggctcgcacgcgcagctgctcgccgccaagggcgcgtactaccgcctctacgagtcccagtacgcgatgattcgcgtggccagcggagcgccggaagagtgacgagatgttgcgcacaaggatgcgtttagcggcgtttcacatagcgggtgctgcgaccggcaccgattttgatgatcgtaccggagtccaacagtgatttcagcgtgcgctcaatggtggtggtgctggtatcgggcatacgagcgagaatatcggccttggagagtggcactagggatcgatcaagcagtgcttcaatccgcgttcccttggtggctactcgcggtgctccctgcgctctgccgcctgccgtgagattgatgcgttcgtcgaattccttgcacgcggacagtatgatgccaagcaggtagttcgtgaatggcgcataatcattggcgttgtcgtcccatccttgggtgcttgcggccagcgcctcataataagtgcttttactttgctcgataaggtgttcgatactgatgtatttgccgaccatatagccattgcggtacagcatcaggagcgtgagtagccgactcatgcggccgttgccgtcattgaacggatgtatgcaggtgaaatcgagaatgaacatggcgatggcaagcaatggatcggtatgtccatctcggattgcttgcgtgtaggcggaacacgcgcgttcgatcagtattcgatgtagtcgaatgatctcatactgcctcattttctgcatcatacgaacttttctgcatcatattttatcaaaatgaggtagaaaatgggctgatgaggcagaaaaggcggcaggatggtggccatctcgcttgccggttgcgctactttcccgggaatgttgcgctcgtggcaagagacggcaagttcaggcggccgagattggcgatacccgtcgtgtagtcgaacgtcttaccggactgccttacgagcgttgctgacggtagcctacactgagaaacagcctacactgagaaaccatgagcaagcaccaccatcgcgaccgtagctgggccccggcacctgaagcattgccggacgacgcccagaccatcgacaaccacactcacgtggcctccgtaatccctttcgcgcgcgctatgagccatgaggcgcaggagaaggggcagcccgaagtcccggtgtacgacgtcgaccaattgctggcgcaggcgcaatctgtcggcattgggggtatcatcgactgcggttgcgagctgccgcacctgatgaccgccgtccagatggccctcgatcatccaggtaacgtgcacgcggcgctcgcaatacaccccaatgagtccgtgctccacgggcatcgcggtgtgccggggccggatggtctgcctctcaaatacaagccttaccatgacacgtctttcgaggacgcgctcgccgaagtacatcgcctcgccaccacataccccgagcaagtggtggctatcggcgagaccggcatggacctcttccgcaccggcgaaggtgccaaggaactgcagcgcgaggctttccgcgcgcatattgccctggccaaggaactgggcctgcccatgcagattcacgaccgcgactcccatcgcgaggtcatcgaaaccctgctggccgacggcgcgcccgaacgcaccgtattccactcgtattccggcgaccgtgagatggccgagattgcgcgcgaacatggctggtatctgagcttctccggcaccgtgagctacaagggcaatgacggtatccgcgaatcgctacggattgtgggtctgggccatgcgatggtcgaaaccgacgcgccgtatctgacgcccatgccgtaccgtggccgcaccaacgcgccgtacatgatcccctacaccttgcgggccatggccgatacgctcgacctgtccatcgcggatgtggcgcgcggcacccgcgataccgcccgcgccgtatacggactgtgagggccgggtgtgcggccgtcgcggcgatgtgttgacttgtaaaatttgtcagaattgtgaacgaggtctaccatgatgtacctgacataagcgagggggatgatctccacctcaatggaggactgaacgtatggctgagtcgaaccaaaggaccgcacgcgcccaaaaagcctcaaaggcccagacagcccaggctggcgccgccaaagccaaggcccgacaggaagaagaagcactgctgagggccgacacctttaccaacgctcccaaggtgtcccgccgcactctcaccaaggaggagcgcgaggcactcgccaagcagagggaagccgaaaccaaggaagccgagaaaatcgccagcgcatggtcgaaaggcggcctcggccgatggtgggcccgcttgcaatccagcccagacaaggttacctggggcatggcgatcgtggcgctcggcgtggtgtacggcgacatcggcacctcgcccctctacaccgcgcagaccttccttgccggtcagggagggcttggcagcgtaaaccgagaggccgtgctcggcatgctgtcgctggtcttctggtcgattacgctgatcaccaccgtcaaatatgtgctcatcgccatgcgcatcgacaacaatggcgaaggcggcatcttcgcactgtactcgttgattcgcaagtacggcgcatggctcgcgattcccgccatgctcggcggcgcggcattccttgcggattcggtacttaccccggcggtttccatcagttccgcagtcgaaggcttgcagaccctgccgccattggaagggttgttcgacgaaaacccaagcctgaccctgatgattaccgtcgtgatcatcgtgattctcttctccgtgcagtcgcgcggcaccgaaagcatcggcaaagtattcggctcgatggtgctggtctggttcagcttcctcgccatcgtaggcgtcacgaatctctctaacgactggtctgtgttcgcggccctgaacccggtgtacggcatcaaattcctgttcagcccggacaatgctgccggcatcgccctgatgggcaccgtgttcctctcgaccaccggtgccgaggcgctgtactccgacatgggccacgtggggcgcggcaacatctacttcacctggccattcatcaaggttgcgctggtgctcaactacttcggccaaggcgcgtggatgttggccaatagcgataacccgcaatacaccgcgatgaagtcgctcaacccgttcttccagatgatgaccccgaacgtgcggtacctggccgtgattctgtctgtttcggccggcgtgatcgcctcccaggccctgatcacgggcgcgttcaccatggtttccgaggccacccgcctcaactggatgccccatctgcaggtgcgttacccggcccgtacgcgcggccagctgtacattccggtggtcaacggcgtgttgtgcgtggccacgctcgccgtgctcgccatcttcaaggattccgaacacatctccgccgcgtacggcctggcgttgaccattacgatgatcaccaccaccgtgttgctcggcgtctacttatggcattccggcaagcgggtcggtgccatcgtgttcaccgtgctgttcttggcgattcaggctatgttcttcatcgcgtctatggccaaattcctgcacggtggttggttcaccatgttgctgaccgccgcgattctgttcgtcatgtacacgtggaatgagggcaccaagctcgaacgtgcgcaacgccgtcacatgcggcccaacgacttcctacccgcgctcgacaagctgcacggtgatttccgcatcccgtattttgcggacaacatcgtgtacctgacctccgactcggaaaccaagcgactcgacacggacatcttcttctccatcttcgccgaccaccccaagcgtgcccgtgcttggtgggcagtcagcgtggaaaccaccgacgagccgttcacccgtgaatactcggtggaggacttcggcacgaactacatctaccgcgtgcgcttccgtttgggcttcaaggtttcgcagtccatcccggcgtacatccaccagatcatgcacgacctgtccaaaaccggcgaactgcctaagcagaagtcgatttaccccaaggtcgacgccgatccggacatcggcaccatccgttacgtgctgattcacaaggccctgatgccggaatccaaggtttccgcacgcggtgccctgtcgttgcaagccaagtacgcaatccgccgcatggccggctcgccggttaagtggttcggtctggcaccttacaacccgctggtcgaggtgcagccgctgttcgtctccacccgccgcccaccgcgtctgaagcgcaccgatacggccaagaccatcacgacgcccacgccgactcgtgcagtggccgacccggccgccgtccccgacccgatggacaccacgtccgggctcgggcgattggtacaggagctcgatgccgccgtatcggccgaggagcggaagatcgctgagaccgctgccgccgctgcggtcgctgagcagggcgataagggcaaggccaagaacggcaaacccgccgccaagcctcagcgctccgccaaacagaagcgataacataccagtttgcagcggcgctgatgcgctctataaagaatggctataacggtcgccgcacgtcgccgcacggtttcggtaagttgaaataccatgtgcagattactgggatacgcgacggcaggtttcaacctgagtctcaacgccgtgttggggcaagacaatgtcgaggatttccgtgaactgtctgaaatccacaatgatggctggggtgtagcccagctttccgatcccgccgaagcgccgcacgtgcgcgacggcggcgcacccactccggaaaccggcacccgaatctacaagtcgaccatcgcggcccgtcatgacagcacgtttgagacgctggccgacgaaccgtctcgcggtgccatctggcacctgcgcttggcaagctccaatctgccgctcatcatggagaaccagcacccgttctatgcgaacggcctgagcttcatccacaacggcgatatctcggacgccaatggccgcaacatcgtcaccaaccgctcatacccggtgaaccacagcgtgctcctctccaccggcggccgttccgactccgctatcttcttcgcggtgattctggaatacatcggtttcggctttccgctcgacgaggccgtggcccaggccgtgcgcgaactgcgccaagcctacccgaagtccagctacaactgcatgattcagtccgaggaccagctcatcgccctgtgcgccgccggtcgtgagaagaccagcccgcgcatcgtggaaatctacgatgagtatggccgtggcgagcaggccgccgactaccgtgtgatgcgctaccgtgagctgcgcgacgacaacggcgactccgccggtgtggtggtctcctcttccggctatgagcaggaaggctggaacgtgctggagaacgaccagatgatcatcgcctccaaccgcaacggcacc

SEQ ID NO: 804 - DNA, 2698 bp, Unknown
  R14_18m  MAG No. k141_5306
ccctccataagaggcacgatgcatataggtttgatgccacatactggctcccctcagggaggggagctatgggtggaactaccgcacgaccttcgcgtattcgtcggcgctcagcagctccggctcatcgtcgtcaagctcgaccttcagcagccagccttcgccgtacggatcgccgttgaccacggacgggtcgtccgccacgtcacggttcacatacttgaccgtacccgccacggggctgatcaacggctggactgccttggaggattcaagctccacgatctcgtcgccggcctccacacgggcgccaggctcaggcaaatccacgaacacaagttcgccaagctggtcggcggcgtattcggttatgccgatgattgcggggtcgaccgaacggtccacccaagcatgctcctcggagtattcgaggtggtcgggaatgtcgaggttcagcggctgttcgttttcgttgtcatcactcatagtcataagcctaacctatcttcgcggtccgtcacagctcgcgaccgagccattcctcaatcatgtagcgggcgatggtggcgcggcccggcgccgccatacggccggcgatgagctcggccgtgtattcgtcgcgtgtgacccatcgcgcggtcatggtctcctcgccgtccacatgcacgtcggtggtgatcgcatgtgccttgaacgccatcatcagcgaagccgggaacggccacggctgcgagcccaggtaccgtacctcgccgagcttgatgccggtctcttccatggcctcgcggcggcaggcgtgttcaaggttctcccccgcctccacaaatccggcggacaccgaatacagcctcgaatccttccatgccgcgttgtgttgcagcagcagacgatcgtgcccgtccacgatggcggtgatgaccgccggctccacgcgcgggaacagcacacggttgccgtccgcctcgttggtgcatcgctgcgcccatccggcgagcgccggccggaccgccgcgccacaggtggggcagaaccgctggcggctgtgccagatgcttaaggtgatggcactggtggcttgcccagcctcgcgcgcgttggcgtgaggggcgaatccgcgcaggtccacccagtcgaaccgggtcacggcctgttgcagcagcgtgggcttcggggccaagggctgtacgggcgcgccgaccgaatcatcgaaggcatcgtccgcaccttgtccggccgaatccggtacaccgagcggcccggcgattttggctgcggctacgccgccattgcccttggcgtttcccggctgccgtattccggcggcagcacctccgctgatgccgttcttgcccagcgcaccgtccacggtgccggaatcctgggtgccgagcacgccgccggcagcaccggaaacaccagcaatcccgccaacaccgggaacaccggcttccggcacgcgcgtgatatccacggcgaccacggattcgccgcgcgccccggcataggagccgaggaacatggcgaccgcttcggggtagcgtgccagttcggcggacacataggcgcccggcaacgtggcgagccgcattttcacgttctcatagtccacgagctcgccttggccgcgcggtacggcgacaagtccgccgcgcgtaagcacgactttggtggtcggctcggccaacagctcgtcgatcagaccgggttcaccgcgccggtccacctgatagtcgatgtcaccttgcgcgagcggcaggaacggcagcgcatgggtcagcgccaggggcgaaaaatgaatgtcagtgcccatcgaggtctcctatgcgttcttctgcgcgttctgcacgcgcctgacgagcgagagcagtgctcgcgccacggtatccggatgttcgacggcactgaaatggccgcagtccggaatgtcgatgaattcggcgccggcgattcgctcggcgagcggacgcatcacactcggattgctggaggggtccagttcgccagacaccaccaggctcggtgcgctgatcgtttccggcaccgcccccagttcgggccggccataggtcatgcgctgacgccaagccagaccagccgggttctgttcgttgatccagccggtcatggtcgcgatgaattcaggagtcttcttgacggtggaatcgccatcggccggttgcgcgaagtgcatgaccggttcgaccgagttcgtctgttcggcggcgtccgccatcttcagtcggttctctccgcccacgccgtcggacgcggccatcgtgtcacacaaggccagtccggccaccgtttcggggtacaggcgctggatgtccatcgccacgtagccgcccatcgacagtccgccccagatcgcctgctcgtagccggcggccttgatcaggtccacgtaggctccggccaggcgatccagcgcctcgctgtacgcgccgttcgccatgcgggggccagaatcggcatcgctcggcaccggggatgcgccggagccggccatatccggcgcccaaatcgggaagtccggcacatcgttcaggtcggcggagtcggcgagcgccttcgcgcacacgtcccacatgcggtggtccaccgggtaggcgttcatcagcaccaccggcacgccttcgccatcgcgatagatatgattggccaattcgattgccatgaattactccttcacattcac

SEQ ID NO: 805 - DNA, 4742 bp, Unknown
  R14_18m  MAG No. k141_5437
cgacgccgtcatcacctgcccggcatacttcaacgatgcccagcgtcaggccaccaaggacgccggcaagatcgccggcctgaacgtcctgcgtatcatcaacgagccgaccgcagccgctctggcctacggccttgagaaaggcaaggaagacgagcgcatcttggtcttcgacctcggcggcggcaccttcgacgtttccctgctggagatcggcaaggatgacgacggcttctccaccatccaggtccaggccaccaacggcgacaaccacctcggtggcgatgactgggatcagaagatcatcgattggctggtctccgaagtcaagaacaagtacggcgtcgacctgtccaaggacaagatcgcgctgcagcgcctgaaggaagccgccgagcaggcgaagaaggagctctcctcctccacctccaccagcatctccatgcagtacctggccatgacccccgacggcaccccggtgcacctggacgagaccctgacccgcgcgcacttcgaggaaatgacctccgacctgctgggccgctgccgcacgccgttcaacaacgtgctgcacgatgccggcatctcggtgagcgacatcgaccacgtggtgctcgtcggtggttccactcgtatgcccgccgtcaaggacctggtcaaggaactcaccggcggtaaggaagcgaaccagtccgtgaacccggatgaggttgtggctgtcggtgccgccgtgcagtccggcgtcatcaagggcgaccgtaaggacgtcctgcttatcgacgtgacccctctgtccctcggtatcgagaccaagggtggcatcatgaccaagctcatcgatcgcaacaccgccatcccgaccaagcgctccgaggtcttctccaccgctgaagacaaccagccgtccgtgctgattcaggtctaccagggtgaacgtgagttcgctcgcgacaacaagccgctgggcaccttcgagctgaccggcatcgctccggctccgcgtggcgtcccgcagattgaggtcaccttcgacatcgacgccaacggcatcgtgcacgtgtccgctaaggacaagggcaccggcaaggagcagtccatgaccatcaccggtggttccggcctgccgaaggacgagatcgaccgcatggtcaaggaagccgaggctcacgaggctgaggataagcagcgcaaggaagacgccgagacccgcaaccaggctgaggccttcgcctactccaccgagaagctcgtcaacgacaacaaggacaagctctccgacgacatcgtcaaggaagtcaccgacaaggtcaacgctctgaaggaagccctgaagggtgacgacaccgagaaggtcaagactgctcagactgagctgatgaccgccgcccagaagatcggccaggtcctctacgcccagcagggtgccgagggtgccgcggccggtgccggtgcggctggcgctgccggcgccggcgcttccgctggctccgcctccggttccgacgacgacaccgtcgaggccgaggtcgtggacgacgatgacgacaaggacaacaagtgatgtccgagttcaacaaggacgactacctgaacgacctgccggatccctcagatgctgaggctgccggccaggccgctcaggcctcttcaggggctgacgcctccgccgagtccgactctgcgcaggattcggctgcccaggctccttccaatgaaggagccgacgcggctcctgccgcagctgagggagagaagtcggatgccggagagaagaccggcgaaggccagtccgattccgaagacaccctcacccccctcggcaaggccaagaaggaagccgcagactacctcgaagccctgcaacgcgaacgtgcggagttcatcaactaccgcaatcgcacgcagaaggagcaggagcgcttccgccagcacggcatcatcgacgtgctgaccgcgctgctgcccgccctcgacgacatcgaccgcattcgcgaacacagcgagatggacgactcgttcaaggccgttgccgccaagatcgacaaggctttcgagaagttcggcgtcgagaagttcggcgaaaagggcgaggacttcgaccccaccaagcatgaggcaatcctgcacaagccggatgccgatgccgacaaggaaaccgtcgacaccgtggtggaagccggctaccgtatcggcgaccgcgtaatccgcgccgcccgagtagtagtagcctccccgcaaaactgataacggccagctcgttaacgagctgacattaccttggctcccgctggcgggagctggcagccgaaggctgactgagggtggtcaaacactgaatataaaccaccctcagtctcgcttcgttcgacagctcccgatgttttatgcgacgtgcgcaattgcgcactgctatgaacagcccactgggctgttcatccagcgggagccaaccataaagacttttcaagaaaggagacatgaatggctgaaaacgaatggctcagtaaagacttctacaaagtccttggtgtctccaaggacgcttcggacgacgacatcaaaaaggcgtaccgcaagctcgcccgcaagtaccaccctgacgtcaacaagaccaaggaagccgaggagaagttcaaggacatctccgaagcctacgacgtgctgagcaagaaggaagatcgccaaaagtacgacgcgattcgccagttcggcatgggcggcgcccgcttcgcaggcggttccggcgccggcggcttcgacgcttccggtttctctgatatcttcggctccatgtttggccagggtgccggtggcaacggttcgcgtatccgcttctccacttcgggcggcggccccaacaacatcaacgacatcttctcgatgttcggcggtgctgcaggtcagggcggccagtcgtatggcggctacggccaatcgccgtacggcaatgccggtggctacggctatgaggaggccccgcgccccgaaaacggcgaggaccgcaactccaagatcagcctgaccctgcgtcaggcggtcaagggcgctaccgtgtccctgtccgtggacggcaagaagttcaaggctcatgtgcccgccggcgtcaaggacggtcagaagatcaagctggccggcaagggcaagccgggcatcaacggcggcaaggccggcgatttgtacctgcacgtcaccgtcaagcccgatgccgcgttctcgatgcgcggccacgacatcgtcatggacctgcccgtaactgtgggccaggccgtggccggtggcaaggtcgaggccaaggatatcgacggcaatcccgtcaccttcaaggtgccggcaggctccagctccggtgccgaggtcaagctcgcgggacttggcgtccagtgcggcaaccagccgggcgacctgatcggccgcgtgcagatcatggtccccgccaagccgggtctggccgtcaagcacgccgccaaagaattcgacgaaaaagccggcgactatctcagcctgtaatcaggaggtgaacaatggcgcggttagccaaccaaatgaagcagttgtacgcgatgtgcgcaaccgcgctggtgatgggcagggccgatctcgacggagccgatgacgtcggcttcgacatcgaactgcccatcttcaccgtcggccaggcagccgaactgggcaacatccacccccagaccctccgccagtacgaccggctgggtctggtccgtccgcagcgcaccgatggcggcgcacgccgctactgcctgcgcgacatcgcccgcctgactcgagctcagcgcctaagtcaggatgagggcatcaatctttccggcatcgcacgcattttggccctcgaagaagagaatcgccaactgcgccgcgaagtcaaacgcatgcaaaccggcgaccaggagagcgttttcgccgcaggccgtgacggcaatatcgtggaggtacaacgctccaaccgcgcccgcctctggcgcaacgccatccgccgcgaaacccgcgaactgcccggccgcgataccgctgccgacaccacgcgcgaatccgactccacccccgccgattccaaatccatggtcctgtggggttggtgatttgctgttcggctgtcgtgcggagttggtgagataggtatatcgaatacgaatagttgaggattcactgcgacgtacggaggtaaccatgctgctcaaggccgtgttttgggatttggacggaacgcttatcgattcggagccgctttggcatgacggtgaaatcgagatcgcgcacaacaatggcggcgagtggaacgaggacctcggttgggagtgctccggcactccggtgccatacgtggcagaggtcatgattgcgcatggctgcacattgagcgttcccgaaatcgacaaacagctcaaggattatgtgttcaaggcggaggtcgaacgtctgccgtggattcccggcgtattggacgtgctgcactcgctcaaggaggccggcattccgtccatgctggtcaccacgtcgccgcgccgtatggcggagaacatcatgaagcagtccgagggactgttcgccggctacgtctgtggcgacgatccgtacgaacacaagccgaaccctgcgccctatctggccgcagccgacaagcttggcatcgcccgtgaagacatggccaagtgcgtggtgctcgaggattcctcggttggacttcaggccggtgcggcatcgggcgcgactctgatcgcgcagac

SEQ ID NO: 806 - DNA, 12674 bp, Unknown
  R14_18m  MAG No. k141_5514
gctcatgccggcgcggcgttccgcacggttgcggttcttcttcacggccttcttgctggccttgtcgccgtgcttgcgctgcggctcgccttcggcaacaaactcgccgcctgcgttctcgtgctggaatccggtctcggcaacgttctgctcggcgcggtcgcgattgcgattgtgcttgcgcctgccgctgcggccggactcatcgcccgccgcgttcttggcgcccctgttcttgcccttgcgcgggttgcccacgggctgcgacttgtcgaggctccaaccatccacgcgctcggcgcggtcgcccacaagctcaagcacttcgggcgaatcgtgggtcacttcgatcatcttggttttgatgccggcctggttcagtaagcggcgcgtctcgcggcgctgctcgggcagcacgagggtgaccacgtcgcccgccttgccggcacgggcggtacgaccggagcggtgtacaaaggacttcgggtcagccggcggctcgacctgcaccacaagctccacgccgccgacgtctatgccacgggcggccacgtcagtggccaccatgacgcgcacgtcgccggaatcgaatgcggcgaggttgcgatcacgctggttctggttcaggttgccgtgcagctcggcggccggaatgccgttctgcgtcaggttcttggcgagcttcttggcctggaacttggtgcgggtgaacaggatgcgacggccttcgcccgaggcgagcacgcgcacgagttcgtgcttgtcgccgcgcgtggtctcgaacacgtggtgggtcatcaggtcaggttcggtggtggccgaatcgacctcgtgcaccttgggatcatgcaggaaggtgttcaccacttcatccacgccgtgatcgagcgtggcggagaacagcatgtgctgggcgtcgggcgaaatctgctcaagcagtcgcttgaccggcggcaggaagcccatatcggccatttcatcggcctcatcgatgaccacgacttcgacggacgagagcgtgagcgcctgctggcgcagcaggtcctcaaggcggcccgggcaggcgaccacgatatcggcgccggccttcagatcgcggatctggtggatgtacttgacgccgccgtacaccgtggtggtgttcatgccgaacgtgtgggccagcggcatcagcacgtcgttgatctggttcgcgagctcgcgggtgggggccagcaccaggccgcgcgggtgcggcaggaaatcgtcagcgcggcgctcttccaagctggccttcttgcggcgcttgatttccttgcggaactcctccatcgcgatttcgccaagcgaatcataggagccaagccgggtgaccagcggaatggagaaggcgagggttttgccggagccggtgcgccctcggccgagaatgtcgcggccggccagtgaatcgggcagggtgtcggcctgaatggggaatgcggtcttcttgtcatctgccgcaagtacgcgcaccagcggtccgggtacgccaagttcgccaaaggtaagggggcgggattccgcgctgtcgttcatctggaaatcagcggaatcgtcacgatcatcgaaattattacggggcacagtggcctttcatgtcaaaggttacgcaaattacgcaagctttccgagcttagcgtaagccccctactttgcttgatgctcgccacgctgtcattccactctttacttatgaccccatggggcggtaactcgcccatgaggcggtaacttgcccatggggcggtttgaagaaattgtgaaaccgcagaataaagccattttcgtctaccgccccatgagggttttaccaccccatgggatgtttgccgccccatgggccaattaccgccccatgggttctaccaccacgtaaggcgagcaccgccccatggaacacgcaaatggcccctacccgtgaaggtagaagccattgtgcaaaagggctgagccacaatacggcccagtagccctaaaacacactacaaaatatccggatcgtctttggcgatagtgccggttgccttgccaatggccttcaggccgtggtaggccacaagaatcacgatcgtgccaatggcaatgccgttgaaggaaatgccaccaacagtgaacgcgaattggccgatggcaataatcatggtgatggctgccaccatgatgttcagcggcttgtcgaagttgaccttgttctcaacccagatgcggatgccgatcatgccgatcatgccgtacagcagcgtggtcacgccgccgagcactccggcggggatcgtgttgatcacggcgccgaacttcgggcacaggctcaggatcagggcgaaggcggctgcacaccagtaggcggcggtggagtacaccttggtggcggccatcacgccgatgttctcgccgtaggtggtggtgccggagccgccgccgaagccggcgagcgtggtgcccaggccgtcggccatgagggcggtgccgatctggttgtcgtagtcgcggccggtcatctgggccacggacttgacatggccgacgttctcagccacaagcacgagcacaacagggacgaacatgggaaggatggaaaaatcggcctgcggcaggtggaacttcgggaagccgatccatgcggcgtcaccgatggcggagaagtcgacctggccgcggatgcaggcatatacatagccgatgattacgccgaccaaaatgttgaggcgacccagcaagcccttgaacagcacggccacgagcagcacggccagcagggtaaccagtgcggtgtccggcgcggcttggaagttggtccacacggaaggtgccagattgaaaccgatgatggccacaatcgcgccgttgaccacgggcggcatgatgatgtcgatccatttggagccggcgtaatgcacgagcacgccaatcagggccagcagaataccggtgaccatgatgccgaagctggcgaccgcaatgcccttgttggcggtggtgaccgcggtgatcggtgcgatgaagccgaaggacgagcccaaatagctcggcagcacgttcctgttgataagcaggaacagtgcggtggacatagccgtgaagaacagggtggtggacgggtcgaagcccgtcagaatcggcaccaggaaggtggcaccgaacatggcgatgacgtgctgtgcgccgataccggcggtgcgcacccaagtcagacgttcatcgggctcgacgacctcgccgggcgccagcgtcttgccgtcgccatgcaattgccattggaagatattggacattactactctcctcgctctcgcttggggcacggcattcacaaccagccgcactacgcgccattctagctcacgaagattttgtgaagtctctcttccgggaaaggctatttgccgtaatactccagcaggtgcggatcgacggcctgcaccacatccaccaaatcgccattggagagatacgggcgcttgaattcgcgccacggctccaccttgacctcccagcggccggtcgtctcgtcgagcacgggccgggcggtctgctcccagcgcacacgcttggaggtgcggccggtttccgggtcgcggcgtgtatagtgcaggcaggtgcagttggtgatcttccagtcgtccgagtcggcgcgatgcaggaattcctcgtcggccagatcctcgatggtgagcatcagggcgagcatgaagtcgccgtgggtgaccatgaccacggattccgaatcggatttgcggctcagcgaggtcaggatgttgtgcacacggtcctcggccacatcggcaatcgactcgcctgccggcggacgccagtacagcggatcggtattcttgaagttccagttgcgtgcgtagttgtttttgaattcgtccttggtgatggtgttgatttcaccccaagaacgttcgcgcagcacacggttctcctcccatttggccttgggcagggccatggtggctgcggtttcgcgggtgcgcacgtatggcgagaccatgtaacggtcgaacagctgctgctggctgaccagccaacgaccgatgcagtcggcctgcttgcgtccggtggcggtgagtctccaggagcggtcgggtacggtgacgttgtcctgcgtatacagggagttgtcgccctgttcgcccgcctggacgatgacgttcgcttcggattcgccatgccggattacgtatagatcgagcggcatgctcatatggattcctctttcgttattggttacgttgtgttgttttctgctgtttcctacttgacctgcgtaatggtgttccccttgaccatgaacgcatgccgggccatgtcgatcatcggctgatcgaacttggagtcggtgtagaactcgtcgatgacggcgtccggaccgtacagttcgcggaaccgtttggtcttgttggtgttgaagttgaggtacgtgaccttcatcgtctccacatccacctcgctggccacgagattcctcacgccgagtctgcggcaggcctcccccaccgtcagaccgaaggatgcggtgaggatcacatcgtccgactcaggctggtaccaaggcttgatacgtgcgtaatatcggtcccagaaatcgtccacgagctgttcgacgctcgccacccgtttggatcggctcagttccgtgagatagccttcggtcatcttgcccacgccgtattccatttgttcaagcgtggcccggccaagcttgtatttgaccgcgtaccgcagcacgggggcgatatagcggaacactttcgggtcgtggcgggcggaatacaggtacaagtcgaacaggctttcgccatcatagatggttccgtcgaaatcgaatacgcgcataccttctgcttctactctgttattccttgtctaaggctaatctcggtaagccggcgaaagcgcaaatacgcagtgaatttcacatgaacactgttttttggattgatttcggtacaggtaacgtacactggtgacagcgtggaaggaggtgcgtaatggcgacgtctgaaatcgaacaatggtggattgataagtttcaggagaacctgggtccgattcgcaaggtagccggatggacgactcagcaactggccgacgagctgggagtcgcgcgacagacggtgtctaacttggagaccggcaaaagcccgatgaccaagctgcagtatctcgctttacgtacggtgttcagcgccgaaatcgcacgtcgtgaagaccgcgatctggcacgcatcatcaagactttggtcgacgatcccattgagcaacgcattcgcgaacggcgcgcccaagagcaggacggcgaggccgttgccgacaatgccccagtcaatacaggctgtggcaacgttgccgacaacgccgccaccgagaaacgcaagcccagtgccgccaccttgaaggcttcaaagactgccgcaacgggcaagcccacgctcagcacggcgatgcaggctcttgccgtcatcaccggcgcattggccagtggaaccgccgccggcatcatcacctacttgatgttcccggacggcggcccgaacaagcgctgagtcgccgaaatatcgaatccgttactcgcaggccacgccatcgtgatcgcggtccaacttgccgttgtatccaggctgcccttgatacaacggagcagcaccagccgcacggacttcagagcaattcgcataatgcacattttgctgcgcttgctgttgctgttgtgcctgtcgagcggcctcctcagcttgccgctgggcctcggcctgcgcggcagcctgttcttcagcggcctttcttgcagcctcttcttcagctgccttcttggcggctgcctcttcagcggcctttcttgcagcctcttcttcagctgccttcttggcggctgcctcttcagctgctttcttctcctcagctaccttcttcgcttcttcctcctgcgctatatcgctggctttacgaacattgataacaggcttgtccccatcttccacggattggacaacccagttcgaagctctgagcaccattttgtccgtgtcgcttttcacctcataatcagaggaggaaaaaccggcatccttgagctcgtctttcacatcggccagcgaacgccctttcttggcgatggcgataattttcgaatatgtggattcctccttgccgtccgcaccgtcagaagaccccgagcatccagcaagcacaagacccagaaccatcataagaatcacggtcaacgcccaaaccgcacgattgacacgcttcatgttcccgaaacgaaccctgttgttcaacattattctctcccttgtagtcgcagatctgcggatggtcggaaccacgtcaatgtgaatccaaccatcctgataattactgcttattcaatgatatattcatccattgttttcgccgatatatcgcaccagcgtttccctcattatcaactatttcgagttgcatgaatgcgccgtttataggccaagaatttcgtgcttttttgcatcaaattcttcttgggagagaatgccgatatcaaccaattccttcaattttttcatcgcctcgacttgttcttccacagacatggatgccgtgtgagaggcaggagcagcggcttccggtgccggcgcaggcgccggcgcttgaaccggggcggccgtcataggattaatggcttgtgccatattcatgcccagcaacatgccaccatcgccaaagccgttgtcttggatgccttgcgcaatgcgctgctgggcagccatattgccagcttgctgggaaacgccctcgtatgcggcaacattcatcttattcgaggcgaactgctgcacgagttgacgtgattgctcggtgaactcgatactttcgatgcccacactagacacttcaaagccaaaacgatcattccacgtacccgcattggcccgatcgccacgcacgcatgccgcgatgtcattcgtcttgccgggcaattgcgaaatacgatattcattggacaacgaattgatggccacaataaacgactgtacgaattcagacagaatctgcctacgtggcccttcatcatcgaatgaatacgacacggtagtggcaggcacaaagttacgaacgaatcgaactggatcagtgacctttagcgacatggatccgcgtgcgcgaatttccaaatcgacgccatagaaccggtcgttatacaccagcggcgcagaagtgccgaatttgatgccacgaatctcacgcaggttgacgaaggccacatatttggtgcggccaggctgacctccgaaggtgaatcgatcggcaacctgattgaagaacgatccgatgccgtctccggcgagcacgctctgctccccgttgcgatattcataaccgcccgactcggtgatgacgttttcgatacctgtttcagagaaaatgaacgccgcagtattctctggcacatagatacgcgaaccattggtgattattccctcggaaccgtattcattcgaaccgcgatcgttgttgcttccgcggggaatgcccggcacaacgacggtgtgttccgtgaacggaccagcggtgatgatatcacgccacaggtccgcgaatgtaccgccgagcgcgccggcgaacgccttaataactgccatctgttttttcctcgatatctcatgcatatggccgatcttgcgactatgcaatcgcaagaccggccgttatgctgacatgttggttatagctgcgtttcgcgatcgcagtattcgcatcgaacgacttctttgcgatgaccggaaagcggagcgccacaaccttcgcaattcaccgaaaccacgggttcggtaatcccaagcccactacggaatgcgccaaaagtgtccttcagcgccccggccagagcctccgttccggggatggccttgttgaaggccggctcatccattggcgtatactgtctgccgcgtatacccatataccgtcatcgttcctttcttggaaaaccgtcacctcgatacgccagtctgatcactggcccaccgatgcgagcttctgcgtgcatcgagtcatgacctcggtgtagtaggccgaatcctcactgctgagggagttttcgtcaatggcgtctaccttctgggagaactcagagtaacgcttcatcatgctggcatagtcggtagccatgctgaccacgttgtcggatttctgatatttgttcatgaaggcaacatactcatcgataaaggcctcgtagctgtccatcgtggccttgaagtcagcactgtcattggtgttctgctgcgtcttctgatccgaagactggtcgctctgcttgttggcatcgctggaatcagtgcccgtatcagtgctcttatcatcctgcttcgcggcgtcgccgtccgtagacgtatcttccttcttttccggaacctggatagtgatggacatgatggtctcgtcgtcagtgttacgagaaacgctcacactgtatccatcggcgttcttggcattgaaactgtcagcggacttgctatagtccacggtgaaaccgttgtcttgcacggacttgacgtagtcggcatactgcttggcgtcggtaccgcacacctcgatggagaaatagtccgaagactcgcttctaatttcaccctttgtggatttcggctgcggcagcagcgccgcgatatccgactccggccatgaatatgcttcgcacttggtggcgagcgatgcttccaattccgcccgatcagccttggccttcgcaccgtcacgaattacgaacacgccaccgattaccagacccacaacggtgataccgactgccacccaggccagcactcggccttgcaccttgccactcgggcgggtcacgtatacggcgaagcctgagagcagtgccggaatcaccgtggcgaacagcagtccgccccaggatcggccagaaacatccacaaattgggcgagtacgaacaacactccccaaataatggcgaacacagccagcttggaagtcttcttcaccccttgtgcattcggagcaagcacggcaggcgcagcggcaccagcaaaaccagtggcagcaccggcaccatgtgtggcgggtgcaggagccacaccaatacgcttgtccagagcggcgaggaactcatcaacgcgcttggcgctttcgtttccagtcgcctccagacgaatggcggcccctgccgcaccctgcgggactacggttagcgtgcagttcaccccatcataggagtggaaggaaaacgctccggtctgggtgttttcgttatccaaggtaaacgtggcgccagtagtcagctggtcgtgaataacttggaacagctgttgcggactgaccgcatatacacgatcaaatggcgcgccggcgggccgctgcgatgccgtagccggagtcatcggagtggtggtagcaccatcagacgctacgttcggttggccagccggtacagtattcggcacggtaggcgcattcgcgcgatcttccggtgcgtcattcgtgccttcggacggtggaaccggctgaggttgttgatcaaatggcgttgtcatgatgcccttctttccttaagcagcagcattaccagcacagaagaggcaagcccggcaaccgttacggtcaatccgactgccatggcaagccggtatcgttcgctcatcattgcgtcccttcttattgctcgctttgctctgcgatacatcgaaaccagtgtatggcgttgttattatgtacgcaaattagcattttgtatgcatattagctttattgtcgatgcttgataccgcgcatgaacatcctttccgccaccgcacctacacggatggcatcgaccattgtcggcgacacgcgcgggccatacatcagctgacaactgaatttttcggcgtgtttccgaaaagtcggcgtcctgtacgctgggaatcgagcaaccgcgtacgatggcgcagcacagcacccgcaacacagcgacaaggagcatgggcaatggcagacatccccgaagaacatttgaccgaggaactgttggatcggctgctcgccagcgccagcattgagcagtatctcgatgagggactcgtcagcgcacgcacgctgaccgactatctgttcgaccgtatggaagcccatgacctgagacgagccgacgtggtgcgggcatccggcctcaacgccacagtggtttatgacattttctccggcaaaagccgccccggccgagatcacgccattatgctggcttttggtctcaagtgcacattacgtgaaacccaacggctacttcgtcttgcaggcgtttccgaactgtggtgcaaacagcgacgcgacgcgattatcatctggtgtatacgcaatggattcgaccgcattgccacggacgacgagttgtatcgtatgggagaggcgacgttgctaccggccgattgacgacattcggcccaacaacactcaccagtgagacgcaagtaagagggcatcaaggagagacatggacgataagcaggcgatgcatgcgatgagcatcgacgatgcgtaccatgtcgagcgtacgctcgctcgcggaccttccggcgtcaccgaactggtgagcattgacggcaacggcccgttcgtacgcaagaagattccctctcccctagcgcaacgcaatgtgtgggcggcgctcagcgcctgccagagtaatcgtctgccgcgtgtggaagcgacgtacgagctgcccgaccggttcgtcatcgtctacgattacgtgccgggcagcacgcttgcgcaaattgcggaggaaaacgggcggcttgcaccgaatgtggccgtgcagcttatcgaccaaatttgcgaagccgtgcaggagcttcaccagcacggcgttatccaccgcgacatcacgccggccaacgtcatcgtggcccaggatggcgcgcatctcatcgatttcggcatcgcgcgcatccggtcagaggcaagcaaccgttcacgggataccacggcgcttggcacctacggattcgcctcgcctgagcaatatggctttgccaaaaccgacgcgcgttccgacgtattctcgctgggccggctactcggattcatgctgaccggcgtatatcccgatgccagcgactacgagcagcgacttgccgatgatgccgcagtaccggctcgactacgcgccgtcatcggctatgcgtgcgcattcgagcccagcaaacggccacagagcgtccaagagtttcgccaggcgctgttctcccagtccaatccgcccataccgaacgcatcatcggcaaatccgccatcaacgagaacaacgaacggcagcgcgtcggcgtctcgactattccggcgtctgcacttgagcaaacgcgccatcgtgctgtggtccattgccggagcggcactgataatcgccgccattgcgggaggcattgtgttggcaggccaacttggcattatcgggtcggcaacatcacccgattcctcgacacaatccagcagccaatcaaccgataaggccgatggcgggcactcctcgaacgggtcaggaaccgacaatgccaatggcacgggcggagtaggcggcactgacggcgctgatggagacaatcaagacaccgtcaccgacaatcctctgaaaatagtggaatccggctggtcggcggaccagcaagggtatgtccactacgctttcgccctgcgcaacaccagtaagacccagcaggtgcagtatccgcagattaccattacggggcgggccaaagacggttccatcgtgttctcgcagacgcaagcactgaatatggcattcccgaatcagactgtatatgacgccggtcaagcaggcgaaggcaccgccccagaaacggttgattttactgtgctcaatccggatacatacaacgtcgccaaggctcagggaaccgccgccttccccatcagtggaatatccaaaatagacaacagggacggcggcacgacgttcaatggcgaggtccgcgccgtggcagatggattcaagccatctgatggacagcaaatcaagatttccctagtactgcgtaacgcacagaacgcaatcatctatggagatatcgcattcgtggattggccgggcaatggccgatccacgccattctcgattaccgtctacgatctgccgaagtatgtgtcttacgatctgtatgcgcaaatctggtagttgactttacgtctggcagatggccgtcaggtgcctgtcaggccgctgttctcgtcacctgcgcactgacgttacggcgcgcctggccgaacagatagatgccgatgggcagggtcagaacaccgccgatgatgaacaccagcgaaatcgggatcacgtcggccagtggcgcgaagatcaacatgccgagcggcattccgagcgtgctcagggtggtgtcaaggccgaatacacggcccaccatcttctcatcggcctcggtctggatgatggtgcgcatcgggcccgtgcagatggccgaagccaaaccgttcaccacatcaatcagcaaatacgccagcagattgtgaaccacgccaagaccaacgacggagacgcccaccagagcgatgccgaaggcgaccacgcgcatgttgttgcggatgagcttggcaccgatggtagacatcagcgcgccgccgagcagcataccga

SEQ ID NO: 807 - DNA, 8903 bp, Unknown
  R14_18m  MAG No. k141_5522
cagcagccgcaacaaaccccacgcgattggtggttcacggcccatcgccggttttcgacaatcggctcggcgctcgccattatgatggtgttctggatcgggctgaatattctggccactgaagcactacgaacgctgcttggcgccgatgtgcccgcttgggctgtgctgctcgcctcctccgggccgctgtatgtggtggccatgccgctgagtatgttggccttcactcgcgtaccggttattcgcacccggcagtaccccatgaaggcgggggagttcattcggattttcgtcatgtgcattccggtaatgctcttgggcaatatgatcggcaatatattgtctgccggagccactgatggtcaggccaccaatcgcatcaacgacgtgattcttggcagcgactggcgggtgaacgcattgttcataggcctgttggcaccggtttgcgaagaatggatttttcgcaaggagattatctcccgcctgcgccggtacggagaaaagaccgcaatcatgttctccgcattggcgttcgcgctattccatatgaacgtgttccagttcttctacgcctttggcctaggactgatgttcggatatgtatacacacgcacctcccgcctgcggtattcagtggctatgcacatgctgatcaacctgaacggggcagtgctcgccccattggtgatacaacagatcgatccccgcatcctcgacggcacaatcagcgaggccgaaatcatgcgtatggctgaaaccggcaacatgggcggcatgggcatcatgatgttgtacggcacagtgatgttgggcctctgcattgccggtatcgtgctgcttatcaccaagcgcaagaactgggagttctatcttgcgccagaggagttgccggcggggcttaaaatacgcaccgcctatgccaatcccggcgttattgcgtacctactgctgactgtgatgcttaccggttggatgctgttcgcataattgtcatagccagacccagagaggtgagccgggagatatcacagattgtctgacgagccgccatcttcgacaaggtattcggtgcccgaaccggcgatggcgcgcgcggccatatccctcacggtggagggcagcacaccctcgcgcgcgaacacaagcacttggccggtcatgccgtacggggagaagccggtgaacttgaccagcggtggctggccctccagtgccacgtcggcggtggctttggttacgcggtcgagaatatccctgctgatcgcggacggatcgccggaggccttggccgtgaactcgagcgtggccatgccttcgctggccggcgtgagcttggtcaaggcggccgtgttgagtactgaattgggaatgaccatcatgtccccggaacgggtgcgcaccacggtctgacgccaggtgatgtcgtgcacggtacctgtgacgccttgaatggtcaccagatcgccgggttggattacgcggcccagcatcaggccgaagccgccgatgacgttggcgatcgtatccttcaaacccagtgaaatcgccacgcctccgacgccgagggcggtgaccagggtggtcggattgatgccgaacaccggttgcagcaccatcgccgtaccggtgacccagatggtcacgcgcgtgagattcacgaaaatcgaggcgctgggaatctgcgaactatccagaaccctgcgcagcacgcggctgatcacgcgatcggccgcgaacacgacggccagcacgacggccagccagatgagcttgcccgcattgacttggaaccagtgtgcgatgtcttgtgcatattcggtcatatgccctactgtatcgaccatttctggtgaagtcgtaaacatgcgggcccacgtcgggttttggccgttgcggtggtgccgatggtgcgataccggtggcgtgccgtcggcaccaccggcaccaccgcggcaccgcggtgcagcatcgtcgtggtgatgacgtcgccgtgacgcctagtcccggtgctcgcggcaggtctggccgaggccacgggccagacgaatcggatcgagaatctcgtccagctgctcggcgggcaggtcggtgcgttcgccggccacctcgcgcacggtacggccggtgtgcacggcttcggcggcgatgtcggccgcatgctcatagccgatgtagtggttgagtgcggcggcgatcgacggcgaggactgggcatacgagcgtcccagaccgacgtggatctcgatgccctccacgcagttgacgcggaatgtctccatggcgcgcgtcagcaacgccatgccggtcagcagctcatgcaccatcaccgggtcgaaggcgttcagctgcaactggccctcggccacagcccagttcacagtcacgtccatgccgaagatcgtgaagcagcactggttgacgcattcggggatcaccgggttcactttggccggcatgatcgatgatccggcctggcgagccggcacgttgagatcgttgaaaccgcagcgcggcccggaattgagcagtcgcaaatcgtcggcggccttcttcaggtgcacggcaaggctcttgatggcggccgacgtggccacgtacgcgcccatatccgtcatggcggccaccggatcgggcgcggcggtgaccggcaagccggtgatctgcgccagatgcttgatggcggacttgcggaatcgcagatccgcgcaaatgccggtgccgatggcggtggcaccgaggttgagctgggccagcagcggcaccacgcgatcgaatgcagccaaatcggatttcagcagcgtggcgaacgaatgaaactcctgaccataggtcattggtacggcgtcctgcagttgcgtacggccgatcgtcacgtcattgatatgtttgtcggccagatcgtggaaggccttggcgagtttcttggtggactcggcgagcggcccgatcgcgtcgataagcgcgagtttgcaggcggccgggtaggtgtcgttcgtggactgcgactcgttgacgtcgtcgttcggatggatgtatgtgtaatcgccacgctggtggccggcgatttccagcgcacggttggcgatcacctcgttcatgttcatgttcgacgaggtgccggcaccgccctgcatcacatcgaccgggaactgatcggccagtttgccggcctcgatttctaggcaggcggcgcgaatggcctcggccttggccgggtcgatcaggcctaattcctcattggcgatggcgcaggcgcgcttgaccgtggcataggcgcgaatcagctcgggatgttggctatcggtgatgccggagaccgggaagttgccgatagcgcgctgggtgtgaatgccccagtagacgttcgccggcacctccatctggccgatgcagtcatgttccagacgggttttgttcgatgtttcgctcatgcttccatcttcctgtgtgagggctggaaacgccagcatgagaggctgattgcgccttgtgagaaacctcacgcgggggttcattcgacggaaacaatccagactcactggttttcggtcaagcggtgtacccggggaatcctgcggggccgttcgacggtgagatgggggatggcgcggcatgcgtggcggtggcctgcatgccgggggcggccgaatcctgcgcattgtgcacgaagatgcgattccagtaattaagcatgtccttttggctcatggccaggtatatgcccatggccagcacggccacatcttctttaagcaggtctttgatttcgatggcgtcgctcaattcgggccaacgttgcagcacggcgagcatgccgcccacggtgaactcgaccatgagatcggttttcaggtcaaggttcttggggtcgcgttgcaatgtgctgagcatttgcagacggcagaagtcgcgcagcgattcggtcagttcaagcgtgctgtgcgggccggccaacagggccaggcggtcgaggcgctgccgctgctccgggtcggagagcgtggcggtgacgcggtctcgccattgttcctcgggattgccatttgggtcgggggtgcggttgatcggaatcgattcgacctgatgcaggatggctgaatcggccaattcgggcaggctggagaagtgataatagaacgaattacggttcacgccagcctcacgcaccacatcggtgacggtgatcttgcggtagtcgcggtcggcgagcaattcccagaaagcgttctctaggcgttctttggcgggcagcacctcggaatcatggcgtggacgtggcatctcttcctcctgatgcaccagcgtgatatggtcacgctgtctaataacttatcgggcagtataactattatttgtggacatgtctatgagctaatcggcgatttcagttgcgtcctccgctgagggcgaagctgcggtgtcagtgtcggtgtcggtatcggcgctggccggggccgcgctatctgttcctgtcgcagttcctgctggggtttcggctgttcctttggcggtcgcagaactcggcgcggaagccggggcgggcgtcggcctgcgtttggccgtggacgccttgaacagtatcgccagggcctcaaccaaatgacgccggtctgcgggggtcagccctacatacgcgccaagcatcgccggaatcgaagcggggaagttgctcatcacctcgctgaagctggtggcgccgttggcgtgcagcacggtgaacagcgcgtccaccgcacgctcgcgctgttcgggcgtaagcgtggcgatccaatggttcagctcctcgttaaacaactgcgagctggaactcaaatccggctcggtgatgaactggtcgccatccaatagccaggtgaaggcggaatgctgcataatgccatccgaatcggaagagaccacgcggcaaggctccggggtctcgaaaatcatgcccacaatcgacgaacttggcacgattttcgtcaccttcggctggatggtgcggtaggcggggctggtcacaatctccggcgggaaaccggggccgtccagtgaatagacatgctgaatgcgcttgcgcaccttggggtcggcgttcatggccgcgtaaatcgccagattgcctcccttggaatggccgaccagaataatcggaccctcccacagtcgcgccaccgtatccagataggcgctggctgaacgttgcgccggcaccggatactggaaagccatattgaaatcttccttccatccgatgagcgaatcatcggtaccgcggaaggaaataaccaacgtgcctttgtaggtcggctttcggcgcttgtggccgtcgggcagttggaaggtggcggcggcgaattgggtttgctcaccctgattgatgtgctcgaccaccgcgcccagacgaacgttggcgtagcgggggttctcgcccgcggcctggaacaggtcgtgggtcaggtccggattgaccactgaaaccatttgggcttcgtgcggcttgtcgtcggcatgcgttttcggcgaacgatgcagctcgcggttggcctcgtcaaggcttaccgattcaagctcgggatgccagatacccttcagccagatcagtggatgcttgggctcgaaagcgcgaatgcgtgcggcgaacgagcctgactgcgtctcatccagcatcaacgtcggacagatactggccacatcctcatagatgagcgtggagatgatcaaggcgtcgatttcgttgaacggcaagtcggcgaaggagcgcgtttcggtgtgcgcgtaatcgataatgccggtcatacgcacctcctgcttccgttgatattgcatatccccttgggccatgtggtcttgcgattgcgtgcggccgtgcggctgcgcgcagcaattaaccatatacattccattgtagggattgtacggttttggccggcgcgatcgagcaagactgcaccgacggcgaacaattcgtgggaggattcccgtcagcttgtcgaaaattgtcgggtagcgggggttgcgatgccagccagccgaccaccctccggcgttacgtgccacttcccgccggcgggaggggtaaccactcaatccttttgacgaggcggaccgctggggccgtcaaaggttcggcagatcgaagcgggccagatccacgccttcgtggtcgagcagttcggccttgatgtcgagtcggccgccgtagccgccaaatgcgcggcccgagccgactacgcggtgacagggcacgatgatagtaaccggattgcgcttcactgcgcctccgaccgcctgcgcggccatgcggccgccaccgcgtcgttcggccaattcggcggcgagttcgccgtaacttaccgtcatgccatagggaatctcggccaccagattccacacttcatgttggaatggcgtgccggcgggatgcaacggcggcacctgatccgagccggggcgttcgccgtcgaaataggcggtcagccattcgcgggtcatacggaacacatcgggttcacgatcgggttcgcggttcgagtcgagaacggcttggtggtcggtggcccaccaccagtcttcaagacagagctcggtcaggccctcgccgtccgaggccatcatcatccggccgatgggcgtttcgactgtggcccgcatcagttgtcgttgcgtcataccgccattatcgcgcgttgagggatgaagcccataccgtgcctgatttcatgaaggacgggtcgtgctgtacggtcagtattgcgtgctgggcagcgatatctgacatagtgggggttcttgggccggcatgagtgttctttccgacatcccaaccgtctaactccgtttcgaggggctgatttgggctgttccggaggtctatctccgtttcgaggggctcctcatccgggaaaccacaagtataaacggctccgggctaacgtcattacgccgtttttggcccgtgtctactcagccaccagccccttgaaacgggagtagacctccggagaaggccaaatcagccccttgaaacgcagcgacccctctgattggagtcaatcagaggggttcggcacattgctgatgcagctggtccgccgtccgccttgaggcggaacgtaaccaagattcaggcgggattactccgcaacgagcgccaggaaggcggcggccacggcggctgtcgggttcgggaattcctcgtcctggttgaagaacggcacgtcggcgtagttcaggaacttcacttcggcacggtcgccgatcagggccttggcctcttcggccagctgatcggttatcgtcatgcgttcctgatttccacggccatggccgtgccagatgtgcccatcgcttggttctacccgctgtttatgctggccatgcccatcgcctggctgctgtatacggccaccgcgagttatgtgcacgacggcacccgataatcgttggaaaaccggtgggacacgcgggggcttggctttttcctgagattggcgtatctttgtcacctgttgcccgtgaaggtaacacatgcggacatagcttagttggtaaagcgcaaccttgccaaggttgagaccgcgggttcgagtcccgttgtccgctctcggatggctggttcaggatgattgattcagcctgaggatgacccgggcggttggcgcagtggtagcgcacttccctgacacggaaggggtcacaagttcgaatcttgtatcgcccactcgatgaatcgccggcagaatgttgccggttttttcatcacaagctcgggcgattggcgcagcggctagcgcacttcgttcacaccgaaggggtcgtaggttcgattcctacatcgcccacccgatatcacgctcgtcagtctatgatggcgggcattttctatatctgccgtgccacggttccttatatggcgtccggcctcgggtggcatttggctgtgagcggtttcgatcatgagtggcgtccggccgtcgtgcaatcccgctgcgcgcggtgccgtttgggctgtaatacgggtgctttgaaccggccataactgcttcatatgtcccggggcttgtgtcgtgtgccgcggcgtgcttccatagtggatatggcggtgcggaaggggagccgccatacttacttacacaaggacgtcttggtccgccagggcaacgcgcatggaaaggggtttgcgatggtgtgcaccacgctgaatttcgcggagaaatacctgctgaaaaccgaagtcaggttcgttgccggtatgtccggcggtacttccgatgctggtactgatttcgatgtcgatttcggtggcgagggcgacctcggaagcgatcatgccaccggtttcaatcgctcgctatcggccgacgattattgggctgcagccggatatgccgatgagtcattgtattgatggacgtgatgacgcggtaagggcgcgtcgataagtgcggctggtgtcgcggctgatgccgcatctggtgctcgttcggtggtcgcggctgatgttccgtacggaccgcctgcaatggttttgcatcggtggtgcgtcaaaatccggaccgtcgccgacgctgtggacgtttggcggcgttgaaaggacagataatggattgtcaacgccgctgagaacgattggcgacggtggtgggacagcggatgccccaccaccgtcgccaagagtggtacttgtgtcggtggcgtccaaaacatggcccggcaccgacatcagatactctgaacgtcggcggattcccgttctgtgtcccagcgccgacgtctgattcctgcttatgcgagctggcgtcggtaaaaaggcagaacttggttcaccggcgatgtctcagcacgtttgcgcgcgtcggatccttctggagcagcaggaaaacgagcgccgcgacgagcaggacggcgatggagag

SEQ ID NO: 808 - DNA, 7473 bp, Unknown
  R14_18m  MAG No. k141_5547
cagcacggccgtctccggactcggtccatcgtcacgcggttcgggcgcatcgtccaacgcggtcacattcgggcgtacgcgccgcacgcgcatgtagatctgccgtttcgcgatgcccagcagccaggacagcaccttcgcatcaccacggaacgccctcgccgaccgccagcagcccagccagacgtcggcgcacacctcctcggccgtgccggcatccggcacgcgcacgcgcacgagcgcccgcaccgccgcagcgtgacgcccatacagggtctcgaaggcgcgttcgtccccggaggcgacccgcgcgagcagatcctcgtcgcgcatcaccgccccaccgggcgaggtcatgtcatcctgcgtatgcggctccttccacggcacatcgtaaacaaacgttcattgatgtatgtagctagaaacgaaccgacggttcacgacacgagcaacgacacgcccggaaggcatatcggattaagttgtgtagaagaacagaaactcacagaagaaatcgttgcgcgcgtgcattaccgagtcccaagcctggctagttcttggcaggaatgctgacatccagctgccagtgggcttgttcggtgtgggtttggaaggtgccgccgtgtgtttcgatgatggtccggtagcggtcgaggccgctgcccaggccgagtcccatgtcggcgggtgtggtggtgtcgctggcggagacgtggatggcgtccgtgtcgaaggtgacgcagatggcgtaccattcgccccggtcggcgtgttcggcgatgttcgcgtacagttccgccggcaagcccgacagcagtcgcatggtctccggcgtgagcggccggtgtggttcggcgagcaggttgtcgccggtgaatcccggggcttcgagcctggactcctcctcgtcgatcagcgattgcagaccggcacgctgcgaggcgatgccggcttctgcgggcacgggccgactgccgcactcaaatcgccatcggccggttcaaagcaggatgtaaacccgctatttgcccaacagttcgtcatggctgccggttcgcatgaacatggcggtaccatcatcgcgaatccatagaagcagccagtcgccggcattgccgatgtggcattccaatacgccgtttaaatcaccggtaagtgtgtgggcgcgatgcctacgcctcaatacttccttggagtccgccgtgtcctcaagaaccagacgaatgacttctttcagcgggcgtaaatcagtgtgcttgcgtttgagtttcttgatatctcgctggaatgccgctgtgtaatccggtttgagcattgatcagattcccaacgaatcgaacatctcatcggcactgttgaaacgaggtttgccgtcggcgagcctgttcttcgcctcgtcaagggcctccatggtttcaggcggcacggtcgtataggaaaggtttaggggaatgcgcctctcccggacaatctgcttgtagaaggcgcgggtgaccgaagacaagtccagaccgagatcctcggcaatgtttgcggctttctgcttggtgtccgcatccacgcggactgtgacggatgccatgctcacattaacctccaacatcattacgtaagacaatagtatgtatttgtatgctaatagtcaacattctgcggttgcggcatctcgaccatggtacacatcccgcaagcggattgtttaccggatgcaatcgatgatcggaatgccgaccatccagctgtcggcgggcttgtccagaatggcttctggttcatcgcaacgccagtgcgggttgcagccgtatggctttgatggccggggcaagagagccgacaagcgaggtgacgatggacgcacaggccgcaatcatcgccgccgtatatgggtatgcgggcggttccagcggcgagtcggcgggcatcatccacggaattgcccagaccagcaccgcggagatgagcaccgcggcgaaggcgatgatgaggccgagcagcacggacgagccgatgacctgtatggctatgctggctctggtcgcgcccagtgcgcggcggatgagcagctcgtgcgagcgttgctcgatgccggccaatccgatgtcgatcatgccgatggcggataccgacaacagtaatatcgcggtgacggtgacgccgagttggagaaaaccgatgacctgctcgtaatcatcggcgttgtcggaacggttccatgacgatatgctgccggtcccgacgtcggataacagtggattggcaacggtgtgttggactgtttctagagggtctttccttgtttggcgaactccacgggactcatgtaatcaagggtcgagtggagccgttggtggttgtaccaccagacgtaccggttgacgtccgagcgcagctgttccacgctcgtgttggattggctacaatgtataaggtattagacagtccgatgcctcgcagtgacaggcgggatctcgggccggatgttccagcaccattggatgcgtctgcggaacaggcgagggacggccaaaccacggccctttaatgcgacgccacattaaaagcaccccgacacgcctactgccacaaggccaaacccggaacataaacaccacgtttagttcctataacccgtatatcgtgatgagctcgtacgtcgcattactgtcgaggaatggccaattagataaggcttgcggccgttggccgagcagtagtagtgtggtttgctgtgccaacaggaggagtgtgaccaatgcggctgattgagacatggctggcggaccaggaacgcgcgtttgacttgttcgcgaaattcccggcggaggagacgggattcgagaacccagcggccggcatgaatcgtgaacggttcgccgcatatgtgcgagggttgcgtgatgagtcgcttggcgtcggcctgccggacggctgggtgccagccaccaaatacattctcgtcaacgatgagggcgactatgtgggcatcttcaacctgcgtcaccggctcaccgacttcctgcgcaacggtccgggccacatcggctacggtgtcgcccgcgaataccgcggccacggctacgcgaccgccgggctcaagctcacgcttgccaaggcccgcgagctcggcatcaaggaggcttacctgagtgtccacaaaaccaatccggcaagtcttgcggtgcagcagcattgcggcgcacgtatcgaccatgaggacaagacggaatactacacacgcatcgccacctgcacggagagcgatggcctctatgcgcgaggcgattgacggcgcctcttgcgtgtaaatggccgattatcaatcggttttaatcgatttcgcctcggtcgataaagtcgccgtcgaggaaccaataatcgtgcggatttccgcgtagcgccgtgaacggcgtcagttccacgccctgcgccgcggttttgctcagcagataggcgcggataatccacggatactccagcacgcccgacttgagggtgatgatttgctccactctgctgccgctgacgccaaaatccctgccgccgttcggcggtcagacccagccggctcatgttctcctgaaattcgcggatagtcgccgcgcgttgctcactgttcaaagacatggcttcatgaatgttgcattggcgccttaatcatccatagttaaggcaccacgcaacatacgattcgcttacgcagccatccgacgatggttgggatagattgttcggcgaagcggtctatggcgtcggcggtgacgtaggcgtgggcggtgaggcgcaggtacagttcgccgccgaccgcgctggccgcctcggatacccgacgctccgcgtaatcggcaagatcggacatgtaccggcgcacggcatcacagccccacagtcgctcgatctcgcgcagggactcgggcgcggcgatcggaccgtataaatcctgggtgccttgctcatcgaatcgctccgggaacgggtcagcgaaaccccacgagtcgatcagtggccacaaatcctgaccatcctgaccgccttcgggcggaatcaccagcaatgctgtgccacgcggcgcacacgggaacttatgaaaattgccgacccaccaatcggactgcagtccgccggccggatcggccagttgggcgggagcgtgcgcgccatcaaccaaaatgcggatgccgcggcgatgggcttcggcggcgatgcgctgggccgtaaacagcatagcggtggcggaagtaatctggtccaacacgatgaacgacgtacgctcgctcatctgcgcggtcacggcgccgaccacgccatcctcgtcggcgtcaatggtaactggtgcatcttcctcatccatgcgaatgatacgaatcgcctttcatcccaatgatttcgctctcatggccgatacccgcgtgccgtcatgttccgtaccttggaatcagaagtcgagagatatggtccgaaaccgaatggagcggaccgaagcagggagcattgaagatgggatttctcaagaacttttccgaaccgtttgcgttcgcgctggcattgtggccgtttgtgtccatgctgctgacggtgccggtgctggcgttgctgtatcatcgcgacaatcgcatccgactgtcgtcggccatagtggcgtatggcacggtgctgtacctgctcggcctgctgtgcttcacactgtatccgatgccggccgatgcggcagcctattgcgccgcgcaccatctgacgccacagctcaatccattgcagttcatcggtgacatccgtaccgatggtctcaccgccgtactgcaaatcgcgtttaatatcgtgttcttcctgccgttgggcttcatcatgggccgcatatggcgttggccgctgccggttaccgcagtactgtcgttcgccacgtcgctatttctggagacgatgcagctgaccggcctcatgggcgtgttcccgtgcgcctaccgtctgttcgacgtggacgatctcctgtggaacacgaccggcgcgctgatcggattcgcgctggccatgctttcgctgcgcctgattccggcgcgggtcgccgatatgacgccgaccaccacacctggcttcatgaggcggctgatcacgttcatcatcgacatgacgctgatcgggttcgccgtgatgccgacgcatctgttcgtcatgatcgtccgcccaaacctgccctcgggctccaacggctcatggcagtcgatggaaccgttcgactggaccggctcgatcctcttcctggcggcgctcatcctcttcgagggcgtggtgccatggttgcgcggcggctgcacgttcggcggcagcttcacgcacatgacgatagagacccggccgcgcgaagggtggcttcgcgtggcgttctatgtggcgcgcatggcgacgctgatcgccgtggtgtggtggcatagtggcggattcaatctgctggtgttcatcggcctcggcatcttctggctggtcaagcgtcagatgccgtacgacctgatataaaccggcgctccgctgcttggcgttacaggaaaacctccgaccactggtcgggattcggaatgctgcgcagcgggccggacaacgatacggccaatcccgctacggaacagaccacggctacggccatcaccgccgtgaaaccgagatctggctgttgcaacagccagccgaccatcgccgggcatgctgcgcccagtatgccgaccgtggtttcaaatacggcagaagcccgcccctgcatgttgtcgggtgtcttgccgtagagaaagcccagcagaccagcgttcaacgcggggaacggcaggccggccagaatctggcagatcagaatggccgcgtagctgtgcaggaatagcagtggcatctggctgaccacgaacaacgccagcgcgcccgcaatcagtttccctgtgggaaccatatcgactagcttgttggccaacagcgagccgaccaaagtactcacgcccattgccgtgccgagcagtccgatcatgaccgcgttggcgccacgggcggccaacatgatctgcgcgccggtgatactgactacgcaggcgatgttcacaattgccccgagtatgatcgcggataggaagacgcgcttggtcagggcccatcgccagccttcgaccaagtgcgtgggaaatggcacaacagaagtgccgtgggcccaaacggtgaccacggcttagcgcgacgagtcaacgcgcattagctgtctgcgaacgacaccaacaccttgtacataacaatgcccctttgcaaaaaacaaactccaattattgtaccagttcgagcataaaaccaggcgcgtcactgggcacaacataatcggccatcaatggtttctcggcttcgaggggctgatttcgtccggtggggacatctacttggctttcgaggggctgctcaaacgccaaaccgcgagtataaacggctttgcggcaacgccattacgccattgtggagccttgtctactcgggcatcagccccttgaaacggagatagatctccggcaagtgccaaatcagcccctcgaaatcgagttaggcgttgttttcgcgtttgcgctgccgttcgagtgcgtaataagccgcgtagcagcaggcgacgaacgggatcatgcaatacagggtcgaacgctgcgtatcatcgagcaccacgagcaccagcgcgccgatgcacatcacgatggccagccacggcagcaccgggaaaccgggcgcacgatagccgagctcatcggcgctgtgcccatcccgcgcccattcgcgccggaaacggatatggcacacgcatacggagaaccacaccaccagcgtcgccaaacctgacacggcgaccaacaccagatacacggtcgaggcggcgatcacggaagacagcaacgccagcagtgagcccgccatgctgaacagcacggcccacaccggcacaccacggaaattcgtcctagcaaaacgttcgggaatcagccgctccttggccagcgaccacaccatgcgcgaacacacgtacaggccggagttcgcggcggaaagcacggccgtcaacaccacgaagttcatgatgtcgccggcgaacggcataccgattgactggaacaccagcacgaacgggctcgtatccacgccggcctgatgccaggggatcaaggccgccatcaccagaatcgagccgatgaagaaaatcgccaggcgcagcaccgtggtgtgcacggccttgggaatcgcacgcgagggatccttggtttcgccggccgccacgcccaccacttcggtgccggagaacgcgaacaccacggtcagcagagtcgagaaaatcggcgcgataccgcttgggaaccagccgtcggccacgaagttgcccagcaacggcgcggaatcatgaccggcaatcggtatggcgccgaagatcgccagcaggccgatcacaatgaacgcgatgatggcgaacac

SEQ ID NO: 809 - DNA, 8436 bp, Unknown
  R14_18m  MAG No. k141_5694
atcgctgcgcgtcatactggcggacgagccaacagcggccctcgatgccgacaaccgcgccatggtcatgcgtcacctgcgtgatttcgccgacaacggagcgatcgtgatctacacgacgcacaacgaggagaccgcggccctcgccgaccgcatcatcgcattatgattccgccagccactgttcgtacagcgcatcgacggcttcgagcattcgacccatcggctgcgtggaatcgatcaccgcgtcggctatgacacggcgttgttccaggctggactggtggcgaatgcgcgcaagcgcatcatctcgcgtcatgccgcgggtcgacaccattctgtcgacccgtacttgttcgggcgcttcgacggtgacgatatggtcgaatcgcatgggcatggcgtccaggacttccgccaacagcggaacatcatgcacgaccacggcatccggattgtccgcgaccgcctgccgctcccgagacagcgcaagatcatagatcaacggatgctcgatatcgtccagtttcctccgcaaccgttccgagtcgggcccggcgaacacgtgctcggcgatccatcgccggttgagccgcccctgatcggtcagcgcgtcggggccgaaacattccgctatacgacgaagaccgacgccgcccggttccaccactcggcgcgcgagctcgtcatagtcgataagcgccgcgccgaactcccgcagtcttgtggacaccgtgcttttgcccgccgcaataccaccggtcaatcctattcgaatcatgctccccccatcatggccatgtttcgaggttcatgcacacaacggcaaaacccggcccgccgaagcgagaccgggttttgactatacgtcaggcgtcagtcgcccgatggcgaactcacttgccgagcagctggtcgcgcagggcggcgagctgatcggagtcggcgagggtaccggtagccggagcggcggaagagtagttggaggtctcctcgaccggcttctcttccttcgggccctggccgtcggcggctgcggattcggcagcgttctccagctccttggccacgaactccttgtgctcctcccacagctcgtgggcggcggcgtactgggactcccactcctcgcgctgcttctcgtaaccggcgatccactcgttggtgttcgggtcgaagccttcggggtacttgtagttgccctgctcgtcgtactcggccggcatgccgtagatggccggatcgaagtcctcggaagccgggtcgacggagtcgttggcctgcttgagggacagggagatgcggcgacgatcgaggtcgacgtcgatcaccttgacgaacacggcctcgcccggcttgaccacggtctccgggttctcgacgtgacggttggcgagctcggagatgtgcaccaggccctcgatgccgtcctcgacggagatgaagacaccgaactggacgatcttggtgaccttgcccttgacgatctggccgggaacgtgggtgcgagcgaagcgctgccacggatcctcctgagtcgccttcagggacagggagatacgctcacggtcgagatcgacgtcgagcacctcgacggtgaccttgtcgccgaccttgacgacctcagacgggtggtcgatgtgcttccaagacagctcggaaacgtggatcaggccgtcaacaccgcccagatcgacgaaagcgccgaagttgacgatggaggacaccacgccctcacgaatctggcccttcttgagctgggacaggaaggtctcgcggacctcggactgggtctcctcgaggtactggcggcgggacaggaccacgttgttgcggttcttgtcgagctcaaggatcttggccttgatcttctggccgatgtacggggagaggtcgcggacgcgacgcatctcgacgagggaggcaggcaggaagccacgcagaccgatgtcgacgatgaggccgcccttgacggcttcgatgacggtgccctcgacgacgccgtcagcttccttgatcttttcgatgtcgccccaggcgcgctcgtactgggcacgcttcttggacagaatcagacggccttccttgtcttccttggtgacgacaagggcctcgatggcgtcgccgacctcgacgacttcgtcaggatcaacgtccttcttgatggaaagctcgcgggaggggatgacaccctcggtcttgtagccgatgtccaggaggacttcgtcgtgatcgatcttgacgacggtgccctcaaccagatcaccatcatcgaagttcttgatggtggaatcgactgccttgatgaagtcctcttcggtgccgatgtcgttgatggcaaccttggtgacttcagtgttgttctctgccatgtaaatatatggtttctaatagtggatggataatttctcgatattcagttatacgcacacccttacaggcatacggatattcacaatacaagcaactctgcccaaatttcctaggaaactctaggcgtgtcgttcggccatttccacgacgttggccaggagcatggctcgggtcatggggcccacgcctccggggttgggggtgtaggcggaggccttgtcgtagcaggccttgtccacgtcgcccttgatgcggtagcgaccggcttcttcgtcgtagacgcggctgacgcccacgtcgaccagcacggcgccgtccttgatcttgtcgggcgtcacgaatccggccgaacccattgcggcgacgatcacgtcggcgcggcgcatgtggtcggccacatcccgggtaccggtgtggcacagggtgacggtggcgttgacggcgttgcgcgtgagcatcaggccaatcgtgcggccaatggtgatgccgcggccaagcacgcacacttccttgccgttcagatcaatgtcataggcgtcgagcagctcgagcaccccgcgcggagtgcaaggcagcggtgtcgaaatgtcgccgcgcacatgcagcaccagttcgccgaggttgtacgggtgcatgccgtcggcatccttggccgggtcgatcatgtcgatgatcgcgttctcgttgatgcccttgggcaacggcaactggacgatgaacccggtgcaggccggatcttcgttgagttcgcgtacggcagcggcgatgtcgtcgaagctggcgtccgccggcagttccttcttgactgaggtaatgcccacttcctggcaatcggcgtgcttgccggccacgtacttcatcgacccgggatccgaccccaccagcaacgtgccaagccccggctggatgtcccgggccttgagcctgctcacccgttcggcaaggtcggtcttgatcccggccgcgattcgtttgccgtcgattattgtggacatcaacgccctcccctgtggtttcgatgctttctatcgaaacgataggctatcgttggaacaagtcaggattatatatcgttcgctcttacgaagaaggcgtgccatggggactcaaatcacacgacttacgcgactcgccacagccggcctgagcgccgtcctgttgttcacgaccgccgcatgcgcaaccttctcccccgatgaaaccgagccggacaacaagaccagcgttcccgcaccgaccgggccgatcaatgtggtggcctccctcaatcaatggggctcgctggccgccgagctgggcggcgatgatgtggaagtcacgtccatcgtgaactccaccaatgtggatgcccacgatttcgagccaaagacctcggacgtcgccaagctgtccaaggcccagatcatcgtggccaacggcgcgggttacgattcctgggccaccaaatcgatgaccaagaccacgaatatcgtatccgccgcttccgtcatgggtgccatggaaggcgataacccgcatctgtggttctccaaagacgctcgatccagcatggccacggccatcaccgatgcatatgtaaaggcactccccagcaagaagaaggccttccagaagcggctcaaggcatggcaggcggatgagaaatcgctggaaacatgggcgtccgagttcaccagatcccactccgacctcacctatgcagccaccgaacccgtggtctattatctgatggccgatctcgggttcaagaatcagacgcccaaggggtatacgcaatcgaccgcttccggcggcgaaccggcccccgcggacctgcagtctttccagaaactcatcgaagacaagggcgtggatgtgctggttaacaacacgcaggaagccagtgacgcgaccaatatgatcactggcgctgccggtcgtgccgatgtgccggtagtcgacgtctccgaacaaatgcccaaggacaccgacacgctgaacgcctggatcaaccagctcatcaacaccatcatcgacgcggtggatccgagctatgactgcgaagacgccacggacggcaacgcgaattccgatgattccagcgccgacggcgccgccacggatgatgccaatgcgcacgattccaaggccagcaccggttccagcccggagcccaagtacatccgtcagtgcaaggcggccacatccagtgactcgtctcaggattcggcaaaggccgatgcctccaatggcgattccggcgatgcctccggcaacgaccagaccgactccggcaaatagttagaagcaaaggacaacggcatcggattcgtgcaatgccgatagacgccttgcacgagaagggttgtgcgaccattgtcgagatggccgcacaacccttttctttggttgccaccatccgtacacgatattgagaacgattgtcagcatcgtttgccacaatcgggcgttatgagtgaaacttccgattgcatcgtgttcagcgatgccgccatcaagcgtggtgaccatatcatctggcaacatggcacctttgccattcccaccggttcggtcacggccatcgtcggcaccaacggcaccggcaaaaccacgatgatgagggccgagctgggacttttgccgctttgccatggcagcctgaccgtactgggcaagcctgcgggcgagatgaacaaacgcatcggatatgtgccgcagagctatgtggcgaatgtcgattccaatctcaccgccgaacaatccgtgttgctgggcctgaccggcacccgattcggcatccaccccatcaccaaggtccagaaagccaaagcgctcgaggcgatggagttcaccggcatcgccgacaaggcgcagtaccgtctgtccgaactatccggcggtttgcgccagcgtgtggccatcgcccaggcgttggtgtgcgatccacaactgctgatgcttgacgagccgttggccaacctcgatctggccagtcaacgcgccaccgtacacgtgctggccaagctgaaccgtgaactgaacatgaccatccaggtggttgcgcacgatctcaatatgctcttgccgattctgaccggtgccgtctacttgctcgacgggcacccgcactacgccgatatgcacaaagtgctcgactccgacctactcacccacctctacggcacacaggtgcaggtggtcaccactccgcagggtgacatgttcgtgaccccgacgccggatgagccccaggaccagccgcaggatatgcacacggcagccgaagtggcgcaattgcaccatcacgagcacggcaacgccaccaatggcagtgccgccaacagcgccgagaatcgataacatcaagctagccgatccacagcccgtcaacgggctgcagctcaggcatggagaaaatacagggacatgagcaccatcaacttttcgtatgatcccgaatggctggacacactgtccgctccattcatgaccaacgccttcatcgccggcctgtgcattgccctggccgccggtgtcatgggatacttcaccatcgcccgtcgttccaccttcgcggcccatgcgctggcccatatcggtctgccgggcgcgaccggcgcggtgttgctcggcctgcccgtatcactgggcatgggcgtgttcgcactgggcggcgcactggtgatcggtgctttgggcaagcgcgtttccgagcgtgaaatcgcaaccggcaccgtactggccttcgccaccggcttgggtctgttcttcgcgcgattgtcgagttccgcctcccagcagatgcagtcgatcctcttcggctcgatcctgaccatcaccaccggccagatcatcggcttcgccgtgttcgacgtattgctgctggcattgttggccatcatctaccgcccgctgctgttcagctcgttggatgagcaggtggcacaggccaagggtgtgccgatcgggctgatgaacgtggcgtttatggcgattatggccggtgtaatcaccattgccgtgccggcagtgggcaccttgctgattttcgcgctggtgatcacgcctgcggccaccgccaatattctggccggctccccattcaaggcgatggtgatcgccagcgtgctgtgcctggtgtcgatttgggccggactcgtgctgtcggcgatgttccccgcccccccgagcttcattatcgtgacgctttccaccctgttctgggctatcgccaaggccgtggagacagtgcggaagtaatctcattcatttttcttgccccccgctggcaaattcatagcgggggctttgttatatcttctccaccaaggcattggcgatggcggcgatgccttcgccgcggccagtgaatcccatatggtcggtggtggtggcggtaaccgataccgggcaaccaaccgccgcagacagggcggcttcggcttcagcacggcgtgtgccgattttcgggcggttgccgatgatcgccaccgaggccgatgccggcgtatacccgttggatgccagatgcgccacaacttcttgcagcatatcgatgccatgccttccggcaccatgcgcgtccgcaccgacaccgaacagtgaaccaatgtctcccaatcgggcggcggcaagcaacgcgtcaatcagggcgtgcgcggccacatcgccatcggaatcgccttcgataccctcgtatttggcggcatcggcctcgctgcatgaatcaggcaccggccagtagagcccggcaatccacagttcacggcctgaaccggcaggcgcaaaacggtgagcgtcaaaaccttgccctatcagcactcctgcagaccccatgcagttcccttcgatggcattgcccagatgaacggcagcaaacgattatgaatcacgaagccccggcgtatcgcataaggacacgaccggggcctcaacaatcaaatcacttcttcttggacttcttctcggcttcgacacgagccaaagtatcggccgcggcctcttcgggctcggcggtgtgatgcttgtcgtcaccgggttgagcgggctcgtagcccaggttcacgtcgagcagacgctgggcttccgcctcgtcgatcttctcggacaaggcgatctcagaagtcagaatggcgcgggccttggtgagcatacgcttctcgcctgcggacaggccgtgctcgtcgacatcgcgctgggcgagatcgcgaaccacttcggcgatcttgttgacgtcaccggtggcgatcttttcgacgttcagcttgtaacggcgagaccagttcatctctttctcgatgatcggggtccgcaggatgccgaacaccttggccacttcggatgcggagacgatgtcacgcacgccgaccttcctggcattgtccacgggaacgttgatgaccaaaccatcggaagagagtacggacagctgcagatattcgcgcgtcactcccttgaccgtccgctcggtaatggcctccaccttcgctgcaccatgacgcggatagacgaccatatcgccgactttgtaagacatgtaccctccgagaactgacggcttacacacaaaaactcgaataattatgccatgcggtctggaccgcccctatgagagcgctcacaaccacggagacacaccgaaaagggcaagaattcgccattttcgacgcgccaatgtagcgttttcgactccaacgcacgtagactttgggtcatggctaaagaaacgaagatcaaggaagataccgtcaccgtgcctgtcgcccaaggcgacctcgatgcggtgagcaatgctgaattctacaacccccacggagttctcggcgggcatctcggcatcggcaagcatgccgacaccgccacaatccgtgtgctgcgtccgcttgccaagtccgtgaccatcctcacccaggatggcgaatacccgatgacccacgaatacaacggcgtgttcgtggctaccgtgccggcctccggcaccaagaagcagcccacgattcccgactaccgcgtcaggaccgagtgggaaagcggcgcagtgctcattgaggacgacccataccgttatatgcccacagtcgg

SEQ ID NO: 810 - DNA, 6844 bp, Unknown
  R14_18m  MAG No. k141_5831
ccgcgctccgcacagaccgtgggcgacggctcgcgggccctgttcctgcgctccgacggccccgaggatctggtgaccgcactgtggctaagctggttcgacgagtccggcgaacaccatgagaccaagctggccgatccgcgcgaactgcttggcgcaaccgccgacagcgaggacgtgccggccgaggagaaggcccgccgcgagcgtgcgcgcgaaggcggcaccggcatcgtcggctactccgcagacgatgacggcaatcgcatcgtgttcaccatcaacggccgcctgttcctgaccgagatcgcctggaatgacgagaccggcgcacccgagccgcacacccgcgaactggccggcgaatggctcgatgaggacccggagatgtacacgccggtgctgaacccgcgcatcgccccggatggcgagcatgtgctgtacaccacgggcagctacctgatgctggtcgatatcggcggcgagctgggtgaccgcatcaccgcggtctacggcgtgagcgtggaggatgaggacggcaatccggccgaaaacacgtggaaaatcggtctggccgagttcgtggccggcgaggagatggaccgttacgacggtttctggtgggccccggattcgcagcatgtgctgttcgaatccttcgacaccgccgacgagccgacctggtacatcagcgatccggccgaccccgagaagccggccgccggccgccgctacccgcgcgcgctgacccgcaacgccgacgtgtacctgaccgtgatcacgctggcgttcgatgagaacgaccggtacgcgggcatcaccggcaacgccgatgtggattgggatcgcgaggcgtacgagtatgtggccgccgtgagctggcgtcgcggccacgatccgctggtgctggtgcagaaccgccgccagacccgcgaccaggtgctcgaggtggcggtcgcggcggatggggccgcgctgggcgccacgcgtgtgcttgaggagcacgcgaacgagcagtggatcgacttggttcacggcacgcccgcctacacgccggatgatcgtctggtgtgctcgctcaacgatatggccacggataccaaccgtctgacggtggacggccgaccgttcacgccggctggctggaacgtgcgcacggtgctcgccgtgaccgacgaggatgtgctggccgtggtgcagcgtgcgcccgaactcgcgaccgaggtgccgcgcgcctgggccggctcgggtgccgcttcggatgccgagtctctgttcggcggccatgacgcccgcagcttcgatgtggtgagcatgggatatgacggctcggtcgcgccgatcacgaccgagcccggtcagtggacggcctcacgcggcgcacgcggcatggtggtgtctgggcgcgatatgcgttccgcccgcgcccggatgcggcacatcgtcacgcgacgcgccgtcggcggcgtcaccgatgccgtcatcgccgccaacaccagcgatgccgccaacaccaccgacatcaccgccgccgacatcaccagcaccgccgcggaacccgggttcacgccgaacgtcacgttcacgcggctgggcgagcaccggttgtacacggcgatcatcgcgccgagcccgtccagcccgtacgcccatgccgacaaactgccggtgctgatgaagccgtacggcgggcccggcttccagcaggtcgtcgcctcccagtccttctactgggagggccagtggtgggccgaccagggcttcctggtggtcacggcggacggccgtggcaccacaggccgcggcccggcctgggatcgcgcaatcttcgagaacatgaagggcgtgacgctggccgatcagatcgaagccgtcaacgcccttcccgaggccgtctccaggctcaacgccgatgggcgcaggcccggcgttcccgcaccggacctcgacaaggtgtgtatgatcggctggtcgtacggcggcttcctgtccgcactggccgtgctggacgcgccgaacgtgttcaaggccgcgtgcgccggcgccccgcccaccgactggacgctgtacgacacgcattacaccgagcgctatctgggcctcgacccggatgtctactaccgcaacggcatcgtgcaggacgcaccgaaactcgagcgcccgcttatgctgatccacggtttcgccgacgacaacgtcaccatcgcccatagcctgcgcctctcgcaagccctgatggcggcgggtcgcccgcacaccttcctgccgttgacgggcatcacccatatgaccaacgacgagaccgtagccgaaaacctgctcaccctccagcgcgacttcctgcgcgacgccctggcctgaccggccccgggcgcgccgtgggccgtgacgtccgcggcacgcccggggcccgcgcccacacggcatgcggaaaaacggcgcaggtggtgcgccgcacccatttccgccctgaatttttggatatttttggatattttgcacccatcgtcatgtgaaagaccggttttttgcctcatattcccatcaccgcgtaggatgggtgaggattagaaagggaggactatgagcgttctcgaccgttttgaaaaaagcgtggagggtgcagtcaacggagtattcgccaagtttggctccaaagacctgcagcctgtcgatctttccagcgccttggagcgcgagattgacgccgaggccatgcccgtgggccgtgaccgcacggtggccccgaatgaataccgtttcaagctcagtactcctgacttcgaccgtatcgaggcatggggtagcgagaccctggccaacgaactggccgataacctcaccgagtacgcgaagagccagcattacgccttcgtgggcccggtgatcgtgatcttcgaggaagaccttgacctgtccaagggcaacttcaacctcacctccgaatccgtgcagggcaatgccgtgccggtcaccaccgatgcgcagaccgaggacagcccggtgctcgaggtgaacggcaaccagtacctgctcaccaaagacaagacggtaatcggccgcggttccggctgcgatatcgtcatcgacgatccgggcatctcccgcaagcacctagaaatcgacatcacggataacggcgtgattgcccgcgacctgggttcgaccaacggcacgtacgtggagggccaccaagtgcccgccgccacgctgctcgatggcaacaccatcaccatcggccgtacccgcatcctgtactgggcctccgcccaagcccaggagtagtcgagcacacgcccgaaagccgcccacccatgaccgaactgacattcgccctgctcaagtatggattcctgatcctgctgtggatattcatctggctggccgtgcgttcgctgcgcaaggacatcgagacgttcagtccgcgaccttcgcgcgcgcgtcgccgtcgtgagcgtgaagtgcataaggccaaggccgaaacgccacaggcagctgcgccgcgcccgcatcgccggcccagcgcttccgcgtcgtccgtcgcctcggcgcagcctaccctgttggtcatcatcgatggtccgcttgccggcagctccgtgccgctggccgaagccgacatcgcgcttggccgcgccgcctcgaacaccgtggtgctcgatgacgaattcgtgtcttcccaccatgcccgcgtctaccgtgacacgcgctccaggcagtgggccattgaagacctgaactccaccaatggcaccgtggtcaaccagcagcgcatcaaccgccccaccatcctgcccgctcgtattcctgtgcgcatcggcgccaccaccttcgaactgaggtagccgcatgccaaaatccgccgcttcacaaccgctgttcctgtattccaccacggtgtccgatgtgggcactgtgcgcgcgaacaatcaggattcctccttcgccggcgagcatctcatcgccatgtgcgacggcatgggcggtcacgccggcggcgatacggcatcctccatcgccatccggtcactggcccacatcgagcaggacgacaccggcggcaacgtcgagacgatctcccgcatgatggaaacctccgttatggccgcgcatgacgccatcgtcggcaaggccaagcgcgaacgcaagcttgccggcatgggcaccaccgttaccgcagtggcattggtggccggctactgggtcatcgcccatatcggcgattcgcgcgcctacctgctgcgcgacggacacctgagccgcatcacgtgcgaccacagctacgtgcagcacctcatcaacaccggtcgtatcaccccgtccgaagccaagaaccacccgcagcgcaacgtcgtgatgcgcgtgcttggcgactttgacattgacccgcgcccggatatttcgattcgccgagcccaccccgccgaccgttggctgctgtgctcggacggtctgtgcggtgtgctggaagattccaccatcgaagagacgatgaccacgctgtccgatcagggcgaatgcgcgcagcgtctggtgcagatggcactgcgggcaggcagcaccgataatgtcacggccgttattgcggatgccacgttggcgttggatgccgatgcgttcgacctgccgcaccaaacgccgttggtcggcggtgccgccagccgtaatcttgagccgattgccgacatcgtcaacgagccggtggctaccgcgcccgcactgcgggaggatgattcccccgcccagcgcgccgcagcattgattcagcccgccagcgcgcacgaggcggagaccgcgcaaaccacggccaaaccgtcgtccacacgcgtggtgcagccgtccaccgtccgcgaggagaccggtgaacgagccaatcccgataccggtgagattccggtggtgcaaaagccggatgggcgcctgtccgccgaccccaacgacccggatgtggccaaagccatccgcgatgagcaggtcgagcagaagaaggccacgcgtaccaagaagcgccgcaataagcttgcggtgattattacctgcattcttgccgtgctggcattggccggcgctggctggggcgcgtacacgtggagccagacgcactactacgtgggagatagcaacggcaccgtggccatttatcgtggcgtgccgaccaatctctttggacttgagctttcgcacgaagtgcagaccaccaatatcgccaccgcggacctgcctcagacatggcgtgaccagctgagccaaggcatcacagtcggttcgttggacgaagcgcagtcgcatgtgggtattatccgcaccgaaatgcgcaaactggccaagcagcaggaagccgacgccgccaagaaggccgaggcgtccaattccccggacagttccaaagacagctcccagagcgattccaaggacagcaccgaggattcgtccagccagtccggctcctcgtcagacaagtccggttcgtcaagctcatccgattcctcggataaatccggtatcggagcggccgacaacgcggccacgggagattctcaatgatcgttacccgtctacgtcagatttctttgttgctgattgccatggcaatcagtgcgttggcgttcatccagatgttccagcgcaccgccggcgaattccctatgcaatacgccggcatgctggcattggccgtagtgctgtttctggtgctgtgggggctgattgtgcgcttccagccgtacgccagccagtcgattctgccttgcgtgctactgctgaccgccaccggcgtgaccatgatcgctcgcattgaccagagcgaaggttgggcggttgcccaacgtcagctgatctggctgtgcatcgccatcgtgctttccgcgctgctcatcatcttcctgaaggactaccgcgtgctgcggcgcttctcctacgtgtcgatggtggtgggcttggtgctgctgctcgccccgatgctgccgtttgtcggtcaggaagtgaacggcgcgcgcatttggatcaggattccgggactgggccagttccagccgggcgagttcgccaagctgttccttgcgttcttcttcgccgcctacctgttcgaccatcgcgaccagctggccgtgggcggtaagaagatgctcggtctgcagctgccgcgtatcaaggatctcggcccgatcatcgtggtgtggatcgcctcgatgggcgtgctcatcatgcagcatgatctgggcacctcgcttatgttcttcgccatgttcgtggccatgctgtacacggccaccggccgtaaaagctggatcatcatcggtctgatcgcgttcgccgcgggtgccgtgctggccgcaggcatgttcagccacgtgggtcagcgagtcgatgcctggctgcacccgttcagcaacgagcaatacaacaagacccccggcggctcctggcagctggtcaccggcattttcggcctggcatcaggcggcatgctcggcaccggtctcggccaaggccatccttcgctcgttacgtttgcgaactccgatttcatctacgcctctctgggcgaggaactcggtctgatgggcgtcctggccattttgatgctctacctgctcatcattgcctccggctttatcaccgccatgaaaatcaaggatggcttcggcaagctgctcgcttccggactggtgttcaccatggccttccaagtgttcaccgtggtcggcggcatcacgctggtgattcctctgaccggtctgaccctgccctatatggcggccggcggctccagtctgatcgccaactatattctcgcgaccctgctcatcatcatctcgaactcggccaatgcgcccgagccgga

SEQ ID NO: 811 - DNA, 6087 bp, Unknown
  R14_18m  MAG No. k141_5834
gctcgtgctccactcgcggcaggaaatccgcgatgtgctcaacggccgcgacgaccgactgctcgtcatcgtgggcccctgctcaatccacgacccgaaggccgcgcacgagtacgcagaaaagctggctgccgtcaagcgcgagttggaagaccgactcgtgatcgtgatgcgcgtgtacttcgagaagccgcgcaccaccatcggctggaaaggcctcatcaacgaccccgatctggacggtcgcttcaatattcgtaagggcatgtggctggcccgcaaggtgctcaccgacgtgctgagcctcggcctgcccgccgccaccgaatggcttgaccccatcaccccgcagtacatctgcgacgcgatcagctggggtgccatcggcgcgcgtaacaccgaatcccaagtccaccgcgaactggccagtggcctgtccatgccggtgggcttcaagaactccaccgacggctccatcaaggccgccgccgattcctgtttcgcggccggcttcgagcatcacttcctgtccattaacttggacggtcgcgtgatttccgccgaaaccaaaggcaacccggattgccatctggttctgcgcggctccagccacggcccgaactacgatgccgaatccgtgcgtcaagctctggaagacctcaaggtttccaaagcgtccggcccgagccagcatggcctcgtcatcgatgccgcccacggcaactgcggcaaagacgaaaaccgcgaagccgaagtcatcgaagagatcgctgagcgcctggcgcacggcgaacaaggcatcaccggcgtaatgatggaaagcttcttggtcggcggtcaccaaaagccggccccgctcgaccagttggtctacggtcagtccgtcaccgactcttgcgtgccgtgggaacgcaccaacgaactgctgcacaccctagccgacgccgtcaccgctcgccgctcggctaaatagctttgtctttgtaaaaatgctcactgagacccactcagtgagcattttttgccaataacggtggtcatgtcagtttgttcccgtgacaccttatccttgggaaggatactgacccaaggagagatgttatgcagcagcaggaggaagcagcacattcgctgcatccgttgcaagtcggtccgcagccgttgaacaccccagaagagcttcgcgccattcgtcaggcgatgggggaggggaagaacccgctcgttgccactgatgtgccgcgttgggaagatcaggtgggtgtcagtcgcatcatcaaccgccgcgtattggagttggagccgctgcccacgcccgcgcaagtgctcgctgaactcccgctgactgatcaggctcaggaaatcgtcgcctactcgcgtgatgagattcgcgcgtgcctgtacggccaagacgacaggctgttggtcatcgtcggcccctgttcggttcatgacccgaaggccgcgctggactacgcgcgccgattggccaagctgaaagatgagctcggtgaacagctgctcatcgtcatgcgcgtgtacttcgagaagccgcgcactaccattggctggaagggcctgatcaacgacccggatattgatggcagccacaatattcgcaagggcctgttgcttgctcgcaaaaccttgcttggtgtgctgaaggaaggattggcggccgccacggaatttctggagcccaccagcccgcagttcatctcggacgcggtgagttggggcgccattggtgcgcgcaacacggaaagccagatccaccgccaattggccagcgggctttccatgccggtcggcttcaagaacgccactgacggctcggtgaaggcagcggtcaacggttgcttcgccgctgctcagcagcacacgttcttcggcattgaccatctggggcgtgcctgcgcagtcgagacccttggcaacccggactgccatgtggtgttgcgcggctcgattcacggcccgaactacgatgccgagtccgtggccaaagccatggaagacgtacgcgccgaaatgcccgccgaatccgcagcctcgcacggtctgattgttgattgctcgcacggtaactccggcaaggacgagcatcgtcaggccgaagtcgtgcgcaatattgccagcagaattgcagctggcgaacagggtattaccggcatcatgatggaaagctttattgaagggggcaatcagaaggccgcgccgcttgatcagctggtctatggcaagtcgattaccgacaagtgcatcagctgggaagaaaccgaggccttgctgcgcgagcttgcggaagccgtggccacgcggcgttggcactgagttgcgtcatcggctctctcgggggggggcaatgtgacgaaacgtctgactacccctcagcccgccattcggcggccagctcccctgacaaggggaaccgaaagtgttgtgaaaggaacttacgtatgggtatgaaaactgtagctattattggcgcattggatgaagaagtggcactgatcgccaaatcgctcacgcatgtgacgcacaccgccaagggcagccttgacatcgtgtccggcacggtcgactccttcggttctgacgtcatcaaggttgccgcaacggtaggcggcatgggactggtcaatgcggccgccaccacgcagctgctgattgacgagttcgccccggacgccgtgattttcagcggcatcgccggcaacctcaacacccacctgcacatcaacgacgtggtgctcggcggcaccctgcgctacctcgacactgacatgcggctcgtaggccagtggaagcccggcacggcggacgctccggtggaggaattccactctgatgaccgtctgctggaagtcgccgacgaggcgcttgccaatgcgggcattacccacatcaccggcatcatcgcctccggcaactacttcgtggacacgccccaaaaggtcgaggaggtcatccgactcaccggggctgacgccgtggagatggaaggcgccgccgtggcacaggtcgccgcccgcaataacgtgccggcactggtgattcgtgccctttccgacaacgccgacaccgattacgaggtattcaaggagttcgacatctccgagtacgccgataccgccgcccgtctggctgtcgacatcgtcaagcgcctgtagtcggcgggctggcccatctcaccatccacgttttgggtatgatgaccacaatatgagcgttttcaaactattgcttataacctgagccatactcggtgttcggcacagcgatgtgcggggttcatcgctggggccacaagccgtaccagttcttctcccgcatgccggtcgctgtgctcaattcgttaagcgacgacaacaccgtcgcgaagcattgaatacacaatgcgcacgctgcactggggtttatctgcagcatgaggagagaaaaaatgactgcaagcgcaaccgcggctgtgaccaaaccggtgaagaaggattcggttcctgagatcatcgccgcttccatggtcggtacggccatcgaattctacgataactactgctattccattgccgctgctagctacttcggcatgatcttcttcacggacgtcgccaagtccaaccagaccctcgccacgctgatggccttcgtgaccttcgccgtttcgttcctcgcccgtccgttcggctccatgctgttcggccacttcggtgacaagctcggccgtaagaagacgctggttatcgccctgatgaccatgggtatcgccaccttcctggtcggctgcctgcccggttatgagcagattggcgcatggtccgtcgtgattctgtgcatctgccgtgcctgccagggcgtgggcctcgccggcgaatggtccggtgccgcgctggtcgccactgaaaacgctccggccgacaagcgcgccctgtacggttccttcccgaaccttggcgccccgattggcttcttctgcgcttacggcctgaacctgctactcgaatccaacctgagcaaggaacagatgattgccttcggctggcgtatcccgttcctgtgctccgccgtgctggtgatcattggcctgtacgtgcgtgcccgcatgtctgagaccccagtgttccagaaggccactgaagagaagcgcacctccaagcacccactgcgcgacctgctgccgtactggaaggaagtcgtgctcggcaccgtagccatgggtatcacctataccctgttctacgtactcggcacttggtcgctggcctacggcgtcaagggcttgggcttccagcagggcgagtacctgctcatgcagatgtgctccgtggtgttcttcgccatcttcatcgtggtctcctgcgtgtacgccgacaaggtgggccgcaagaaggtcatgattgccgtgaccgccgccgccttggtgttcagcttcttcgtgccgatgctgctcgtgcactccgccgcccatatcatgatcttcctgtgcgtcggcttcatgatcatgggtggtttgttcggcccctgcggcgcctacctgcctgagctgttcccggtgcacgtgcgttactccggcgccggcctgagctacaacctcgccgccatcctcggtggcgcattcgctccgaccatcgcccaggccctggtcgcctccaagttcggcgttgccggtgtgggctggtacatggccatcatggccgccctcgctctgctcgctctgttcctgattaaggaaagcaaggacaaggactacgagctgtaaatagagctccccatattatgctcccgctggcgggagctgtccacgaaagcggactgagggtggccaatgggatttcggttctttgaccaccctcagtctcactgcgttcgacagctcccgccagcgggagcattttgttatgtcgtcccaccaaaaatgaacaatagacgaacttacgtagtttgggcatctcactacgccttgcacgttttactctggaaatcatggatatctggcagatcgtcgtgattgtggtgctcgccgcgctgatactggcgtgggttgccgtcatcgcctacaacaaaggccgcgtttcaggtcggctcgccgccgaacaggacctgtccggcgacgaggatacgcgttctctattcggtgatgatgcgcccgtgcgccccaccgagcgtcgcctgattgaagtcctgcccgaagccctgattgttaccgaccgcaacggcttggtccaatattcaagccccggctcagtgccattcggcctggtctccggcgaccgactcaactcgcgcgaagtcgaggacatcctcactcaggccgccgccgacggtggcgtgcgtgagcgtgaggttcagctgccggtcaatcgcaattcctatccgtcctctaatggccgaggactggaggccggccagtcacgcccgtccaacatgctgtatttgcgtgtgcgcattggcgatatcggcgatgacctgtacgccatcttcatcaacgacatgtccgagcagcgccgtttcgaggccgttcgccgtgactttgtgaccaacgtttcgcacgaactcaagactccggccggtgccatctcgctactggccgaaaccgtgaccgacgccgccgatgatccggacgccgtacggtatttttccggccgtatctccaaggaatccgcgcgcctgaccgaactggtacatcatcttatcgacttgcagaaagcccaaagcccgcaaagtgtgattgatgcgcggcgcatttccgcgctggatgtggcacgcgctgccatcgccgccaatcagacccaagccgactcccgccatgtggatattcgactgagtgtcaacggacagtcagtgcccacgaaggtcgaggagctggccgatggcgaaggttacttggaagaatcaggcagcccggccacgagcggtccgatgatcaaggccgacaaagaggccatacaaaccgccgtcaagaacctcgtagagaacgccatccattactcgcccgaacacaccactgtggcggtcggcgtgggggagcgcgatggcaaagtcaccattcgcgtggtcgatcagggcatcggcatccccgccaaatca

SEQ ID NO: 812 - DNA, 54014 bp, Unknown
  R14_18m  MAG No. k141_5849
cgtaaggccatttgccgactgctcggtgtcgaaacgttgggtctgtcaaaacggccgaccgaactgcggttccgttatctcgatccgggccacgacgattttggtaccgatcgtactgaacgcagcgcgaagattgctatgcgggagcctaagccgacgcccggccttcaatcggcggagcgacgtctttatgaacgactgtgtgctgacaaaaccatcgcttatcggcgtatcgaacaggaacgcattcccatgcgtgatgcagttgacgaattacgcaagcttggcatccccgtggagtccattgaagattttgtcccggttcgaacatcaatcgtttgacggacgtaccggggcagaatccgttgtcccggtttgtgatttcgggtgtttttcgcgaaccgggacatgttgtgttgccccggtatgggcgtcaatcgtttgatgcgagaatcgggacaacatggcgactctgagattggctttattccgccgtttccgttcgcgttttatgtggttcgtggaaactggaatgtcctggttctcgaaaacaggccaaaatcacgaaccgggacagcgggttttgccccgatgcggacgtcaaacgattgacatgtgaaccggggcaaatcagaggaggagaggtcttcgggatagagcttgactggggctgggcgcacggttgatgtcgcgtgggccggctcttgcgtttcggtccactgatggtccggaattttgcatactatggttcggttttccggcctgacacgccatcgaacaagcgttcgaatttggtcgtgagttcgggtatccttgggacagattcggcgcgcgcataaccgtgcgcgcgggaacggtgagatggaaggtggggtgtggctgtggcggcaacgcggactggcgcaaggcgcgcaacaagcgcaaagggcgcgaaaaccagcaagggcaagaacggtgaggtcatcgtcgaaaaggtgatgaccagcgactccttcctgagccgggaaatcaaaaaggcgccgctgatcgaacacgatggttcgctggtagctgatatctcgcacatcccgaacgatctcaagatcacgattcagggtgcgcgcgaacacaacctcaagaatgtcgacctggcgattccacgcaaccgtatggtcgtgttcaccggcctgtccggttccggcaaatcctcgctcgcgtttgacaccctgttcgccgaaggccagcgacgctacgtcgaatccctgtccgcctacgcccgccagttcctgggtcagatggacaagcccgatgttgacttcatcgagggcctgagcccggccgtctccatcgatcagaagaccaccaaccgcaacccgcgttcgaccgtcggcaccatcaccgaaatctacgattacctgcgactcctcttcgcccgcaccggcatcccgcactgccccgaatgcggcgagcccgtcgcctcccagaccccgcagcagatcgtcgacacgctgctcggctacccggagcgtactcgattccagattctctcgcccgtggtcaagggccgcaagggcgagttcgtggacatgatcgagctgctgcgctccgacggctacgcccgcgcgctcatcgacggcgagatgacacagctgtccgacgacatcaaactcaccaagcagaagaagcacaccatcgaggtcgtggtcgaccgactcgtggtcaaggacggtatccgccaacgtttgactgattcggtggaaaccgccctcaagctcgccaacggcagcatcgtcatcgacttcgtggacgaggaggaaggcagcccggcccgccgccagccgttctccgaacaccgcagctgcccgaacgggcacacgctcgaactcgatgaggtcgagccgcgcaccttctccttcaacgccccctacggtgcctgccccgcctgcaccggtctcggcttcaaactggaaatcgacccggacctcatcatctccgacccggacaagtcactggccgacggcgtcatcgaaccgtggagcggcaccaagatgacctcccagtactacggccacatcctcgaaggcttggccaaggaaatgggcttctccatgaagaccccttggaaggacctgccggacgacgtcaagcacgacatcctctacggccacgacttcaaggtcaacgtctcctaccgcaatcgctggggacgcctgcgtgaatactccaccggcttcgaaggcgtgatccgcacgctcatgcgacgccacgacgaaaccgattcgcagtccatgcgcgaatactacgagtcgtacatgcgcgaagtgccctgccaggtctgccacggacgtcgtctgaagcccgaggtgctctctgtcaccgtggacggcaaatccatcttcgacgtatgtgacatgcccgtcgtacgcgaactcgcctggatcaacggcctgaaactcgaaggctcggcacagctgatcgccggcgaagtgctcaaggagatcaaggcccgactcggcttcctgaacgacgtcggcctcgactacctgaccctctcgcgcgcggccgccaccctgtccggcggagaagcgcagcgcatccgactcgccacgcagatcggctccggcctggtcggcgtcatgtacgtgctcgacgagccgtccatcggcctgcaccagcgcgacaacgaacgcctcatcgaaaccctgcaccacctgcgcgatctcggcaacacgctgatcgtcgtcgaacacgacgaggacacgatacgccgcgccgactgggtggtcgacatcggccccggcgccggcgaacacggcggcgaagtcatctactccggccccgccaagcacctcatcgaagccaagcgctccatcaccggcgactacatcgcccaccggcgagagatcgccgtaccctccaagcgccgcaagatccacaagacccaggtgctcaaagtcgtgggtgcccgcgagaacaacctcaagaacatcgacgtgagcttcccgctcggcgtgctcaccgtggtcaccggcgtctccggctccggcaaatcctcgctggtcaacacgatcctctacccggtgctcgccgacaagctcaacggtgcacgcatcgtacccggccgccacaggcgcgtggaaggcgtggaccaggtgcgcaaggtgatccacgtcgaccagaacccgatcggccgcacgccgcgatccaaccccgccacctacaccggtgtgtgggacaagatccgcacccttttcgccaagactcccgaagcccaggtgcgcggctacggccccggccgcttcagtttcaacgtcaaaggcggccgatgcgaggcctgccacggcgacggcacgctgaagatcgaaatgaacttcctgcccgacgtctacgtggactgcgaggtctgccacggcaaacgatacaaccgcgagacccttgaagtcacgtacaacggcaagaccgtggccgacatcctcaacatgcccatcgaggaggccgccgacttcttcaaggcgtacaccggcatctcccgatacctgaagaccctcgtggacgtcggcctcggctacatccgactcggccagcccgcacccaccctgtccggcggcgaatcgcagcgcgtcaagcttgccaccgagctgcagcgccgatccgacggcaaaaccgtgtacatcctcgacgagccgaccactggcctgcacttcgaagacgtgaacaagctgctcaaggtgctgcagtccctggtggacaagggcaatacggtcatcgtcatcgaacataatctggatgtgatcaaggaggccgactggctgatcgatctcggtccggagggtggcgacggaggcggcaccatcgtcacgcagggcacgcctgaacaggttgccgaatgcgaatcctcatggaccggcaagttcctgaaatccatgctttagccttccattgcagctgacctcgggtgggttggggtggtatgttgctggacacgctccgggccgctcaggccaagtctttacggtccagcagcacataccaacccgcccaatccctgatgattggttttgcttaatagcgaggaggattatgacgaacgatattgagcggcatagtccggatgagtggcggaagaccgcggcggcgttaatgccggaaagcgtagctgtgggcgccggggaaacgacggcgaaggtgaatgcgaatggggcacctttgctgggggattctcgcgacctgttccgacccaagacctcggatattcccgccaaacccggtgtgtacaaatggcgcgacggggaagggcgcgtcatttatgtgggcaaggcgaagaacctgcgcaacaggctcaccaattatttccagccgctgtatctgctgcatccgcgcacgcagaccatggtgctgaccgcacgcagtctggagtggacggttgtcgccaccgaactggaatcactgacgttggaatacacgtggatcaaggaattcgacccacggttcaacgtgcagttccgcgacgacaagacctatccgtatctcgcggtcagcacgggggagcgaattccgcgcgtgtgggtcactcggtcgcgcaaacgtcgggatacccggtatttcggcccctatgccaaagtatgggaattgcggcacagccttgaccggctgttgcgcacgttcccggtccgcacctgcaccaccaacgtattccacaaggcgcaactgaccggacggccatgcctgttcgcctccatcggcaaatgctccgcaccctgcgtgaaccgtatcgaagcggacgaacaccggcggctgtgcgaacagctggtcggcgtgatgaccggacgactcggacggccatacatcgcccagttgacccgcgacatgaaagaggccagcgccgaactcgaattcgagaaagccgcccgactgcgcgaccagatccaaatgctggaaaccgtggtgcaacagaacgccgtcgtcttcgaccaggatgtggacgcggacgtgttcggcttcgccagcgacgagctcgaagcctcggtgcacgccttttatgtgcgcgccggctctattcgcggcgaacgcaactggagcgtcgaacgagttgaggacatcgatgacgccgacttgatggccgaccttctggtgcaggtgtattcggactccgccggggacaatcacccccagtcggccgcgaccatctccaccaatcgcgaggccatcggctccacacagaccatcacggccacggacgctgtggcacgcgcccaggccacccgagaacgcaacacccgtcaggagaccaccggacgcgcggacctgctggcacccatcgcaccggtaccgcgcgaaatcatcgtgcccgtcgaaccggcccgccgcgaggaactcgaaggctggctgaccaatctgcgcgggggcgcggtgaccatccgcgtggcctcgcgaggcgacaagaagcagcttatggaccgcgccaacgagaacgccagccaagcactgcaacgcagcaagatgagccgcatctccgacatgggcgcacgcacccaggccatgaacgatgtggccaaggcattgggactcgcgcaagccccgctgcgcatcgaatgctacgacatttcgaacactgtgggcggtgccttccaagtggcctccatggtggtgttcgaagacgcgatcgccaagaaatccgaataccgacgcttcgccgtccgaggcaaggacggcaaaggcgcggtggatgatctgtccgcgctttacgagacgctcacccgccgcttcaggcacggcaacatcgccggcgactccggcgaaagcatcgacgcggaacagcgcgcggcctcggccgccggcaagatgaccactgccgtggcggcggagacaatcgttgcgaacggtaacgacaatggtgagggcggttccgacatcagtggcaaggggcacgcggtgccggtcggagtgcagaacgatgcacgggagtcctcgcccgacatcgtccagcagaacacaaaccggcatcactttgcctacacgccgaacctggtggtggtcgacggcggtaagccacaggtcatggccgccgccaaggcgcttgaggactgtggcgtgatcgacgtggccgtctgcggactggccaaacgcttggaagaggtgtgggtgccggacgacgactatccgatcatcctcaaacgccagtccgaaggcatgtatctgctgcagcgtgtacgcgacgaatcccaccgcttcgccatcacctaccaccgccaacagcggcgcaaaggcgccctgcgcagcgcgctcgacgagattcccggcatcggcgaaagctaccagaagcggctgctcaaccacttcggctcggtcaaagccatgcgcgaagccagtgtcgaggacttcgagaaggtcaaaggcatcggccacgccaaagccaaagcgctgtacaacgcgctgcacgagcagtgagccggcccggtccagcagcccagagtgaattttcggttgcggggcctgtggttgacatattcgaagcaaagtgtcggctagcatggaaacagacatcaaggaggggatatggccaatcatcgttgcgctgtactcggcaaacccgtcgcgcactcattgtcacccgtgctccacaacgcggcttatcgttcgctgaaactcgacgattggctgtacgacaagcacgaggtgggggaagacgacctcgacgctttcctcaaaggccttggctcgacgtgggctggcttgagcctgaccatgccgttgaagaagaccatccaaccgtacggtgttccggaaaatctgtgggccaaggaactgaaggtggcgaataccgcggtattcgactggagtgtggctaccgatgatcccgcttggccgaacggcaagccgggcatcaagctgtacaacaccgatgtcatcggcatccaactcgccttcgaccacgccaatcgcgaactcggcgaacaccacaccgcatcgagaagcggcgccgcgctgatcctcggcaatggcaacaccgccacttcggcgttggccgcatgctgcatgatgcccgaaatcggccatatcatcgtcgccgaccgccaccctgggaaaaacaccgggcttaaaccagtggccgaaaagttcgtcaacgtgcataacccgtacagcgaaatcgaattaggcgacgatcaggccctgctcgaggcagcccgcaacgccacctatgtcatcaacacgattcccggacatgcggccgacaacgtcgcggatgccctcaccaatgccggaaccgagccattctccggactgctgctggacgtggtctacgatccacgccccaccaagctcatggaagcctggcgcgctcatggcggtcacgccatcggcggcgaagaaatgctgctgtaccaagctctcgtacaggtattgctgatgaccggtatctgggatgacgacccgcccagcgatgccgaccagcgtctgcaggacaccaccaccgaagacgaccagctggagatcgcgatgcgcaaagctcttgaggaggcgttgtaatgagtcaacagacaacaatccgcgataccggcgaggcggccgccacgaatgcgccggcgaattccgcgacatccacatcgactccggacaaccagccgaccccgcttgatgccttcgaggtgctgctcatcaccggtatgtccggcgcaggccgctctcatgccgctgactgcgtggaagacatgggatggtatgtggtcgacaacctgcctcccaaactgcttatcccgcttgtcgacatgatgaccacctccggttccggatcggggtcgggcgtccacaagcttgccgccgtcatcgacgtgcgctccagctatttcgacgagctggccgccgtgctcggccatctggatgatctcggcgtcaaaacccatattctgttcctcgacgccagcaacgaagtgctcatcaagcgctatgaatccgtgcgccgcccgcacccgctgcagcacggcaaccgactgatcgacggcatccttgaggaacgtcacctgctggaagacctcaaggagcgagccgactgggtcattgacaccagctccctgagcatccaccagctgtccaccaaactctacgagacgatgctcggttccggccccaccaccgtggcggtacacatcttcagcttcggcttcaaatacggcatgcccatcgacgccgatttcgtggccgatgtgcgttttctgcccaacccgttctgggttcccaacctgcgcgagcttaccgggcacgacaagccggtcgccgactacgtgctttccagcaagggagccaaggaatttctcgacgcttatgagaaagctatcgagattgcgttggaaggatacgcccaggaagacaagcactatgtaaccatcgccgtcggctgcaccggtggtcagcaccggtcggtggcgatgagcgaagagctggctcgccgcttacgcgcacatgggctcaacgtaaccgtttccgcgagagaacagcataagcgtcactcatcgtaagcaggcgtcgagcggtcatcgggcaagcgttcggtgaccacactgcgagaaagcaaagcccataatacgtatcaaacgggttcgcttgtccaccagattaggtatcacagaaagccgatggcttccgaccgtatgacagcagataacggcacgaagcgcctgaagcattgagaagaacgggactgtaggaggtagatcttggctcttctggacgatgtcaaaagcgagttggcggcctttgaaggcgattcgccagccgcgatcaaggcccaagctgcggccatgatccgttttggcggcggtcttcgaccggtacagaatacatacgttatccaagccgtattcacctcgcttgacgttgcagaatggctgaagaacacgttgaggaacacgttcgggcatgaagccgaggtcaaccacctcacccgtcagaccccgaacggccctgtcgagacctacgtggtgctcgtcacccgcaacgtagtggccttggctttgcagaccggactggtcgaccgccgcaagcagcaggtccgtggactgccgtctgaagtggtcaacggatccatcgcccaaatcaaagcagcatggcgcggcgccttcatggcccgtggcttcctatccgatcccggtaaggccagcttcctggaaatcgcttgccccacggaagaggccgccatggccctgtgtggcgtggcccgtcgtctcggcatccaggccaagcatcgcacgctgcgcagctccgagcgcgtgaccctcaaggatcccgacgccatcgaacgcatgctcaagctcatgggcgccacccgttcggcccgcgaatggaccggcaagcgctccgacggcgaggcccgcggcaaggccaaccgtctggccaacttcgatgacgccaatatgcgccgttccgccaaggctgccgccgaagccagcgaaaaagtgcagcatgccttcgaagtgctcggcgataacattccggacaacctccgtcaggccggccagctgcgcatcgatcacgtggacaagagcctcgaggagcttggcaagatcgccgaaccgcaaatcaccaaggatgcgattgccggccgaattcgccgactgcttcagcttgccgagaaaacggagaaggctcgcgcagccgaaggcaagtaacccgacaacgacgtaacgaaacaccgcattcagtcagtaggcgaatgcggtgttttgttccggaatgcctgtaatatgcaaagtggcaaaattggccactttgacgtgcgattcgtcaaggaaaggatattcatgaagacactcaaggaccttggagatctcaagggcaagcgcgttctggttcgcgctgatttcaatgttccgctggacggcaccaccatcaccgatgacggtcgaatcaaggctgctctgccgaccatcaagaccctgcgcgaagaaggcgccaaggtcatcctcatggcccaccttggccgcccgaagggcaaggtcgttcctgagctgagcctggccccggttgccgcccgcctcggcgagctgctcggcaccaacgtgccgctggccaaggacacctacggcgaggacgctcaggccaaggtcgccgccatgaacgatggcgatgttgtgctgcttgagaacgttcgcttcaacccggaggagacctctaaggacgccgacgaacgcgccgcttacgccaagaagatcgccgctctcggcgaggccttcgtttccgatggcttcggcgtggtccaccgcgcccagggctccaactacgacgttgccgccgatctgccggccgccgcaggcctgctggtcgagaaggaagtcaaggccctgtccaaggccaccgagaacccggagcgtccgttcaccgtggtgctcggcggttccaaggtctccgacaagctcggcgtcatcgagaacctgctcgacaaggccaaccgtctggtcatcggcggcggcatggtgttcaccttcctcaaggccaagggctacgaggtcggcacctccctgcttgaagaggaccagcttgagaaggtcaagggctacatcgagaccgccgagaagaacggcgttgagctcgtgctgccgaccgacgtcgccgtgaacgccggcttcccggccggtgacaccccggttgctccggaagtcgttgccgccgacgccatcccggccgacaagatgggtctggacattggcccggagtcccagaagctcttccacgacaagatcgtcgactccaagaccgtcgtgtggaacggcccgatgggcgtgttcgaggttcctgagttcgcctccggcaccaaggccgtggcccagggtctggtcgacgccaccgcagccggtgcgttcaccatcgtcggtggcggcgactccgcctccgccgtgcgtaacctcggcttcccggaggacggcttctcccacatctccaccggtggcggcgcttccctcgagttcctcgaaggcaaggagctccctggtctgaaggtgcttgagtaatccattttctagctcccctccttgaggggagctacgtattttttagaggggaaacatatggcgtccaaacgcattccgttggtggccggcaactggaagatgaatttcgaccatcttgaagccacttacttcgtgcagaagctggtatggctgttgcatgacgctcgctttgacttcaaacgctgcgaagtcgcgcttttcccctcgttcacgtcattgcgcagcgtacaggtgctggtcgaagccgacaagctccatgtcgcctacggcgcacaatccgtttccgtgaccacccaaggtgccttcaccggcgatgtgtccgcggacatgatcgcccatctcggctgctcgtacgtcatcgtcggccactccgaacgccgcaaataccatcctgaagatgacgccaatatcgtcgatcaggtacgtgccgtgctcgccgccggcatgcagccgattttgtgcgtcggcgaaagcttcgaggaacgacgtcaaggcattgaactcgatttcgccgtgggccaggtacgagacgtcacccgcgatctcaacgaagaacaagccgccgaactcatcgtggcctacgaacctgtctgggccattggcaccggcatggtggccactccgcaatccgcccaggatgccgcaaacgccatccgcaacgatttgaagaccacttttggcacgaaggtatccgatagcgtacgtatcctgtacggcggatcggtcacctcgaaaaacgcggcggaactcatttcccaacccgacgtcgacggcttcctgatcggaggggcggccctggatgttgaggaactcgccaaaatcgctcgactggcactgaaatccacgaaatcacggaactaataccacggttttcccgtgtgtgcgctatgctggtcaacagtccaatcaatccggaggtaccctgtgaccgctcttaagatcacgctgcaagtcatcgtcgtgctgctcagcttcgtgctgaccctgctcatccttatgcacaagggcaagggcggcggtttgtccgacatgttcggcggcggtctgacccagaacgccggtacttccggtgtcgccgaaaagaacctgaaccgttggaccgttatcatcgctctcgtgtgggtggcattgatcatcggcctcgacatgatgaccaagttcaacctcggctgatcggcttgcacgccatatagacttgtcgctcgcgacccatgaccgttaccgtcggtcatgggtcgtatgcgttctatcgagtattacgaaaggacatcaccatggtcactatgaaccgcaacaaagtcgttatcgtcggcactggccaggtcggtgccaccgccgccttcggcatcgtcacgcacggcctgtgcaatgagctcgtgctcatcgaccgctccgccgccaaagccctgggggaggcccgcgacctcgatgacggcagcgaattccaggaccgccacgtcaaggtgcgcgccggcgactacgccgactgcaaggacgcggacatcgtcgtcatcaccgtgggccgcaagccgccggccaactccaaccgcatggccgaactcggcttcaccgtgggccttgtgggcgaagtggtcgacaacgtcatggcctccggcttcgacggcgtgatcgtcatggtctccaacccggtcgatgtgatggcctggtatgcctggaaacgttccggcctgccgcgcacccaggtgctgggcaccggcaccgcgctcgacacctcgcgtctcaagaccatcatcggcgaagagaccggcctcgacccgcgtaacgtgggcggcttcgtgatgggcgagcacggcgactcccagttcaccgcatggtccaccgtctcgctcggcggcaagccattcgcccgcttcctggccgacaaccaagaccgtttcgcctccgtgtccaccaccgaaatcgaagagaagacccgcacccgtggcgatgagatcgtcgcggccaagggcggtaccaacttcggcatcgcctccaccgtggccggcatcgtgcagaccatcctgtgggacgaacgccgcatcgtacccgtctccaccctgctgaacggcgaatacggcgaacatgacgtgttcctcggcgtccccactgaactgcgcgccaatggtgccaacgagatcgtcgaactcgatctgagcgaggacgagcaggccaaattgcaccattccgccgaactcgtgcgtgaacactgcgaggggctgctgtgattctcgacgccatcacaccgaaacaaccccgactgctggtcgccgacctcgacggtacgttgctgcacgacgccgaggtattcgaggaccggttcatcacccagcgcagcatcgacaccatcaaccgcgcgcacgatgccggactgaaattcgccatcgccaccgcgcggccggtgagtaccggcctccagttcgccgaaaaactgccggtggacgccgtaatctatctgaacggtgccctcatcgatttcgacccggcccactccgacttcgacctgctcacctcaggtgccacgccggccgatgagaaccatttgatcaagattggcttctcctcacggcgtgcctgcgaagtctgtctgttcctgctcgatcgcatgcccggcctgaagctcggcatcgtgatgaacgacgtgcgctacaccaacttcgatgtgcgcgtgtattggaaaacacaggccttccaatacacgaacttccacgacgtgcccgaaggcgtggcggataagatcaccatcttccccgagcctgaacagtggaacgagctgtgtgcgctgattccgccggacttcgacatctccattagcgaaggcgtgatgtggatgctcatgaacccgcaggccaacaaggagcatgcgctgcacctgctgtgcgaacgactggacgtgccgctcgaacagaccgccgccttcggcgacgacctcatcgatatcaacatgatgagcgaatccggccggggtgtggccgtggccaacgcgaaccccaaggtgttgtctatcgccgacgagatctgcccgcccaacaacgaggacggcgtcgcccaatggattgaagcgcagttgggctgaaccggccgagactcgagaacacgccaaaattgaacttgtgttgaaccgggagtatgctttgaactgttgttcaaaagataaattgaactcccggttggaggcataaggatatgagcgtatcggtgtttgcggaacgtctgcgcaatgcgatgaacagtaggggattgaagcaggtcgatttggtgcacgccgccgaacatcgtggcgtaaagatgggcaagagccatatcagccaatacgtggccggcaagaccatgccccgcgaagacgtgctcgaattcctggccagcgaactggacgtcgacgcgaactggctgcgcggcgaggaatccaccccgcaattgaactcggacgcttccaacagcgtcacggacggcgaacacgccgccacgccgcttgccacgggcaccgccaagcccctgacggacagcgagattcccgtgggccgccgccgtaccttcggcaaatcgcacaagctcgacaacgtgctctacgacgtgcgcggcccggtcgccgacgaggcgatgcgcatggaggccaacggcacccacatcctgaaattgaacatcggcaatccagcacccttcggcttccgcacgccggacgaagtcgtctatgacatggcccaccagctcaccgacaccgaaggctactcgccgtccaagggcctgttctccgcgcgcaaggccatcatgcagtacgcgcagctgaagaacatcccgaacgtcaccatcgacgacatctacaccggcaacggcgtcagcgagctcatcaacctgtccatgtccgcgctgctcgacaccggcgacgaagtgctcgtgccctccccggactacccgctgtggaccgcctgcgtgaacctggccggcggcaccgccgtgcactacctgtgcgacgaacagtccgaatggtatccggacatcgatgacatccgctccaagatcaccagcaacaccaaggcgattgtcatcatcaacccgaacaaccccaccggcgcactttacccaaaggaggtgctccagcagatcgtcgacatcgcgcgtgaacaccagctcatcatcttctccgacgaaatctacgatcgcctcgtcatggacggcctgcagcacatctccatcgcctcgatggccccggacctgttctgcgtgaccttctccggcctgtcgaaatcgcacatgatcgccggctaccgcatcggctggatgatcctgtccggcaacaagcgtatcgccaaggactacatcgagggcctcaacatgctcgccaacatgcgcatgtgctcgaacgtgcccgcccagtccgtggtgcagaccgcgctcggcggccaccagagcgtcaacgactacatcgtgccgggcggccgcgtgcacgaccagcgtgacctcgtttacgacatgctcaaccagattcccggcatcaccgccgtcaagccgaaggccgcgttctacatcttcccgaagatcgacgtcaaacgcttcaacatccactcggacgagcagttcgcgctcgacctgctgcatgacaagcacatcctcatcagccacggcggcgcgttcaactggcatcgccccgaccacttccgcgtggtgtacctgccgcgcatgggcatgctgcacgaaaccatgggggagctcgccgacttcttcagctactactggcagagctgatccttggtacaggcgaacacgatcgatgccgggctgggcaccaaaccggtgccccgtctggccctgaccatgtcggtccccaccatcgtggcgcaggcggcgaacgcctcgtacacgatcatcgaccgactgttcatcgggcacatccccgaagtgggcaacgcggcgatgaccggcgtgggcatctgcttcccgattctgccggccgtcaccgccttcgcctcgctgatcggcgcaggcggcgcgcctcgcgcctccattgaacttgggcgcggcaacttcaagaaagccgaacgcatcctcggcaccagcgccgcgttcctcatcgccatagccctgaccctcaccgtgctgctgcagttggcgaaaccactgtggccatggtctccgtactcatcggcaccggcatatccatccttcttgaccccgtgttcattttcgtgttcggatggggcgtcaggggagcgggcgccgcgaacgtgctcgccacattccccggcttcttcgcctcatggttcacctcggaacagacggtcatcgacatcgtgacccgcatgatgccgattttcgtctgcggctggggtatcttcggcatccagatgggcgcgcaatgcgcactcgtcggcatgggccaggccaaacagtcggtgttcttggccatcttccgcaagatcatcctgctcgtgccgctcgcgctgctgctgccgcactggatcggcgtcaacggcatcttcatcgccgaacccatctccgacgccacctccggcatcgtggccggcttcctgttctatgccacctaccgcaagattcggcgagatatggtctagactcctgattcaatggatgtgccgtctcatgcgttgcgaaacacgggacggataggatgcctcgcaaaacgggtgcccgttgtttcgtgatatgaaggagattttatgccggtggtgtcgcgtcgtgcgcagccaacgtgatggccataatcgccgaaagcagggagaacaatggcagcacgcacaacacgacggtcagcagtcccaaagcttcacggccgatgcaataagcgacaagacctgcattgtcagttgccgatagcgctaggcagaaatcggtgtgtctaccagtgttgtagctgtaggtaaagaacgtgagacctgaccagaacagggcaacgggaacagagccgatggcgcgaaaagccctgtactcccgcaacggtcagacagagaatcgcgacaacactcagcgcagtcaccgtcataaaccacagtggtgaggtgacgcagactccataatcgtcagttgcttggcccgagagatagtaggtcattctgccaatcgccggacagttcggatgcagcatcatgccgccccaaatgcgctcatatagtggtgcgaacgatacaccggcaccgctgagcgtcgcaacaaccgccatcaccgaccgaccgccagactccggcacagaccgggaagaactaccgtcgcggagcatcggcgataccaatggcaacaccgaggatagccgggatcacccagccgagctggtattgctgcaagggcagcatggccagcgtcgtgtccagccagccgatggagccgccgaagacggtgatcaggctggagatgcaggtggcgaaggagtcgatgcccaccagcagcacggtccagaagtagacatgcgggaatcgcgcgccgagcgacttgtgggtcagcgccagcagcaccagcacgatggcgatcggatacagtgcggacaacaccggcacggaaaccttgatgatcgcgcttagcccggcgttggacacgatgaaactgaacacggtgaagatgacctgccaggtgcggtagctcaacgttctccctgcaacggtctggaaccgagtgtggaagtaggtggcgcaggtaccgatcagtccggtgcatacgttgaggcaggcgatgacgaagacgataccgaggaacgcggtaccgaacgcgccgaacagggacgaggtgagattggtgagcacggtcgcgcccgtgtctttggcgggatcgatggtggcgatggcaccggacaccaagcccacgtagctcagtgcgccgtagatcacgatcagcagcacaccggtgccgagtccggcatacgcggtctccttctgcacttgcgattcgtcatcgacctgctgggtgcggatattcgcggaaatcacgatgccgaaatagagcgcggcgagcagatccatggtctggtagccgtcgaggaagccacgtgcaatctggtttgtggagtagtcgcccatcggtttggccggggtaccgataccgtggattaggcaggcgatgaacaggacggcaatcagcaccagcagcaacggtcccatgaatcggccgagcactttggagagtttttcgggatgctgggcgaacaggaacgccagtgtgaagaacacgagcgagtagatgagttgggccagccagccgtaggaggacggcacgaaaggcgccaccatcatttcgaacgaggtggtcgccgtacgcggaatcgcaaagcaggggccgatggtgagcatgatcgccaagccgaggaacagggcgaatttgggggagacccggccggcgagtttgtcgaagccaccggcgaaggtgaccgccagcacgccgagaatcggcaggccgaccgcggagacgatgaagccgatggccgccggtatggtcgcggaaccggcctgagctccgacaaacggcgggaagatcaggttgcccgctccgaagaacatcgaaaagaaggtaaaggtcatcaccaaccgctggcgtgcgacaagtttgttcattacggttcggcctttctctcatgtgctcgtactactgtagcaacaaacgtaagaagccccgaccggttggggtcggagcttctgtgagctaatcagttaatgcgcgaaatgcgcatcagctaataatctcaggcgttcacgcggtcgatgccggactggacgtcagccagcacggaatcccaggacttgatgaaggcggcgacaccgtcggcctccagcttgtcagtgacgtccttgaggttgatacccagctcagccagcttgttgatgacggcgtgggactcctcgtaggtgccctcgatggacggagcgccgttgccgtggtcggccagagcgttcagggtcttctccggcatggtgttgacgatgtgcttggcaacgagctcgtcaacgtacttgcagtcggagtaggcggcgttcttggtaccggtggaggcccacagcggacgctgaaccttggcacccttggcagccaggtcggcccaacgcggatcctcggcaaacttcttctcgaagagctcgtaagccaggcgagcgttggccacagcggccttgccctccagagccttggcctcgtcggagccgttggcttccagcagcttgtcgacagcggtgtccacgcgggagacgaagaaggaagcgacggagccgatgtgcttcaggtcgtggccgttggcgtcagcctgggcgatgccctcgatgaaggcgtcgatgacctgctcgtagcgctcgagcgagaagatcagggtgacgttgacggagatacccttggccagggtggcggtgatggccggcaggccttcgagggttgccggaatcttgatcatggcgttcggacggttgaccttctcccagagttccacagcctgcttggcggtgttctcggtgtcgtgggccagacgcgggtcgacctcgatggagacgcggccgtcgacgaagtcggtagcctcagcgatctcgcggaagatgtcggtggcgttgcgcacgtcggtggtggtgagctcgcggacagcggtctcaacgtcaaccttgccgagctccttgagctgagcgtcgtacgggccgacctggctcagggccttctggaagatggacgggttggtggtaacgccgaccacgttcttgttggcgatgaggtcctgcagggagccggactcaatgcgggagcgggacaggtcgtccagccagatggaaacgccgttgtcggacgtacgctgagttgcttcagtcatttattttctccttggattcaagccctaggctcccctctcctgggagaggggagctgtccgcaacgcggactggggggagtgggctcaagcattgctcccctcagtcaggctttcgcctgacagctcccctcagggaggggagccaacaattattgaattattgcttagttgctcacttggcggcttcgacttcggcgatggaggccttggcggcttccaccacgtgctcggcggtgatgccgaggtcgatcatgttctgagcgccgtcaccctgcaggccgaactgctcgatggagacaggcttgccgtaggaaccgaggtacttgtaccacggcatggcaacgccggcctcgacggagacacgagccttgacagcggccggaagcacagcctccttgtactcggcgtcctgctcctcgaaccattccatggacggcacggacacgacgcgagccttgacgccctcgccggccagggtcttggcggcagccacagcccactggacctcggaaccggaagccatgaggatgacgtccggagtaccctcggtgtcgaccaggatgtaagcgcccttcttgacaccgtccttggccttggcagcggtctcggcaagaaccgggacaccctgacgggtcagaaccatggcgccaggcagggtgttcttcttctcgaagaagtaacggtaagcctcggcggtctcgaaggcgtcggccgggcgaatgacctcaagctgaggaatcgcgcggaaggaagcaaggtgctcaaccggctggtgggtcgggccgtcctcgccgacggcgacggagtcgtgggaccagatgtacaggttcgggatctgcatgagggcggccagacgaacggcggaacgctcgtagtcggagaacatgaagaaggtgccgccgaacggacgggtgtgggaacccagcaggatgccgttggtgatgcagcccatggtgaactcgcgcacgccgaagtgcagctggcgaccgaactcgttgcagttcggccactgcttagtggcgcactcggccggggcgaaggtggcagcgcccttgaggtcggtcttgttggagccaccgaggtcggcggagccgccccagagttccggcatgacggcggcgatggcgttgagcacggagccggaggcgccacgagtggcgacacccttgccgacttcgaaggtggcctcaaggtcgtcaagggccttgtcgaagccttccggcagttcgccggccttcagacggtcgtacagggcggccttgtccgggttggccttgcgccaggtgtcgaacttctcgtcccaggccttgtgggcctccaggccgcgatcggcgaccttgcgggcgtgggccagggcttcttcgtcgacgtggaaggactcctccggatcgtagccgaggagtttcttgaggccggcgacggcctcggcgcccagcttggagccatgggaggacgggtcgttggtcttgcccggtgtcggccaggcgatcagggagtggaccttgatgagcttcggctggtccggggcggcggcttcggccttggcgatgacgtcggccagaccctcgatgtcctccttgtaggagccgtcgggctggatgaagctgaactcgtcggtgtaccagccgtaggcctggaagcgcttgagcacgtcctcggccagcaccaggttggtgtcgccttcgatctggatgcggttggcgtcgaagatcacggtcaggttgccgagcttctggttggcggccagggaagcggcctcgccggagatgccctcctcgatgtcgccttcaccacagatggcccaaatcttgtggtagaacggggaatcttccttcggggtctccgggtcaagcagaccgcgctggaaacgctcgccgtaggcaaagccgatggcggaggcgaagccctggcccagagggccggtggtcatttcgatgcccggggtcaggccgtactccgggtggcccggggtgcgggtggcagcgccgccacggaagttcttaaggtcgtccagggtcacgccgtagccggagaagtacagctggacgtactgggtgagggaggcatggccaccggaaaggatgaagcgatcgcggccttcccagttgggatcattcggatcgtgcttgatgaagtgctggtacagcgtgtaggcgacgggcgccagggagacgggggagccggggtggccggagcctgccttctcaaccgcgtcagccgaaaggaccttcgccatcttgatggcgcgctcgtcgagctcggtctccttgaattcggtcatggattactttccttccaattggtcgggccgcgtatccggcttgtgccgggcgcttgacgccctcacattgcgattaccatgctagcgtcggtttgcgacgttgcggtgcaattttggcgtgttttggtagtttgtgttctgttagcgttcacagtgaacattgctacgctgcaaacgaacgcattagcactcaagcctaaggagtgctaatacaatgttctaaggtgaagtgcgccacctgcacgtggcggagccaagaaagaggcaatatttctgggttcccgcgtgtcgcggcgtggcgaaccgaccgtcggggtacgccctgagtgaaccgtgactgatatgaatatgtatgcatatataaggaggcgcgcatgacgcaatcaagacgcatgctggtgctgcgcgccgtggtggaggattacatccgttctcaggagcccgtgggctccacttcgctgacgcgcgaccatgatctcggcgtcagttcggccaccatccgtaacgacatgtccgctctggaggatgaaggatatctgattcagccgcacacttcggccggtcgtgtgcccaccgaaaagggctatcgatactttgtggaccgacttgctaccgtggtgccgctcagcgaggcgcagcgccgcggcatcaacagcttcctgtccggatcggtgagtctcaaggacgcgctgcagcgttcggcacgactgttgtccgaaatcaccggtcaagtggccatagtcacctcgccatcgctggccaaggccacattgcggcacgtggagatggtgcccgttgccatgaccacgttgctcgcggtggtgattaccgacaccggccgcgtggcccagcacggcctgaccatcgcatccatgcccgccgtggacgagatcaaccggctctccaacaccgtcaacgaacaatgtgtcggactgtccctatcgaaatccgcggagaccgtgcgatccatcgccgccagcgccggctacgagtcggtgcgcggcgtggccgacgcgctggccgacgccttcgaatcgatggcattggacgaacgcgcggacgaactgtacatgtccggcacctcgcacctggcccactcccggtccctggccgatctggccccgctcttcgacgcgctggaagaacaggtcgtgctgatgaagctcatgagcaacctgagcgaggagacgaatgcatccggcgtgggcgtggccatcggctccgaaatgcacacccccggcctactgcatgcctccgtggtcagcagtggctatgggcgcagcggtgcggcgggcgaaccggcggggaacgatcccgtaggcgaacccgaaaccgaatccgagacggagagccagacgaacgacacggaacccatcgccttcgtcggctccatagggccgacccacatggactatgcggccactatggccgccgtcagggccgtagccagatatttgaccgccttcctctccgagggccggacccaagactgaccgccgtctgtggcacaatgacccgcagaccaaacgaacacaaaggatcaatcaagtggcagattattacgagacgctgggtgtggaacgcggcgccagtgacgacgagatcaagaaggcataccgcaagctcagccgtaagtaccaccccgacatcgcgggccctgaattcgaggacaagttcaaggaagtgaacaacgcctacgatgtgctgtccaatccggacaagcgccgtatgtatgattcgggcgtcgacccgaacgatccgaacgccggtgccggcggcttctccggggcgggcttcggcgatatgagcgacgtgttctccacgttcttcggttccgcgttcggtggtggctcacagggcccggtgccgcgtacccagcccggccgcgacgccctggcctccgcgtccatcgacctgaagaccgccgtgttcggcggcaccgcgcacgtcaagatcagcacgttctccctgtgccaggagtgcggcggctccggcgcccagggcggcgcacagccggtcacctgccccgactgccacggccagggattcatgcagaaggtcgtgcgcaccatgctcggccagatgatgacctccgccccctgcgaacgttgcgagggccacggtaccatcatcaagaacccgtgccccagctgcatgggccacggccgtgtgcgtaccacacgtaccgtgggcgtcaccgtgcccgccggcatcaacgacaacgcgcgtctacgtttggccaaccagggcgaagtgggtgagggcggcggcgctgccggcgacctgtacatcgacattcgcatcaaggcggataagcagttcacccgcgatggcgacgacctgcactgctggattcaggtgccgatgagctgggccgtgctcggccacaatctgtccattgacacgttcgatggtgagaagaccgtgtccatcccggccggctgccagcctgaggacactgtgacgcttaagggactgggcgtcacgaacatccgcaacaaggacgagcgcggcaacctcatcgcccacgtcaatgtactgattcccaccaagctcaacgaaaccgagcgcggcctcatcgaacagttcgccgcctcgcacgattcaggcgccacgcacgtctcccaggcatcccgtccacaggctggccaaaagaaaggcttcttcagcaagttgaaggacgcgctgagctgagagtggatgcgttcttggctcccctcagagaggggagccaagtctgttacttcagcagggagcggcacatggagcggtattcgttgacgtagccgccgccgaagaagacacagtgaccggcgatggggtagagctgccagagcgtgatacgctcctgccatccggccttcaacggatgcacggactggtagccctcggtgatttcgctcagatagctcatgccgaacaggtgcagcatagccagatcctcctcgcgatgaccgccatgtgccgccgggtcgatgagcacagcctcgggctgcccggaatcggcggtccacatcacattgccgctccacagatcaccgtggatgcgcgccggcttgtcggacgcggctcggcccatcagatccggcaacgcttcaatcacgcgctcggtcagttcgacatcgcgcttatccagctcgccacgcctcacaccaaggttgaccatcgggcgcagacgtccatcagcgaaatagctgatcgggtcggtccactcgccggtatccattttcactgggtcctgcaatggtccgaaatagcatgtgccgttatatccgtcaggcgcagacccgaaatattcggcacccacatcatgcatatgggccagagccgcaccaaaagctcgtgccgcctgaggcgtgggggacgcgctgcccacacgttcgatatccagataatccttgccccagccgtatacctgcaccacgcgcgggccgccctgcgcatgagccgcccccaaccattcgagtcctcgaccctcgcattcgaagaatccttccggtgcgaatgccctgcttttgcgatacgtggccataatgctcccttcgtcgcttacgtactatatccactttcattgtagaagccgtggatgttaccgattcttagtgttgttctacacccccttgggtagggtgttcatcgtcataacacatcaaatacttagaaatcacgaggggttatgaattttttccaagcgatcattctcggcatcgttcaggcgctgaccgagtatctcccggtatcctccagcgcgcatatccgtattttcggcgatttgatgctgggctctgatcccggtgcggcgtttaccgccatcatccaaatcggcaccgaacttgcggtgattctgtatttccgtcacgacatcatcaatatccttactcactggttcagctgcctgttcggcaagaacggcaaggattggaaggcccgcatgggccgcggcgacaattacgccacactcggctggaacattatcgtcggctcgattccgattatcatcctcggcttcactctgcagaacgtcatcgagacctcgttgcgcaacctgtggattacggtaaccgtgctgttggtattcggcattctgctgtggatggtggatgccaaggctcgccagaacaaaaccatgaatgatatgacgtatcgtgatgcgttcctcttcggtttgggccagtccatggcgctgattcctggtgtgtcccgctccggcggcaccatcaccgtcggtcgcgcactgggctacacgcgtgaggccgctgtacgtctgagcttcctgatggccatccccgcggtgttcggctcaggtttgctcgaagccatcaaggccgtgaagaactacaaaaccgatgcgatgttccccggctgggggccgaccctcgtagccatggtcatcagcttcgtactcggctacatcgtgatcatcggattcctgaagttcgtatcgaacttctcctataaggccttcgccatctaccgcatcggtttggctgtggtcgtcgccttgctgctgattgtgggcgtgctgccggccatcgatccctccgtggcggctgcggcataagacgggtcgatagacgactccaatataatggtgctcccgctggcgggagccgtcagcgaagctgactgggggtggtcactggaatatgccagcagaaccaccctcagtctcgctacgcgagccagctcccgacattttgtgcgacgtgcacatggtgcactgctatgaacagcccacagggctgttcatccagcgggagcacgccatatatgggctaattgcccatctggcgcagaaacgcttctgcttctttgactagttgttcggcctggggcgctcccaaggaagcctccgcctcggctttctgctgcaagtcgtagtcgtgctccaaatgctccacgtaatcgtgaagctggtcattacaacgaaccagtatcgaggcttgcgccttccactgttcggctttctgcttcagatctgccgtatcgaaggtgaagccgatatgcttgcccaacgcatccagcaatcgcatagtgccggcagaacattcgtcgctgcccaaatattgggggatggacacccacatcgaggaatgagcaaaaccttgctgcgcggcggccacatccaaaacggtaggaatgcctaccgggccgttatacgaccggtctccttcgcattgacagtctccgtcgctgacggcgatgggcaacgggcgggtatgcgggcaatcggagaacatcgaacctaacgtaatgatccgattgacatccagctcatcggcaatggccagactctggctacagtattccttccaccgatagttcggttcgggggcgatctgcgcatagatatgcttgcctgcgtccaacgtgatgtcgtagaacgtggtctgcggccagataagattggtgcgtcccgcaacatggcacagcataggacgggcaacctgatagtcatagaaatcatcacatctaatatgacgaatctcgcgggactcatatcgcttgaccagatggcgcaccgcgttcgtcgccgcctgacaggcatcattccatccctcgaatgcggcgatcaatactgcgccggtgtccttcgctgcttcactcatacctctagagtaactggaattcattgcccgaagcgcacgctttagccataagcgagagtatgcaattacaggcgacacgccgcagctggacgaactacacgcatgtgagtatagtaaacactcgtgcttcggcagggagacctcgccaaggaaacacacgcggacatagcttagttggtaaagcgcaaccttgccaaggttgagaccgcgggttcgagtcccgttgtccgctctaggtccgtgagttgacagaccttacggtgggttagccaagcggttaggcagcggcctgcaaagccgtatagacgagttcgactctcgtacccacctctcagaccagcgaagcaattcaatgggatgaaatatgacccgggcggttggcgcagtggtagcgcacttccctgacacggaaggggtcacaagttcgaatcttgtatcgcccacgaaagtcgaagcaattcgactggatataactgaagaaccgagtattcgggcgattggcgcagcggctagcgcacttcgttcacaccgaaggggtcgtaggttcgattcctacatcgcccactggattccgcttctcacggcggattcctttgcggacatagcttagttggtaaagcgcaaccttgccaaggttgagaccgcgggttcgagtcccgttgtccgctccacaacgaaacctcgcttcggcgaggtttttttcgtattggttcagatgctggtggtatttgtcgcacgcccaacctatcgtgtcctacgttgattaaccagtccaggcctgcacattagtaccgtgggccccgatagcaaaggacaaatcatggcgcaagctaccatctccataaccgtcaacggcgaagcgaaggaggtggaagcaaccaccaccggcgtagaactgttcgcggaagacaagaacatcatcgcggtcaagatcaacggcgagaaccgtgacctgtacacgccgctgaacgatggcgataccgtcgaccccatcgccctcgactccgaagacggcctcgcaatcatgcgtcactcggccacccacgtcatggcccaggccgtgcaggaagtctacccgaacgccaagctcggcgtcggccccgtcatcaaggacggcttctactacgacttccaggtcgaccagcccttcaccccggacgacctcaaggacatcgagaagcgcatgcagcgcatcatcaagtcctcccagtccttccgccgccgttccgtgactgaggaagaggctctgaaggaagaggccgaccagccctttaagatcgaactgatcgaagacaaggaagcacacctcgacccggccgccgccaccgagatctccgaaaaggagctcagcttctacgacaacgtagaccgtgatggcaatgtggtttggaaggacctgtgccgcggtccgcacctgccgaacacccgctacatcaaggccttcaagatcgagcgttccgccgccgcctactggcgtggttccgagaagaacccgaccatgcagcgcatctacggcaccgcgtgggccaccaaggaagacctcaaggcctaccagacccgtctcgaggaggccgccaagcgcgatcaccgcaagctcggcgccgagatggacctgttctccttcccggatgaaattggccccggcctggccgtgttccacccgaagggcgccgccgtgatcaacgcgatggaggactactcccgtgagatgcaccgcaagcaccactacagcttcgtgcagaccccgcacatcaccaagggcggcctgtacgagacctccggccacctgcactggtacaaggacggcatgtacccgcccatgcacctcgacgaggagaaggacgcggacggcaacatcaccaagccgggcgccgactactacctgaagccgatgaactgcccgatgcacaacctgatcttcaagtcccgtcagcgctcctaccgcgagctgccgctgcgcctcttcgagttcggcaccgtgtaccgctacgagaagtccggcgaggtccacggcctgacccgcgtgcgcggcctcacccaggacgactcccacatctactgcacccgcgagcagatgaaagacgagctcaccagcctgctgaccttcgtgctgaacctgctcaaggactttggcctgaccgacttctacctcgagctgtccaccaaggacccgaacaagtacgtcggctccgacgagatctgggaggaggccaccaacacgctcgccgaggtcgccaaggaatccaacctcgagctcgtcgacgatccgtgcggcgccgccttctacggcccgaagatctccgtgcaggcccgcgacgccatcggccgcacctggcaggtctcgaccatccagctcgacttcaacctgcccgagcgtttccagctcgagtacatcgcgcaggacggtacccaccagcgtccggtgatgattcaccgcgccctgttcggctccatcgaacgcttcttcgccgtgctgctcgagcactacgcaggcgccttcccggcgtggctggcccccgtgcaggtgctcggcgtgccggttgccgacgagttcgccccgcatctggccggtttcgtcaagtcccttgaggacgagatggtccgttgcgagatcgactactccgacgatcgcttcggcaagaagattcgcaacgcctccaagtccaaggtgccgttcatcctcatcgtcggtgaggaagacatgaacaacaacgcggtcagcttccgcttccgtgacggcagccagctcaacggcgttccggtggacaaggcccgcgagcagatcctcaccgtcatcaagaagcgcgtccaggtgaactccgccgacgacttcaacgccgctgtggctgagtgatgtgaatggtactggctcccctctctgaggggagctggctccgtaggcgactgaggggagtcctgcatggctcgcactcccctcagtccgtttcacggacagctcccctcagagaggggagccaagaaagggtgcgaaaatgactgacgtgcgtgtcgataatccggcggactttccgcctcaggaagacacggtcgaacgactgtggactccgcagcgcatgacctatgtgctgcgcaacagcgaggatcgcccaaccaagcccaagacgaaggaatgcccgttctgcgccggacccaagaaatccgacgaagacggcctcatcgcctggcgtggcacgcacgtgttcgccatcatgaacctctacccatacaatgtcgggcatctcatgatctgcccgtaccgtcacgtcggattcatcaccgaactcgacgatgccgaactgttcgaattcgagaaggccaccaccctcgccatgaaggtgatggaaaccgtctcccgtccgcacggttacaatatcggcattaatcagggcgaagtagcaggcgcaggagtcgccgctcacctccatcagcatgtagtgcctcgctggaatggtgacgcgaacttcatgcccatcgtcgcccagacacgcaccatgcctattctgctgtccgaccagcgagaagcctatgcccgggcattcgaacagctggctccgcagtatcatctgccgcttgcctaacacaggtgcggcaccccgcgtgaccggtcttatcggtacgcataacaagacaatcatcggaaacatcacgggtatgtctgattaacggcctacaatcgtttcgtttgacatcatccgtttcaataattgctaggagcattatgtcaggtcattccaagtgggcgaccaccaagcacaagaaggccgccatcgacgccaagcgcggcaagctcttcgccaagctcatcaagaacatcgaaatcgccgcccgcctcggcggtggcgacccggacggcaacccgtccctgtacgatgccatctacaaggccaagaaggcctccatgccggccgacaacatcgctcgtgccgtcaagcgtggtgccggtgctgaagacggcgccgccaactacgaagacatcgtctacgagggctacgctcctgccggcgttggcctcatcatcgaatgccttaccgacaaccgcaaccgtgcggccgccgaagtccgttccaccctgaccaagggcaacggctccctggccacctccggctccgtgtccttcaacttcgagcgcaagggccagatcgtggtgccgtccgagggcgtggacttcgacaagctgttcgaaaccgccgccgaagccggtgccgaggacgttaccgatgacggtgaggtgttcaccgttgtgaccggtccgtccgacctgttcaccgtgcgcaaggctctgcaggacgccggcttcgactacgattccgccgaccaggtcatgcagccgaagaacgaggtcgagttgagcctcgacgatgcccgcaaggtgtccaagctcatcgacaacctcgatgacctcgacgatgtgcagaacatctactccaactggaccgcttccgacgaggtgatggcccagctcgacgaggagtaatcctcgtgattatccttggcgtcgaccccgggctcacacgttgcggggtcggcgtgatcgaagccggcgagcaccgccggctttcgtttattcacgtggacgtggtgcggtcctcaccggatatcacccaggatctgcgtctactggccatctacaacggcctgtccgagaaaatggatcgcttcgcacccgatgccgtatccatcgaacgagtgttcgcacaatccaaccgcaacaccgtactcggtaccgcacaggccgccggcctcgccatgctcgccgccgcgcaacgcaatattcccgtggcgttgcatacgcctaccgaagccaagctggctatcaccggtaacgggcaggcgcagaagattcaggtggagcgtatggtgacacgtattttgaacctcaccaaaatgccgactcccgccgatgccgccgatgccttggctttggccatttgccatgcgctgcgcccggcaggcgcattgcagggcggcgaacgcgaacaacatctgaccgccgcgcaacgccagtgggctgaggccgcacagaaatccacgcgccgccgcatcaatcacgaccgaggcatgtagtatactttcgaacagttgttcgagtcttgaatcctggagccctgaaggagtacctgtatgatcggcatgctgaccgggcgggttgaatcggtcgaaaccgataccgcattgattgatgttgggggagtgggctacgaagtgcgcatgtccgccaccgacctgagccgtctgcacgccgggcaagacacccgcgtcttcacctatatgaacctctctcaggatgccattaccctgcatggattcctggatcgggacgccaagaaaacctttctgcaactcatcaaggtctccggcattggacctaaagtggcccaatcgttactctccacactgacgccgagtcagctggcccacgccatcgccgacaacgacgccaccgcgctggccaaggctccggggctgggcaagaagggcgcacagaaaatcatcctcgagcttaagggctctattgatttgagtcagatcgagggtgcttccgctcaggcggcaatatccaagtctccggtggataccggtacggaacaggttgtcgaaggactgatttcacttggctggcgtcagcaggacgcccagcaggccgttgccgaggcttgcgccgaaaacgatattcccacgccgcttgccaccgacgatgtgccgcgtgtgctacgtctggctttggcgctgatggataggggccgctgatgagcgagacaacggattacggtacctcaaacaccggtgccaacgaagagtcgttgcgcatggtctcctcccagccgatcggcaacgagccggtcagcgacgaggagctgcgcccccatgttctcgaaggctttatcggacagccacggctcaaggcccagctgcaactgttcctggacgcggcccgcaaacgcgatgtgccaccggaccatattctgcttgccggccctcctggcttgggcaaaaccacgttggccatgatcgttgccaatgagcttgaagtgccgattcgcgtgacttccggccctgcggttcaacatgccggtgatcttgcttcgattctgagctccctcgacgtcggcgaagtgctgttcatcgacgagatccatcgtctgccgcgcgccgccgaagagctgctgtatatcgcgatggaggacttccgcgtcgatgtgatggtcggcaaaggcccgggcgcaagctccatcccgctgaccctgccgcgattcaccgtcatcggtgccaccacgcgcgaaggtatgctgccaagcccgttgcgcgcacgctttggcttcaccgcacatctcgacttctatccgcatgaggagttggaaaagctcatcgaacgttcggccaacgtactgggcgtaaaccttgatgcgggttccgctcatgagcttgcgttgcgttcgcgcggcacgccgcgtatcgccaaccgattgctacgccgtgtacgcgactgggccatcgtccacgacctgatcgtggtgcggccggacgacgtcaaggaggcgctggccctgtaccagatcgactccgaaggcctcgaccggctggacatcgccgtgctcaatgccatcgtgcgcaacttcaacggtggacccgtgggcctgaacaatctggcggccatggtgggcgaggaatcggaaaccgtggaaaccgtgtgcgagccgtatcttgtgcgcgaaggttttatgattcgcacgcccaaaggccgcgtggctaccgagaaggcatggcagcatttgggaattacgcccaaagatgatgtcagcaagctcttctagactttctcctgtttgcacacttggcggcgtttcgtcaatgtcgctcgtttgaaggagttgtttcgtggaacaacagtacattatgctcatcgtgatcgtcgtcgtgttcggcggcatgatgtggtggcagtccaagaaggccaagcagcaacagcaggagaagcaggacttccgtcgcaacctgcagcccggcaccgaggtcatcaccatcggccaggtgatcggcaaggtcgtcgaagtcgacgagcagtatgaggagatcgtcatcgactccgaaggctccaagctgcgtttcggcttcaacgccatcgcccgtgagtacacccgcccggcctatgtgtccgatgatgaggtcgacgagaacggcaacccgctgcccgacgaagacaccgaggctccggctaacgatgaggctggtcaggttccgatcgaggcgtccgtcgtgtccgaggaagacaccgctgacgagaccggtgacgacaacgaaaccaagacgaagtaagctgttcgattcggtagcaccatccgagtatcgcatcgcaaaggcataaaaggggcgagcactatggcacagtcggacatcaccatcgacgcattgagcaaggtagggcaacaggacgccgaatatctggtgtccttggtgcgttccataccggggtttcccaaggaaggcattatcttccgtgatttcatgccagtgctcgccgaccccaagggcttgaagattctgctcaaggcgcttgaaacggctctgccggtgtccccgagcgaattcgactccattgccggtctcgaatcgcgcgggttcctgttcggcccggccatggccgcccatctgggcaagggtttcatcgccgtgcgcaaggccggtaaattgccgcccgaaaccatcggtgaatcctatgacctcgaatacggcacggccagcgtcgaaatcgaaaccgacgccgtacaggcgggggagcgagtgctcattgtcgatgatctcatcgccacaggcggcaccgccaaagccggcgccgaccttatcgaaaaggcgggcggcactgtggtgggcttcagttttgtgatgcggctcgatggtctcgacggtctggataagctcggcggcaagcccagcagctcgctgatcgcgatgccggcctgagattccgtctcacccaacgtacagttagttttcaaggtccggcatgtactgtgtacagttatatgccggaccaattacatagtcagggaaggatcgatggatctttacgaataccaggcgcgtcagctgctcgaggaacaagacattcccaccccggacgccatctttgcccagaactcccatgaagtcgccgaagcggcggacaaaatcggctatccctgcgtaatcaaggcgcaggtcaagatcggtcatcgtggtcaggccggcggcgtcaagatcgcccataaccgcgacgaggcgattcttgaatccgagtccatcctgccgatgaccatccacgggcacaaggtttccggcgtgcttgtggccgaagccaagaacatcctgcacgaatattacgtgtccatctccgtggaccgcacctcgcgcgacttcgacgtgctggccaccgccaacggcggcaccgaagtcgaggaaatcgccaaggaacatccggaggccgtcaagcgcctgcacatcgatgcgctcggcgacttcgacctggccgctgccaccgaaatggcacagagcatcggcttctaccacgcggacgtcgatcaggccgcacagattctgctcaagatgtggcgctgcttcaaagacaacgatgccacgctcgtggaaatcaatccgctcgccaagatcggcgacccggatgacgaatccaccaagcagctgagcgccttggacgccaagatctccttggatgacaacgcctccttccgccatgatggctgggcgcgtttcgtggatctcatcgttcccgaccccttcgaacagcgcgcccgcgaacacggcctgcactacgtgcacctgcacggcgaggtcggtgtgatcggcaacggcgcaggactcgtcatgagttccctggatgccgtctccggcgctggcgaggaacagggcaccaacatcaagcccgccaacttcctggacatcggcggcggcgcctccgcagccgtcatggccgaaagcctggagatcgtactgtccgaccctcaggtcgaatccgtgttcatcaatgtctatggcggcatcacctcctgcgtggaagtcgccaacggcatcctcgaagcggtcgccaagctcggcggttccaagccgatcgtcgtgcgtttcgatggcaacgccgccgccgagggtctgcatatcctcgcttccgccaacaatccgaatatccatgtgtccgaaaccatggaaggcgcggcagccaaggccgcgcagctcgccggtgaggcgacccagtccaaggaggttcgctgatgctgttcatcgaagacggcgctcccgttatcgtccagggcatgaccggccatcagggcatgacccacacggctcgcatgctcaaggccggcaccaatatcgtcggcggcgtgaacccgcgcaaggccggcacatccgtcaccttccccggtgccaagaacggtgccgacgtggacatccccgtgttcgccacctgcggcgaagcacgtgaagccaccggcgccaaggccagcgtggtgttcgtgccgccgaagttcgccaagtccgccgtggtcgaagccgtcgaagccggcatcgaactcatcgtggtcatcactgaaggcattccggtggccgattccgcatacttcgtcgaactggcgctcaagaagggcgtgcgcatcatcggaccgaactgccccggtttcatcacgctcggcaaccctggcgtcaacttgggcatcatccccgacggcattgtcggccgcggcccgctcggactggtctccaaatccggcaccctcacctaccagctcatgggcgaactgtccgatatcggcttcaccgcatgtctcggcgccggcggcgatccgatcgtcggcacgacgctgctggaagccctgcaggcattcgaagccgaccccgacaccaaggctgtcatgatgatcggcgagatcggcggcttcgccgaacaggacgccgccgcatgggccaaggagcacatgaccaagccggttgtcgcctacatcgccggtttcaccgcccccgaaggcaagcagatgggccacgccggcgccatcgtctccggaggcaagggcaccgcccaggacaagaagaacgcgctcgaagcggcgggtatccccgtgggcaagaccccgggccaggccgctgaaatcatgcgcgacatactcgccaaggccaacatcgactgatcggttccaaccaatcgtgatgaaagccgtgattcgccaatgggtgcggggagccatagtcgccctcgcatccatggccatctatgccgttgcattaggttgctatacagcgctgatgttattggttgtctccatggaagagggcggcgacaatctcaccgtcggcacaacctcgctgacacaggccgttgtgcttctgagtgagggatcgggctctagaaccgattcgttcaccctcaccatcacgccattgatgttgaccatactgctgatatggctgatcaatgcactcaccatgcgaatcaaagcatacgggccgcatgcgtatgttgccggattgaatgtttggctcgggttgaacgaggcgttccggcaatccgtacacctaggtcttgtcgatgaccagtggctggtgttgctgaaagcagccatcgtattctcgatcggtttcctatgcgcagccgtaccggaatcagccaagatgcgagcattcagggactggactcgcaagcaggtgccggcggacatacgccactgcctgaaaatcggcgtcgtcttggccgtcgcgatactgggcatatacctggcaattggattgattaccgtcatcgtatggtcggtacgcaaccatgccgctgtcgtatcgttgttcgaattgtccgggatggaaaccggttcacgaattctcaccaccgtcgccatgctgatctggctacccaacgtcatgctctgggctgtttcctggctcttcggcggcggattcgccatcggtgatttggccagtttcacgttatggctcggccaatccaaagagcttcctgcaataccggtattcggtattctgcccgaaccggtcagcagcgaactatggcgtaccgttgccttgaacgcgcctctcgccatcgctgcgctcgtgggcctgctggctgtattcctgccgcaaggattcgcctgcagaccgttgaatatacggaatgcgtccacccgcggcccagtactggtttcgctgatctactccgccgggtcattctgcctgagcgcgatgctgatctcactggcatccacattgctgttcgctctgtccaatggatcgcttggcgatcatcgtctcgctcacattggcgtcgacgtcatggcctccaccagagtcgtcggtcattcgaccgcattgggatttaccgcggcatggctgctcgcgctgattggcacagcgctcgttttttcgataggctggttggttgggaggatcaatgattcccgcaccaccgccgcgaccccgaagaccgtcatcgtccgtcaggcgcggtccctggcgtcacaaccacaagaatccaaggaggaacaggatgacaaacacgaaccgaccgatccgtcgggcactggtctcggtctttcataaggaaggcatcgaagtactcgcggaagcgttcgtgaaggccggcaccgaagtcgtttccaccggttcgaccgccaggaagctcgccgagctgggcgtcaaggtaaccgaggtgtccgatgtcaccggattccccgaatgcctcgacggccgcgtcaagacgctgcatccgtacattcacgccggcattctggctgatatgaccaaccccgaacatgccaagcagcttgacggcttcggcatcaagccgttcgatctggtggtcgtcaacctgtacccgttcgccgacaccgtgcgctccggcgccaacgaggccgataccatcgagaagatcgacatcggcggcccctccatggtgcgtggcgcggccaagaaccacgccaccgtggccatcgtcaccgacccggccgattatgcactggtcgcctcccgcgtggccgacggcaccggcttctctctggacgagcgcaagtggcttgcagccaaggccttcgcgcacaccgccgcctatgacgccaccatcaacgagtggaccgccaagcactggcccaagccggcctctctggacgccgtcgaggtggacaaggacgatcagggcactgaagtcgattccgccaagttcccggcccagttcacccgcacctgggatcgtgcgcacaccctgcgctacggtgagaactcccaccagcaggccgccctctacattgacccgctcaaccagaccggtttcgcccacgccgagcagctcggcggcaagccgatgagctacaacaactacgtggacgcggacgccgcctggcgcaccgtatgggatatggctcccgccattgccgtggccgtagtcaagcacaacaatccgtgcggtctggccatcggcgcgaccgcggccgaggcccacaagaaggctcacgcctgcgacccgatgagcgcctacggcggtgtgatcgcctgcaactccaaggtcactcttgagatggccgaaagcgtgcgcccgattttcaccgaagtcatcgtcgcccccgactatgagccggccgcgctcgaactgctgcagaccaagaagaagaacctgcgcatcctcaaggtggccgagccaccgaagggccacgaggccatccgccagatcgatggcggcctgcttgtgcaggacaccgatctgatcaacgccgtcggcgacgatccggacgcctggaagctcgtggccggcgatgccgccgacgccgacacgctgaaggacctcgtgttcgcatggcgtgcaatccgctgcgtgaagtccaacgccatcctgctggcccacgatcaggccacggtcggcatcggcatgggccaagtcaaccgcgtggactcctgccatttggccgtcgagcgcgccaacacgctggccgatggtgccgatcgcgccaccggtgcggtcgcggcatccgatgcgttcttcccgttcgccgatggtgcccaggtgcttatcgacgcgggcgtcaaggccatcgtgcagcccggcggatccatccgcgatgaggaggtcatcgaagcggccaagaaggccggcgtgaccatgtacctcaccggcacccgccacttcttccactgatcgggactctctgaggggagcagctcagccaaaacgcacaaaggtgggattccgcctgacccgtcaacgggtccaagcggaatcccacctttgctattcgcctgctattgtggtcacgtaaccgttcgacagaaggaatcgcaacatgcacaaccatccctatgtatccgaagcgcatgagggcaagccatggtttgaatggtgcgtactcggcgtcgtcgccgtcatcacactgctggttgctttcggatatacgatggccgccacggtcatacttgccgtgacggccatcatcaccgggcttgttcgcctgattcttcaggacaaaagcccatggaaagtgcgctcagtggcgttcgactccttcatcggcatcgccttgggaatcggcctgctgattacctacttcagcttctttggactcttcggcaacatctttttccgctgaatcgccatcagacgaggcggcctgatcgaagaattcgccatcgtcgagcgtgtccgcgttcgcatcggcatccgtctgtggaagatcggcggcagccggcactttgggagtggtcatcatctgcgcgatgatcatgaccaacgccaccacagcggcggccaagaccgggctaatccagaacacccacagctgttgcagcggattttgcgtaagaccctcattcatcgcggccagtgcgataccggtggaacgggcgggattgagaccggcaccggtaaccgggtagctgatggcggcggccagaccataggcaagacccatggcaatgacatgacggtccgaggactcgccgtgatcacccagagaagacatggcggtggcaacgacaatcagagaggcaacgacctcgacgacaatcgccagcgtaatcgagaacgtaatgccatactgggtcagcagcgagtaagacacggagccgttctcgaaaccgttaacggccggagtcagccacactttggcagctacctgctcggatgtgggcagcagcttgaccacggcgaagccggcggcgatggcaccgatgacctgagcgatcacatagaggatgccatccaggattttcgtcttggaaaccagcacggaggctacggtgatggccggattcagctggccaccggacacgcgggagaagatggcggtgactgcggcatatgccaagccggtagccaacgcgaagaacacgatattgatgccatacacggccgaaccccatgtggagaaggcgtaaatggcaaagcacagcaggaagctgccggccaattcggcgcacacgcgcagggccagcggctgttgcttggtttcttccatgattgttcattccttttcatctgttggaagacgggcgaacccgtacaaacggttgccagtctagcagcagtcctacgttgcggtatgatatataggttggaattggctgggattccagtccgccaactctgaagtatgtatacaaatcgacagtctctgcgatgacagagtctgtccggccacgttgggagaacgatgccaaacgcatattcccgcgctgcgaaagcgcaagacgattccaattccattcgactccagaagctgcttgcccaagcgggattcggttcccgccgcaagtgcgaggacatgattaccgaaggccgtgtcgaggtcgacggtgaactggtcaccgagctcggaactcgcgtcgacccccataagcagcaggtgcgcgtagacggttcgcgcgtacgcgtcaatccgaaccacgtcactctggcactgaacaagccccgcaaggtgctctccgccatggacgacccgaagggccgctacacgttgcgcgacatcgtgggcgacaagtacgagcgcatcttccacatgggccgtctcgactacgattccgagggtcttatcctcatgacgaacgacggcgaactctcgcagcacgtcatgcaccccaagtacgaggtcgaaaagacctacgtcgccacactggaaggcaagatctccggcaccgtatgccgtcgactcgtgaccaccggcgtacagctcgacgacggctggatcaagctcgaccactgcgcgatcatcgactcctcacgcgaccacacgatggtcaaggtcgtgctgcactccggcaagaaccgcatcgtgcgccgtatcttcggctcaatcggcttcccggtcaagcgcttggtgcgcacccagatcggcccgatcaaactcggtgatttgaagcccggttcctaccgcgtgctgtcccagacggaagtccgttcgctgtccaaggaggttggcctgtgattcgcgttgccatcgacggccccgccggcgtgggcaagtcgtccacgtccaaggcgctggccaagtatttcggatacgcctaccttgacacgggcgcgatgtatcgtgcctgcgcttggtggtgcctgaagcagggcatcgatctggacgccgaaaccgtggatgagcgtgtcatcaccgaagcggtgggcgagttcttcaccggcgaccatttcgatatctccgtggacccggacaacccctgcgtattcgccgacgacgaggacatctccgaggccattcgttcctccgaagtctccagccatgtctccaaggtgtcgaacgtcatcccggtgcgcaacgtgctcatcgccgcccagcgcgcctacatcgcccgcgaggcgtcggccgactccttctccggggggctgggcatcgtggccgagggccgcgatatcaccaccgtggtgtccccggacgccgaggtgcgcgtgctgctgaccgcccgtgaggaggtccgtcaggcccgtcgcaccggccaggctgtcaagggcgtgggcgctgaggatgtggccgcgcgcgacaaggccgattccaaggtcaccagcttcctgaccgccgccgatggcgttaccaccatcgacaattccgatctggacttcgcccacacgctcgatctgctcatcggtgtggtcgaggacgccatcgagaaccaagaatacgagcagtatgccgccaatctcgaaggctatgagctggacgaaggcgatgaggatctgatttccggccgtggtttcacggaaggcgcgcgcaaggccggtcccaagccggtgggcgtgctggctgttgtaggccgtccgaacgtgggcaaatcatccctggtcaaccgtatcctcggccgccgtgccgccgttgtggaagacacgccgggcgttacacgagaccgtgtgagctatgacgcggaatgggccggcaccgacttcaagctggtggacacaggaggctgggaagccgacgtggaaggcattgaatccgccatcgcctcacaggcacagattgccgtgaccttggccgatgccgtggtattcgtggtcgatgggcaagtgggcatgaccaccaccgatgagcgcatcgtcaagatgctgcgtgccgccggcaagcctgtcgtgctggccgtcaacaagatcgacgaccaggccagcgaataccttgccgccgaattctggaaactcggcctcggcgaaccatactcgatttccgccatgcacggcaggggagtgggcgacctgctggacgtcgcgctcgacaagctcaagcaggccgagaagacttccggctacctcacgccttccggcctgcgccgcgtggctctggtgggccgcccgaacgtgggcaagtcgtctctgctcaatcagctggcgcgcgaagaacgtgccgtcgtcaacgatttggccggcaccacgcgcgaccccgtcgacgaaatcgtcaacatcgatggcgaggactggctgttcatcgacaccgccggcatcaagcgacgccagcacaagctcacaggcgcggaatattattcctctctgcgcacgcaggccgccatcgagcgctgtgaattggcgctgattctgtttgatgcctcgcagccggtatccgatcaggatttgaaggtcatgtccaccgccgtggatgcgggccgtgcaatcgtgctcgtattcaacaagtgggatgcgatggacgagttcgacaagcagcgtctcgaacgcctgtggaacaccgaattcgaccgtgtgatgtgggccgagcgtgtgaacctgtccgccaagaccggctggcacaccaaccgtctgacgcgagccatggataaggccttggaatcctgggatcagcgtattcctacaggcaagctcaacgccttcctcggcaagatccaggccgcccacccgcacccgttgcgtggtggcaagcagccgcgaatcctcttcgccacgcaggcgtccacgcgcccgccgcgtttcgtgatcttcgccaccggcttcctcgagcacggctaccgccgctacatcgaacgctccctgcgcgaggaattcggcttcgaaggcacgccgattcagatctccgtgaacatccgcgagaagaagaagcggaagtgacacgcgcgtaatttgccagatttcatatatctggtagattatctactcggtgcttttgcaccatcgggccgtagcgcagtttggtagcgcacttgactgggggtcaaggggtcgcgggttcaaatcccgccggcccgaccgattagccccggaattccgccacttctgagtggttgacttccggggcttttccgttttcagacaacatgagacaacatgacgacggacttacctttgtaagccattcgtaatggattaaacacggacttcatcttggcgtgttattggaattatcaccgacaattcaccgcctccgccccccgtcgtatgtgtttgccccaaacaggggctagactggttcctattgatttgatgaaagggacccgaattgaccgaaataaacgataaggcccaactggatatcgccgccgctgacgacaccgacgccgtcacctcggatatccccgaagaaaccgtaaacacccccgaagtggatgagactttcgagctttcggccgccaagatgcgcgagcacggcatgagcgaaaccgccatcaaccagttccgccatttgtatgacgtatggcgccatgaagaagcctccagctggattcgtgaggacgacatcgagccgcttggccacgtgcccagcttccacgacgtctatgagaccatcaaccacgacaaggccgtggacgccttcgccaagaccgcattcctcaagctcaatggcggtctgggcacctccatgggattggacaaggccaagtcgctgttgccggtgcgtaggcacaaggccaagcagatgcgcttcatcgacatcatcatcggtcaggtgcttaccgctcgcacccgcctggacgtcgaactgccgctgacgttcatgaattctttccgcacttcggcggacacgatgaaggcgctcaagcatcatcgcaagttcagccagcatgacgtgccgatggaaatcatccagcatcaggaacccaaactcgtggccgccaccggcgaaccggtgagctaccccatgaacccggagctggaatggtgcccgcccggccacggcgacctgttctccaccatctgggagtccggcctgcttgacgtattggaggagcgcggcttcaagtacctgttcatctccaattccgataatctcggtgcacgcccctcgcgtacgttggcccagcacttcgaaaacacaggtgccccgttcatggccgaagtggctatccgcaccaaggccgatcgcaagggaggccatatcgtgcgagacaaggccactggtcgcctgatactgcgtgaaatgagccaggtccatccggatgataaggaagcggcccaagacatcgccaagcatccttacttcaacaccaactcgatctggattcgcatcgacgctttgaaagacaagctcgccgaatgcgatggtgtgttgccgttgccggtgattcgtaacaaaaagaccgtgaatcccacggacccgaactccgaacaggtgattcagctggaaaccgccatgggtgccgcaatcggtctgttcaacggttctatctgcgtccaagtggatcgtatgcgcttccttccggtgaaaaccaccaatgatttgttcattatgcgttccgatcgcttccacctgacggacacgtatgagatggaagacggcaattacatcttcccgaacgtcgaacttgatccgcgatactacaagaacatccgcgatttcgacgaacggttcccctacgccgtgccatctttggccgcagccaactcggtttccattcagggcgactggacattcggacgtgacgtcatgatgttcgccgacgccaaacttgaagataagggtgagccgagctacgtgccgaacggcgaatacgttggcccgcaaggcatcgaaccggacgattgggtgtgatttacaacacggtcgaacgataaaaaagatattatttttgtgaaatggcgctcaactgtggaaaaagcctctaagatagagtgagtgtggggaaactcatacgcacttataacgaaacaataactatacgtgaggactaatggcagagggcacaagcggacgtcggcgtttttccgacaaatggggcaagcacgagctggacgtactggctgtgttgtcatccgcgttcccgcaatggctcacatcccgccaaattgcgcagcgcgtcaaggcttacgccgactcgtatggagagctggctgatcaggccgccaaggccgcgttcgccaagcagttccagcgtgatcgcgccaagctcgctgcgatgggcattgccatcgaatcacggcagcctgagtactcgtccaagtcggaaggccaggacttcgcgtcctatcgtctgcagttgggcgacgaaccgcgcatccgcctgatgttcgagccggaagatatgccggtgcttgccgccgccaactatctggctcgttcgatgtcgatttcttccgagccggatcagtcccagctcacccagcatgtgtcgcgcactacgccgcgtgtgccgcagaccccgattcccgggcttggcttggattcgattgcgcctggcttggggacgcagcccattccggattcactggtcaaggttattgattcgcgtcgtttcgccgccaccgttgacgtggatggcgaacacctgaacgtggcatacaccgattccgacgatttggccatgtttgtgcttgagcatccgggggccacgattgtcagcccgcaagaggctgtggacgcttatcatcgccgtttgcacgccgccagccggttcactctggccgacgaatccgccagtcctgtgagcgcttcggtggtttccccgtcgattagtcgcgatgtgcgagagccgggtgatcccgagtctatcaaggctcagaacaagaagaacggctccgctttccaaacgggcagtgaggttgatcgtcgcctgcgtctgatgctgttcctctccgctcatctgggtgaggaattctcgatgagcgagctgggcgaacgcttcatcggcaagccaaagaacgatgatgaactcaagaaattcgtcaacatcatccataaggacatcaacaccctgaccaccgtttccgacgatggtgagatggccggcagccagttcttcgatattgactggccgctgctggatgccgagggtattgtttccgccaccaattcgctgggccttgaacgtcttgccggcatttcgccgcaatacctcagcatgctcaccgcctcggtcagctacctggcgcattcgccgttgctgccggacaagcagcgtgggcaggccgaatccctgtatgagcgtttgcgccgtcatgtcagtcccggtcagaccccgtggctgagcctgaccggctatgagctggagccccgaagcttctccatcgtcaagcgtgcgatcaacaccgattcgctgttggacatggagtacaccgacggtacaggtcgtacccgccgcaagctggtggcccccgccaagatcttcattgacgaaggcgtgtattatgccgccgtctacacggacgttggttccgccgcgcccaaggacaaaaaggcctacgtctccaaagacaagaccctcgacaaggccaacggcaagccgcgcatctggcaggtactgcgattggcccgtatcgaaaaggcggaactggtcaagcccaccaagcagatcaacatcccgaacatgccggtgagcgaactgcgcaagtggagtttcgacaacggtaccgacgcggtgttcatcaccgatcagcgcgatctggcattcatcaagacattgccgggcgctaccgtcgaacaatgcggtgccggtgaaaaggtgcatctgaccgtttcctccgattcctggttcgtggccttctgcatcgcccacgcgcgtcatatcacggcggtcgccccggaaacgttgcgcaccatgatcgtggcacgcgccgaacgcgaactgagcatcagcgagaacaagtaaggagcctttcatgccttggtggatatggctgattctggccctgttcatgctggccatgattgttgccggactcatctatgcagcccttcatggactccgtgccttgaaagacatgtccgacatcggcggccaactcggtgaacgcgtggccgcgatgggggagcccggcacctctgccgacaccagcgagccgcctctgttcactcagccgctcagcgtggcacagaatcgttatgccgaggcccatgcgaacgtgattcgcggcaaggccgccaagcgcgaacgccacacccaggcatgggcccgctggaagcgattcaacaactaacggaaagcagcaatggcacgtcaccaacaccataagggcaatgccgattcccagacgctgagcccttcgcagcggtacgcatcattccaaaaggtccaacgccatcgggcgtccgcagcagcgcgattcgccgaatccctgcctttcgaactggacgacttccagaccgaagccaatgacgcgctcgaagccggcagcaacgtactggtcgcggccccaaccggtgccggcaaaaccgtagtggcggattttgccatttacctcgcccaggaacgcaacgtcaaagccttctacaccacaccgatcaaggcgttgagcaatcagaaataccatgatctggtcgacgtgtacggcccggacaaggtaggcctgctcaccggcgacacctcgatcaattccgaggcggacatcgtggtcatgaccaccgaagtgctgcgcaacatgctctacgagcgttccaccacgctgaacgcactgcgctacgtgattctcgacgaagtgcactatctggccgaccgattccgcgggcccgtgtgggaggaagtcatcatccacctgcccaagacggtcaagatcgtcggcctgtccgccaccgtgtccaacgtggaggatttctccaactggattgcctcggtgcgaggcgacacaaaactggtgatcagcgaacaccgccccgtgcctttggaacagcacgtcatcgtgcaggcggacgaacacaccgagcccgaggtgctggacctctatcgccgcgacggcaacggcgagcagaccaccaaactcaacgccgaactcatcaaccggctcgaccagttggaccgcaaggccgcacgccggcgcggcgaggaacgccccgataagcgcaagggcttcggcagaggccgcggcggcaaaggcgccaaagaccgtgccccgaaagcggaacgccacaccccgcgccgctgggccgtggtggacgagcttaacttcctgggaatgttgcccggcatctacttcatcttctcgcgcaacggctgtgaccaggccgtggaacagtgtatcaacgctggactggagctcaccaccgatgaggaagtgaccaggattcgccgcatcgtggatgagatggtggaggggcaactcactcaggaagacctgaaagccctgcagttctccaagttccgctttgcattggaagaaggcttcgcttcgcatcatgccggcatgattgccctgttccgtcagatagtcgagcgattgttcgaagaaggtctggtcaaaatggtgttcgccacggaaacactggcattgggcatcaatatgccggcccgctgcgtggtggtagagaaactcgaaaagttcgacggtaccggtcatgtgggcctgacgcccggcgaattcacgcagctcaccggtcgtgccggtcggcgcggcatcgacaccatcggccacgccatcgtggtcgaccatcacggttttgtgcccgccacggccgcctcgctgtcatccaagcgtgtctacccgctgcactcgagcttccgacccacgttcaacatggccgtgaacctgctcaactccagcgactacgagaccgcgcgcgtcaccctggaccagtcgtttgcccagtgggaggccaacgaatcggcctggcagctggaatcgcagattaacacactgaagaacgcgctggccggatacgaacaggcgttcgcatgcgaacacggcgacttcaaacagttcatgaccctgcgtatggagctgagcgacatcgaaaaggaaggccgccgcaaactgaagcacgaagtgttcctgaccgatcaggagcgttcacgcgctttccagaacctcgaccagcgcattcgcgatttgcgcaaggcggaacacgagcatccatgccgcaactgcccggacctccagcaacacctcaaatggggccaccgctgggcccgcgagactcgagaactgcagcgcgtcaccgatcgctacgactcccgcaccgggtccgtggcacgccagttcgattgcatctgcgatattctcaccgggcttggttacctcgaacgtcatgtcaatgcggccggccacattgacatgacgttgactgaaaaaggtctgctgctgcgccgcatctacagtgaacatgacctggaactgtgcgaggcgctgctcgccggcacgttcgacaagctcgacgccaacggactggccgctgtgctctcttcactggtatacgaggccagacgcgggggagacggcgaaccgaggcactacccgggcggcatctccgggcccatcgccatcgcttcgtccaagctcaagggcatttgtgaagacatcgatatcctgtgcgaggatcacggtctggacgagatgcagcggccagatttcggcattctcgacatcatgtatgaatgggcggatggcggttcgctgggatcgtgcctgtacggcaccgacatgaccggcggcgacttcgtgcgcactgccaaacgactggctgacgtgctgcagcagattgctgtcgcccagccgctgccgttcgacgggggagagcggctggcaggcctcgcccacgaagcggccgaccgggtcaatcgtggcgtggtggcctactccggcgtggactgacggggctgtttgacgggagtttgtcagccgacgtcggaagcttggaatagcggccaagtccgaactgttgcgtaaattagtagggttaaagatctttcaaggaggatgccgatatggcagaacgtagcctcaggggcatgagcatcggagcgaaatcgctggagtccgacgacaacgtcgatttcgccgcgcgaaacgatgtggcgtatgtatgcccgaagggccaccgcaccatcctgccgtttgccgagggtgccgaaatcccggacgagtgggagtgccgttgtggttccgtggcccaccgtgagggcgacgccgaccgtgagggcgacgaaatcagcaaacccacccgcacccactgggacatgctgctggaacgccgtagcgaagaggaactggccaccctgctcgaaaagcgcctgcaaatgcaccgtgacggttggattcccgactacgagtgatctcctactgaacaacacgtgaacttgatgcccagtcatcccgactgggcataatcattgttggaacaagtcgcattgtttgacgaccattcaaagcagtcgacatgaacaagggggagtggaatctcaatggcacagcatccgatgaaagtggtcctgttggatctcgacggcacgcttaccaagtccgacggcggcattatcggctccgtcatcaagaccttcgaagagatcggtcgaccggttccggacgccgccgaactgcgacgcttcatcggaccggcgattattgaatctctgcgtcgcaatcatgtgcctgcggaagatctggatcgggccgtggacatctaccgcagctactacggagaccgtgccgtgttcgacgatccgaacgagcccggcaacaaggtgcccggacgactggtgaacgtcgtattcccaggcatccgtgaacagctgctcaaactgcatgccgacggttactacctggcactggccagctgtaagcccgaataccagtgcatgcctatctgcgaccatttccacctgaccgaactgttggacggcatctatggtgcttccaaagacaattcccgtctggacaaagatcaggtgattcggtactgcttcgacaaaatcggttttgatgctgcagcgggggacagggccgtgatgatcggcgaccgctacaccgacattgacggcgcccacgcctgtaatttggacgccatcggctgccgctggggctacgctccggccggtgagatggaggaacacggcgcgtacgagatcctcgagaagcccgagcagatcgaagacgccgtaaaccgttatttccaaacgcactgaaacacaacggcgaggacttcttcatgatgggatgcgatggagcctgcgccgcgggcttcgacctggttttcatcggtttgccattgctgtcgctgtatgagattcccatgctgatatggttcatttggcgagcattccactggaaacgagatgacaaggattggctgaaaggcacggcgattcttgcaattgcggtggtcgctccggtgctcctttggctgtcggccttttggctgtcggcctggtatgcgtggactagttgatacaggcgactgaatcctcgtcaaggataactaatctgacataacgtacattatcggctaactattcgggaatcttagaaacggcttaatttcaacggtcttcatttcgcacaggtaactgtggatgcctctgggtggcccgttgtggctacgcatttggctacgcatttcacacgacgggagaccaacgatggcaatgggtggcggcggctcgacatacagaagcgccgatggaatctggcacgccgcgatagacatagagcccgacagggccaccgggcgcaggcggcggctcacggcccaaggcaagaccaaggcggtggcgaa

SEQ ID NO: 813 - DNA, 4478 bp, Unknown
  R14_18m  MAG No. k141_5947
acttggctgccagcgccaggattgatgctgactaccacagcggtgctgtcggttgggccactggcctgagccttgaggcccacggccttgagcatgagttcggcggtggcgtagtcagtgccagcggtgatattcggtacagcgaccttttccttgcccgtggacacccagatggtgatggacccgccctgcgcgatggaagagcccgaatcggggcttacgcgggtaatcagaccggcctccaccgtatcggagctttcctgctccacggtgaagctgaacttgccctcatactgctgtagcacgctgtccttcgactgaccgaccaaattgctcggtacggtggtcatgccggaagaaacatatatggtgatggtggtgcccttgggaaccgactgaccggcggcaggatcggttctcgtcaccatatccttggcgatgtcggcgctgtcttcggttttgacggtggcgttcaccttgaacccggcgctttccagaatgctgcgcgcctcttcctggctgcgctccttgacatccggaacctgagtggactgcgggcctgcggagaaccacaccttcacggcagatcccttggccaccttggagccggcgtccgggctcatcttggtgcaggtgccttccggctcggtggagtcggtgtcttgcttttcggtcatcttcaagcccaatctctcaagcttgagcttgatgttgtccttggacgtggaagcgttgcacacttcagggatggtgacggtgtcttcagaggacttgttgccggagccgttcatggcgaacatgatgcccacaatgacgagcaccgcgacaatcgccgcgatcgccgaaccgatgatgatcttcttgcgcttcttggccttggccgccgccgcacgctgctgcgcacgggactgcaatgccgctgagttggcaccattggccggtggaatctgctcgaactgaccggtcaccgggttgaatgcctgggtgggctgctgctgcggttccaccggcgtggtgggcaaatcacgttcggcttccttgcgggccttcatattcgacaggtccgtcaacgggttgaacgcggccgccaccggcacgccgccgttcatgtaggtcaggatgtcggtcttgaattcggaggccgtggcatagcggttctggcggtccttggccatggccttggcgcagatcgaatcccacatcttcggcagccccggcaccacggcggatggcggcgtggcgacttcggaaacatgctggtaggcgatggccacggcggaatcgccggtaaacggcgggcggccggtgagcatctcgtagagcacgcagccggcggaatacaggtcggaacgcatgtcgacggtctcgccgcgcgcctgctcgggagaaaggtactgtgcggtgcccaccacgccctgcgactgggtcatggtggctgcggaatcgtccagagcgcgggcgatgccgaagtccatgaccttgaccgcgccctgctcggaaatcatgatgttgccgggcttgatatcgcggtggataatgcccatgcgatgcgaatagtcgagcgcgttaagcacgcccaacatcacctgttcgcagtcgcgctggctgagtgcgccgttgaccttgatgatgtcgcgcagggtctggcccttgacgtattccatgacgatgtatggcagacgctcggcatcgccgctttcggaagaaaccagttcttctcccgaatcgtagatgttcacgatgttcgggttgttcatctgggccacggcgtgtgcttcgcggcggaaacgggccaggaagatgtcgtcgttggccagatcggcgcgcatgattttcacggccacggtacggcccagacgggtgtcaagagccacgtggacctcggccatgccgccacgaccgatgagctggccaagctggtagcgtccgccggccaatgcggtgggcatactggtgctcattgcttattccctcccaatcttgaggccggggcctccaaaacaatgcgtggcgtgctggtcactcggcgcggcagtcgattgccggacgtggccatggcggtgtcggccatttcggtctgctgatccagcagacggcgttcgatgcgtgccagcgtacgggacaccaccagcgcgtctttcgggcgatccaacgggtccttggccagcatcgacatgacaaattcgcgtaactggacgtccaccgagttcggcagcggaggcacgggattgttcacgtgcgctgcggcgatatcgaccggagtggtgccggtgaacggacgatgcccggcaaggccctcgtacgccactacgcccagtgaatagatgtccgattgcggcgtggcctgctggccctgcgcctgctcgggggagatgtattgtgcggtgcccaccaccatgccgtcctgggtgatctggccttggccggtggagtagctcacgccgaaatcggtgatcttcacttcgccggtgtcggaaaccatgatgttggccggcttgacgtcacgatgaatcacgccgtgcgagtgggccacgaataggcctcgcgcggtctgaatcagaatgggcagcagttcgatgggatccatcgcgcccttgctatggaacagatccgccaacgatttcgaggggacgtattccataatcagaaagccgatgccgtcatgctcgtagtattcgaacaacgcagcgatgttcgggtgcgccagattggcggaattatgggcttcggcacgcaggcggcgcaacttggcctcggcgttggtcacgtccgagcgcagcgccttgatggccacttcacggccgagctgaatatcgtagcctttccagacctcgcccataccgccttgcgcaagacgcgaatcaagacgatatcggcggtgaataagctgtccttcgataagtttcactgttgcaaagcctcctgcatcatcgcgcgcatgatcgggccagcggcgagcgaaccgtgtacatctgttttatgcaccaacaccgcgacggcgatttgcggattgtccgccggcgcgaaaccgatcgcccagccgtcgatggcagagttgtcgataccgatttgtgcggtaccggttttggccgccaccttgatgccgtcgatggccagctgcggattggcctcggtcaccacgctctccatcatcgtggtgagcttgtctgcggaatccttgctgaacgcgttggccatggtttgcggtttggtctgcgaaagtacggtgagatcggcggcgcgcacacgatcgaccagcgtgggctgcatcagtttgccattgttggcgattgcctgcgcgaccatcgccatctgcaacggcgtggccgtggtgtcgccttggccgatggatgccagcgcaagcttgtcgtcggtcggatcagaggggaatgtggacgcggtggccgtcatcggggtgcccgtggattcggtgccgtcaatggtgatggtgctgccgaacccgagcttggtggccatgtccgaaaccttgctcgcgccgagtttcacgccaagctgggcgaaagcggtgttggacgaccatgcgacggcctcttgcagggagatctgtccgttgacgccatcgcccggtgcctcgtcgttcggcagctgtgtggcggttcccggcaaggtatagctggagcctgcaggaatcttcgtgtccgtctgataatcgccggtttccagcgcagccaaggcgacgatggtcttgaacgtggaccctggcgggtacagctgcgaggtggcgcggttgattagcgggctattttgattttggcccgcagagagttcgttgtaggactgagacgcggctttggcgtcatgggtcgccagtttgttcggatcgtagctgggcgtgctcaccatggcgaggatacggccggtgttgacttcgatggccaccgccgcaccatcgcgcgtaccgagctgatcgtaggcaacctgctgcagcttggggtcgatggaggtttcgatggacgcgccctgattcgtagtgccggtgagcatggccttggcccgctgccagatcaatgaatcggcctcaccgttgagcagcatgctgcgggaggcttccaggccgcgatcggcggtctggttgatggagaagaagccggtgaccggagcatacagcggaccgttggaataggtgcgcaggtatttgaacgcgtcgttgaccggttcggatttggccatgaccgtgccgtccgaggccagaatggcaccgcggtaggcaccgagctggtggtacagcgaacgggcgttgcgcggatcgttgttcagcgcgttggcccgtaccgccatgatgatggtggacgacaggccgagaatcacgaacagcgcgaccacggcggtgaaaagctgacgaagatatttgttcatacgcgagtgcctccgttaacgggaggaagcgggggaatcgtaccggtaggcgtgtacggttcatcggcgccggcatacgccggagtggtggcatccacaat

SEQ ID NO: 814 - DNA, 14378 bp, Unknown
  R14_18m  MAG No. k141_6202
ccatgttggcgcatagcgtcggcactgtagtgcagggggactcgcatgtggttcgcgagttgagaaaggcctgagcctgacccttagaacctgttggttaagaccatcgtagggagcagtaaatgagcaatagtgcatcattgtttgccgatgtgtccagcggttgtaccgccgggactccggttccagccgattcacccatccgcgacaatatcgccgatgccgttcgccgcgtacgcgagacgactccgttggcccagtcattcaccaatttcgtgaccatcaatttggttgccaacgcgcaactggcggccggcggcactgcggccatgagtttcctgccggacgacgtgatcgaaaccgcgaaaatcgcgggcgcgaactacatcaacgtgggcacgctgctgccgttctataaggacgcgctgcccgaaatcgcccagcgactcaactacttggacaagccgtgggtgctcgacccggtggccgccggcatcggccgcacccgcaccgccattcttcaggccttcaaggccgctcccccgaccatgattcgcgcaaacgcctccgaggtaatcgcgctggcgaacatgtgggggctcaataccgaaaccgtggggaacgcttccgagcaccgccccgccggagtggaatccgtcgatggcgtggagtccgcaaccgttgcggcggtggcgctggcacagtatctgaccgaacagcacgccaagcattcctcccatgacgcttccacccgctgtgcagtggctgtgtccggcatcgccgatctggtgaccgacggcgaaaccgtgtaccgactgccgggcggcagcgcgatgatgaccaagatcatcggtgcaggctgctcgctgggcggcgtggctgccacatatctggcggtttccgatccgttgaccgccgctctgtccgcatctctgctgtacaaccgcgcggcagagatagccgatacgacttcgcacgggccgggctcgttccaggtcgcgttccttgacgcgctgtggaatgttaccgccgaacaggtggcggaatccgagattttggtgcagtagtttcagttccctctgatgagggagctcataacagtttttcccaataagacttccacaagaaacaacaaaggtaggaataataatgagtaatgaatacccatacgcctccatgcgagacaacttcgacttgtccgcgtacttcgtggtggggccggaggactgcaaaggccgtccgctgaccgacgtggtggatcaggctctgcgcggcggcgcaaccttcatccaactgcgcgccaaggaggccgatgcctctgagctgaccgacatggcccgcgacatcgcgcagatcatcgaggacaatgagaagtccgattccgtggcctttgtgatcgacgaccgtgccgacgtggtgtggcaggcccgccgcaagggcatcaaggtggacggtgtgcatatcggccagaccgacatggagccgcgagaagcccgcgccctgctcggcgacgaggccatcgtgggtctgtcggctgagaccgaaagcctcgttcagctcatcaacgagctgcccgacggctgcatcgactacattggcgccggccctctgcacgtctccaccaccaagcccgaggcttccgtgggcggcaacgacggctccggcaagacactggacgccgcccagatcaacaccatctgcgctgccagcgaattcccggtggtcgtgggcggcggcgtgaccgcagccgatatggccatgctcgccggcaccaaggccgccggctggttcgcggtctccgccatcgcgggtgccgagaacccggaagaggccgcgcgcaccatggtcgaaggctggaaggccgtccgcggcgacaagaagcacggctacgcgccgcgcgtcgtagcccacacccccgctgctgatactcaggctgctcaggaaggggccgcaaagcctggctccgaggccactgagaagaagttcaccaacgccaaggacgccaaggatgcccagaagctcgccaagcagcagcgcgtggacatcgccgcccgtggttccaagcagcgcgacaaggcgcacatccgcaagaccaagtccgtaccgttcacctatcagtatggttcctacgacctggaagtgccgtacaccgaaatcaagctgagcgacacgcccggcgtgggcccgaacccgccgttccacgactacaacaccgaaggccccaagtgcgacccgaaggaaggtttgaagcccctgcgtctcgactggatccgcgaccgcggcgacatcgaagactacgagggccgccgccgcaaccttgaggatgatggtaagcgcgccatcaagcgcggccgcgccaccaaggaatggcgtggacgcaagcatgagccgatgcgcgccaaggaccacccgatcacccagatgtggtacgcccgccacggcatcatcaccccggagatgcagtacgtggccacccgcgagaactgcgatgtggagctcgtgcgctccgagctggccgccggccgcgcggtgatgccctgcaacatcaaccaccccgaggccgagccgatgattatcggatccgccttcctgaccaagctcaacgccaacatgggcaactcggccgtcacctcctccatcgacgaggaagtggagaagctgacgtgggccaccaagtggggcgccgataccgtgatggacctgtccaccggtaacgacatccacaccacccgtgagtggattcttcgcaactcccccgtgccgatcggcaccgtgccgatgtaccaggccctcgaaaaggtcgaggatgatgcctccaagctgagctgggagctgttccgcgacaccgtgatcgaacagtgcgagcagggtgtggattacatgaccatccacgccggtgtgctgctgcgttacgtgccgctgaccgccaaccgcgtgaccggcatcgtctcccgcggtggctccatcatggccgactggtgcctgcgccaccaccaggagagcttcctgtacacgcacttcgacgagctgtgcgacatcttcgccaagtacgacgtggcgttctctctgggcgatggcctgcgccccggctccctggccgacgcgaacgacgccgcgcagctttccgagctcatgactctgggcgagctgaccgagcgcgcctgggccaaggacgtgcaggtgatgatcgagggcccgggccacgtgccgttcgacaccgtgcgtatgaacatcgagctggagaaggccgtgtgcaagggcgccccgttctacaccctcggaccgctgaccaccgataccgctccgggttacgaccacatcacctctgccatcggcgccaccgagatcggtcgttacggcaccgctatgctgtgctacgtgaccccgaaggaacacctcggcctgccgaacaaggatgatgtgaagcagggcgtgatcgcctacaagatcgcctgccacgccgcagacatcgccaagcaccacccgcacgcgatggatcgtgacaatgcgatttccaaggctcgcttcgagttccgttggctcgaccagttcaatctgtcctacgatccggacaccgccatcgccttccacgatgataccctgcccgccgagccggccaagatggcgcacttctgctcgatgtgcggcccgaagttctgctcgatggccatctcccagaacatccgcaaggcattcggtggcgaggccgctcagcagcaaatcgtgaaggaggctgctgctggcatcgactccgaggcactggctaaggccaaggccaatgtcgataacgacgtggtgtccgccaacgtgctcagccccgaagaaatcctcgccggcatggatgcgatgagcgaaaagtacaccgcccaaggcggcaagctctactccaccgcccaggagtaaacctctctggctcccctctctgaggggagccaattattatgcccggtggtgtcttaattcgggacgacgctcgactcgctcgaaggcggtgacgaggtcggcagcccggatcgcgccgcggcggtccttggcggccaccagagcggcctcggtccagatggcgcacacttcggcgccgctccagccttcggtccgctgtgcgatatccgccaacggcagttcgccctcgattgacagcgaacgggcctgcacctgcaaaatacccaaacggtcgcgctcagacggcatcgggaaaggaatctgccagtcgaaacggcccggacgcaacaaagcgggatccacgtcctcaatacgattggtcgcagcgaccaccacaacattgcccttggactcgaaaccatccatcaacgtcagcaactgcgccaccaagcgcttgccgacgccattggtatcgttctcgcgcgaggacgcaatcgaatcgatctcatcaaagaagatgatggcgcgcttgtccgcctgcgcggcggcgaaaatcatgcgcagcgtttcctcactatcgcccacatacttgctcacgatggtcgggccggacaccagatagaactgcgcgtccgccacattggcgatgatgcgggccagatgcgttttgccggtgcccggagcaccggtgaagatcacgcccttgatgggcttggcaccgatcgcacgcatctgcgcactgttgcccagctgcgtttcgataagctccttggcgcgcgtgatcacctgctcataaccgccgaacgaatcgaaggtaagcgacggatcgctgcccggcgtgatgcggtactgcttgatgtcgtcatcgtgatcggattcgcctgggcggatggccgtgggccacagcactcgttcgatgccgaacaggtcggtgaactgcacggtgttgccgggcatgatcgaattcgggtaatcgccttcaagcagttcgaggccgtcggaagtctccaggaccacgccttcgttgagcgcacggcgcacgatgcccacacggggcttcaacggccacacatcatgcggcactttacgatagaaatccgtgccgacgagcaacacgtcgcccacatcgaacacctcctgacgcggaaatgtgagctgtgtggtgtgcccattaggcattacgccaaaatatgcggtgcgttcatcgtcaaaaccggtgatgcgtaccaagacgccgtcacggcgcagtacatcgttatcagccatgtcccctcccgaacatttcatgaatcaatcgcaatcagcaaaccctcccatctcaccacaggagcggcaaaacatcaaggaaaaccgctccgaaaaacatcatgggccccacttagaatgaacactatggcacagattgcaacatctacacttcccgctgttctcgcgatctccggctccgactcgtccggtggtgccggcatgcaggccgatctgaagaccatgctggcttgcggcgtgttcggcatgagcgccatcaccgcgctcaccgcacagaacaccaccggcgtgcgttccattcaggacaccaaaccggacattctcgccgaccagatcaacatggtgtttgaggatattccgccggtcgcggtgaaaatcggcatggtgtctgccactgacatcatcgacgtcattgctgaacgactcaccttccatcacgccacgaacatcgtgctcgacccggttatggtggccacttccggtgccaagctcatcagtgacgatgccattgcggccttgaccggcaagctgttcccgatggctacggtcgtgactccgaacattcccgaggccgaagtactgaccgatacgctgattcgcgatcaggaggatatggaggccgccgcccaccgcatcgtggagcgttacggctgtgccgcgctggtcaagggtggtcatggcaccgaggatgccaacgatgtgcttgccgagacggatggaaccgtgacctggtttgatggcgcgcgtatcaagaatccgaacacgcacggcaccggatgcacgctgagctccgccatcgcctcgtatctggcgcttggcgacacgctgtccaaagccatcaagcatgcgaagaagtatctgaccggtgcgctgaagacccagctgaatctcggccacggctccggcccgatggatcatttctggaagtatcgctgacataagtgtggctgttaagctccccttgccaggggagcttaacactactgaaaaaggagaatcatggttcttgaccgtaatgccgttactcaggaagtgccgatcgacccggaaaccggcaaaccgtacctcaacaccgtggcagccatccaggtgtcggccaatggcgtgggctccgaggtttcaccatacgtggctcaggccgtcgaagtgattcgcgaatccgccctgccgcaggaaaccaacgccctgttcaccaacgtggaaggcaatctggacgacgtgctcaaggtggccggtgaggccgccaagaagctcgccgagcagggctaccgcacttctctggtgctgcacatggatatccgtcccggcttcaccggccagctgaccgaaaagcccaagctggtggatgagatcctcgccgacaagcaggcgaaatagcaaagcatcgcttccaccagcaagggcatgctttgttattacacgtttcatggggcggtaactcacccatagggcggtaaatatctcatggggcggtaaaaccctcatggggcggtaggcgaaaacggctctattctgcggaaaggcaaaatccgctaaccgccccatgggccaaataccgccccatgagtgttttaccgccccatgggaatcacggttctgccttctttcaacggggtaagagcgtaagtggggcatatataggagcgttacaaactctgttatcgttcacaatgtgaccgcaacgcggcgtgccacaagatcgaacctatagttaagccccatgtagtgagctatctcacaacgattggctcgctacgtggaattcaagacttggactgcaaacgtcgttcatcccacacaatgggagggcgaacggaacacgcagtccaatcaagagttcgctcgccgcaacatcattgagcagttgcacgcgggcaggtttgcaagaagagggctcaaatatgactgctgctgaacagcagatttccggcaatcccgcggctatggaaagcgcacaagcacgtaccaccgtgacggatcaagccaaggttcaggatattatctcgcgcgtggatcgcgcacatgaaaccccgatgttccatcgcatcgtggcgctggtcgccgctggcatgctgatggacagcatcgacgtatatattggcagcgccgttgcctccagcgcgttggccacacactggtccaccgttgcacaaaattccacctttatgtccgcaggcttcctgggtctgctggtcggttcgctgctggccggcttcgtcggtgacctgaagggccgccgcgtggcttaccaaatcaacctgctgctgtttggcggcttcaccttcctcggcgcattcgccccgaacatggccgtgctgtccctgtgccgtctgggtgccggcctgggcctcggcgctgaaatcgtcaccggcttcgccatggtcaacgagttcgcaccgatgaaccgccgtggccactggtgcgcgattgtctcgctcgtggccaactgcggtgtgccgatcgctatgctgctgtgtgcatggatcatcccccgctggtcctggcgtccgctgttcgtggccatcggtctgggggccgccatcatctggtggctgcgccgcgacatccccgaatccccgcgttggctcgccgtgcacggccgttacgatgaggccgacgccatcgtcaagcagcttgaggccaacggctccgaactgatcgacgcagccgccaaggccgacaccagcgacacccgcaacgccggcggccgttcgctcggcatctgcctgcttgtagctgtggttgctgtggccgccacgaacgtgtgctcctacgccttcacttcttgggttccgacgattctggtcaagcgtggtattaacctgtccagctcgctgctcacctccacggcgatgatgctcggtgccccggtcggctgcctgattggctctctgcttatcgaccgcatcggccgcaagcgcacgattgtgccggccttcctgttcactggcgtgttcggtttaatgtatgccttccagacctctaccgtgagcgcaattatcgttggcttcctgctcatgatgtgcctgtacgtgcttatggcttccgtggtggctgtgtacgctccggaactgttcgccaccaaggttcgcttccgttgcgtcggcttcgcgaacgccgtggccaagctgctcaatgtgttgatgcctatggtggtgggttggatgcttacctcgcttggtgccacgtccatctttgtggccatcagcgcaattgctattgcatcgatgctgattgtcggcttctttggcgcggagactgcgcagaagtcggttgggtgatcggtttcctcacagtggaataactgctgataatgtccattcggcgtcttgcgtggtgatatgcagggcgccgttttgttgttctagtaattgtcggtaacggttgagaccggtaccggtggataggtccgcactgccatccgcatccgaatccgatgacgtgcgggccgtgtcgatgcaggcgatgcggacggtgtccagtccgatgccaatcgtcattacatagcccgcttccgggtcggcatgtttggcgatgttgccgtacagttcctccagcagcccggcgatcaggccactccgaccggctgcgccatgagcaccggaaataatcgtctgaccttcaaagccaagctctgataatcggcggtcaccattgctcgcaacatcacgaatttgctcggctagcgggcaatcagcgtctgtgatgccacatgcaatgccagaagcggcatcaacggtcgaatcatgcggagtcactgcactgtgcgccgcttctcccctgccttcaataacatcaatgacctgatgcgtgcgatccaatgcgcccatagccacgctacgcagttcgcgtaattcttcttcagaaggggtcttgccatcggcaatatccttgtcgaatcgcaaaatcaggtatgccaaatcattggatacgtaatcgtgaatgtcctgagctgtgcgttcctgctgacggcggtgagccaactccgctcgagccaagctgcgttcgtgattccatcgcgccgccatgccaccaagcatgaagccaataaacaacacggccactggcatcacaccatagagggcaatcgcaccaagaatcacttgcccagtgcgatgctcggcagaagaaccgctcgattcataggcgcttccggtgaagtcgcttcccgactgccctgcgctgtcagacccactggatgaagagccaccatcagcagcgccaccatcagcaacactaccgtttagggcactactactcgccgcgccatccgcagaaccgctcatcgtgtctgagccgccatcaagccaaggaatggccacgccaccacgcgacaacatccacaccacaacggcaatgccggcaaccgccagcgccaatcgcttatcggcgtatccggcaatacccaccgccaataacacggcgagcattgcacccgacggcatccagatcggactcatgcacaacactatccaagccaccgctaccgccacgcatccggtgaccggacgaaacgccatccaccccacaatggcaacgaatatgaactccgcaaggcagtccgccgccgagacactgtcagcagccaagcccgccatggtttccatcgtgcatatcaaggcaacaaccagtatggcaatcaacagccatgcattgcgaacaccgctatccagctcggccaatcggtgtcgtaacgctttcatagcagttcctttcctaccatccatgccgttgcacataccgcccatgccaactcttaaatctcatgccgtttcacgcagattgatatggcatgagcgcgactgcgagcgccgagtttggcgagtgcgcggcgttcaaaagtcgccacagtggccacgctgatgcccaatcgctcggcgatttccttggtggtcgacccatccgcatacatacgcagggtgtcgcgttctttgccggaaagcgcgccacggtgcgcgtatgacgtatcttcgagcaccgcgtaggcggttgcggcatccatgaaggacagcgaattaccgctcccctcatctcccagtaccagctcattggtcgacaatccttgggctgcattgcgaatagcgagcgcaatgccgttcaaatcggttttaccaaccaaggcctgcgccccgcagcgagccgcctcgtcgtgaaatgacgcgagcgcgtatgaggtgacacccaccagcccaacctcgggtgttttggtacgaatcgcacgacagacttcggtaccgggcacgtcgcccatagacatatccgtaaccagcacgtcaggccgcttggtggggctcaggcatcggctgatggccacggcacccaaatcgcaggtccatatcacggcaaaatcgctggacatgcgctcgattagcgcgccgaacactttcagcgcatacgggtcattgtccacaatgccgatgcgtatgttgcggttgcgcgcttctcccattacattcaccccttcagtgtgcccgacgccgaactgctccgtcctgacatgtcatggtcactatgacaactatcattccacatttcctgcgcgatttacgatggaatcatcatcaatccttgacaaggcggtaaaggaggactgcaatgaaccgtgcacaagcactcagcaagctcaacaggagcgatatgcgcaatgccgccgccgagcgcgggacgcaacgaatattcgcgtggaaccgcgcgcattggattggcatggttgtactgatagcggtgttgttgctgctgcagtggagctcatcaatgtatctcatgcccgacgaggtccttgacagggctgccaaaaacctgttcgtatggttccccggtatggttctgcactggccattggtgttgggaatcaccaacctgatactcggttcgatacgatccggcagtctgtctttcccattggcgagcgcaatcatcggaccgctggcattcggctgtaccaatcttcgcttacggccggggttcccataccgttcctgggctcagtggtggaagctaatgcacgctgaaagcggccatcagctattggttcattcgttgatcggctcggccatgctgttgatctgttatacggccgttgcgttcatctgctatgcaatcggacgctacggtctgcgcgaattgtttgtggatccgaatccgcagacggcgagcggacgactgctcacatggattcgtcaggatgcgattcgcttcggctgctggctggcgacggcaatcatgtacggcttgctattggcgctgaccttacggggcggcatggctgcgatggccgccgcgttgctaatcaattttgtgattccgcccgccttgctggtcatcaacggcatctacgcgctacgcccggcctcactgacgtatccgtggaaaagcctgctgttcccgttggcgtgcacactggtacctgcgccgatgctcatggcgctcatcacggtgtatgaagacacgtgcccgataggaagtacctgcacgctgatcggcgaccgatacctctcctggggctcgatggatcaggtcttgcatttcgtcatcgtgttcgccgtggcgagcttcctcggattcggcgtggtgtgggccgtgcggtggattgtggctcgtcgcacaaaataagagagaccaaaatatactggaatcaggggcttcgtgcaatgatgcacgagccgatccaagcaaaggggctgaccatgagcgagaaactgatggaacagtaccggttgcgcaaacaacgcaaacgccgtaacgcttgtatcgccgccatcgtgacagtagtgcttgtccttgccgtcgccggcggcgtatggtggacggccggcgatggcagcgcactggttcgcaatatgttcaagccgaaggccacgcctgccacacagccggtagtcgacagcaccgcagccttcgcctaccgcaccgcaccggaattcctggcgatgggagccggcgaccgagacaccggtaatgtgaactactcccctgcttcgatgtggatggcgttggccatcgccgcgcagggcgccaatggcacgacccgctcgcaactgaatgagctgctgggctccggttcgctggccgacagcgactaccaatcgctgctgagttcggtcaacgggcaatattcgggggcgaaatccgagatgagcgccgcgaactcgctgtggatcgataacgactactctcttgccagcgattaccaatccaccgtcaagaagatattcgaggccgaagtcaccacgctaccgttcgacgatcaggccgccgccaagatgtccgattggattgccaaacatacgaatggttcgctcaagccgaagatcacgctgcgtgaccgtgaagtcctatccatcatcaacaccgtctatgcggatggccgctggaaggatccgttcgaagagcagtccaccggcgacggcaccttccacggcgaagccggagatgctcaggtgccgatgatgcaccggaccttcagccaaatgacttacagccatgatgagtacaacacttggcagcgggtggagattccattcgacaacagcggcaatctggccatcgtgctgccggccaaagggcatttcgacgagctggccggcaatgccgagaaactcggatgggcgttcggcacgtgttcgtcggcatcccctggcgaggacgcaatgggttgcaccgcggacagtttgcccggatggggcgtctccgtcaactcggccacggtgaacgtctcgctgccacgattcaccgtcgacagcatgttcgactcggaagccaccatcaaggcattcgaaaaactgggggtgaccgatgcgttcagtgcaggcgacgccgacttcaccaagatggtcgacaccgattcgcacggcgagaatctgtatatcggttcgattctgcaaggcacgcgcatcgaggtgaacgaggccggcgccaaggccatgtccttcaccaaagccggcgcagacttcactagcgcgccggtggacaacatcgagttcacggtggatcgcccattcctgtattcgtacgtcaccccggacggcataccattattcatcggtgcggtgcgcaacctcggcggagtcggtggagaacactgatactttcccgacagtccgtcaattagggtgtatcgtttgacgcatggctacgatgaaggaaatcgcgaacaaggcgggggtttccgtctctacggtgtcgctggtgctcaacggacgcgacgaggggcgcgtaaagtccgaaattgcggacaatgtgcgcgccatcgccaccaagctcggctaccggtcgaatccgctggccagttcgctgcgtacaggcaagacgcacatcctcggtttcatcagtgaggaggtggccaccaccccgtacgccggcggtatgattctgggcgcgcagaccgccgcaagccagttcggctatatgctcatcaccgtgagcaccgacggtgagaacagcgagagcgaggaaatcgccgcactcaagcgatacggcaccgacggtttcctgtacgccaagatgtcgaaccgcatcacccatgcgccttcttcgctggccaagacgccactggtgttggtggatgccaccgactcgcttggcaaaatcccgagcgtggaaccggacgagttccgaatcggctacgacgccaccaccagattggttaaggccggatgcgcacgtatcgcctatgtgggttgctcggaaccgatgattgcgcaggatggtcgtttggaaggctatcaggcggcgctcagggacgcctgcctcgactatgacgatcgtctggtcgtcaatgtgctcaataacgggccggcactgaccgcagtcagcgatttgttcgacgccgagcatccggacggattcttctgcttcaacgatgcccgcgcctggtatgtgtacgaatgcgccgcacgccgaggactcacggtcggcaaggacatctccgtgatcggcgtggacaaccatcgcgtgttcgccgaaacgctggaaccgatgctcaccactgtggaactgccgcatttcgagatgggctactgggccgtggccaagctggtgtcaatcatcgaaggacgctcgatggacgacgtctcacggccagcgaccaccgctcccctgccgccgatcgacgcgccgattccggcgaagatccactgcacgctgatcgaaaaggcctcggtgaagtaaccgaggcccacacgatttctcaaggcctccgtccagcacggaggcctttttgcatgtcgaac

SEQ ID NO: 815 - DNA, 19722 bp, Unknown
  R14_18m  MAG No. k141_6204
cgcatcgacggccgtggcctgcgcgacatccgcaccctgtccgccgaggtggacattgtgcctcgcgtgcacggttccgccctgttccagcgtggcgagacccagattctgggcgtcaccaccctgaacatgctcaagatggagcagcagatcgacgcgctgtccggtccgcagtccaagcgctacatgcacaactacgagatgccgccgtactccactggtgagaccggccgcgtcggctccccgaagcgccgcgaaatcggccacggcgccctcgccgagaaggctctcgtgccggtgctgccgagccgtgaagagttcccctacgccatccgccaggtctccgaggccatcggttccaacggttccacttcgatgggttccgtgtgcgcctccacgctgagccttttggctgccggcgtgccgctgaaggccccggttgccggcatcgccatgggcctcgtgtccggcgacgttgatggcaagcacatcttcaagaccctcaccgatatcctgggtgccgaggatgccttcggcgacatggacttcaaggtggccggtacttccgagttcatcactgccctgcagctcgacaccaagctcgacggcatccccgccgacatcctggccgccgctttgcagcaggccaaggaagcccgcgccacgattctcgaggtcattaacgagtgcatcgacggcccggctgagatgagcgagttcgctccgcgcatcatcaccaccaccgtcccggtcgagaagatcggcgaagtcatcgggccgaagggcaagatgatcaaccagattcaggaagataccggcgctgaaatcgccatcgaggatgacggtaccgtcttcatctcctccgagggtggcgaggccgctaagaaggccaagtccatcatcgattccatcgccaacccgcacgtgcccgaggccggcgaaacctacaacggcaaggtcgtcaagaccacgtcgttcggcgctttcgtgaacctcacccccggcaccgacggcctgctgcacatctcccagatccgcaacctggccaacggcgagcgtattgacgccgtcgaagacgtgctcaaggaaggcgacaccgttgaggtgatcgttcagggtgtcgatgatcgcggcaagatctccctggccatcccgggttgcgaggatcaggagaacaacgcccgaccgagccgtggcgatcgcgatgaccgccgtggcggccgtggccgtggtgaccgtgacgatcgccgtggcggccgtggccgtcgctccgatcgcgatgaccgtgacttcgacgatcgtgacgaccgtccgcgtcgccgtcgctccgatgacttcgaggatgattacgacgaccgtccgcgtcgccgtcgctccgatgaccgtgacttcgatcgcgaggatcgcgatgatgatcgtccgcgtcgccgtcgttctgccgaccgtgacttcgacgatcgcgatgaccgtgatgctcgcgactcccgtgatgatgatcgtccgcgtcgccgtcgctcttccgatcgcgatgaccgtggcgatcgtgatgaccgccgtggcggtttccgtggcggccgtggccgtggctcggaccgcaacccgcgctacgccaccgacgacaactacgacgactaccgcgccgaccgcgaagagcgcactgagcgcccgcgtcgccgcgtccgtcgcgactttgatccgttcgaggactaaagccctctcacggatcggtcgcggcatagccgcccccctcgcctacgggaagcccgcagggcttcccgcttaacggttcggcattcgaggactgatcgttctctagcttctctcgggtgagaagagcttaatcgcaaaccaaaaggcttctataccgtttcattcggtatagaagccttttggtttttcggcttcttcgcgctacatatttcgatgttgaatagggcactcgtgctgctgccatgtacattcagttgtcagttgacaactattctcatgcatcaagaatggcggaaaacagccattaagatgattggagccacgctaaaaagcgttgacaactgacaacagtttgtacacggcaccgcatggcacctatcctgttgctcacgaccggatctattctctcgtctgttgttatgcccaatagcaaaatccgcttgccgtgccgcgccatgtccgagtcatggccagccgttgattgaatggcggatgatcatcgaaggtactcatgggtgttgatcactgtggcaacaacaaaggccgggcccttgtgagagcccggcctttatgccgtatggcggcggattaatccttaaaggctaatccgttgtcaatcagcgttacagaatcgccatgcacacgaagtccagaatgaacagcgcggccacaatccagatgatcgggtgaacctccttggccttgcccttgcaggtcttcacgatgcagtacatgatgaagccgccggcgatgccgtaggagatggagtaggagaaggccatgaacacggctgcgaagaacgccgggatggcttcggcgatgtcgtcccacttgacttccttcagggaagcggccatcatgcagccgacgatcaccagcacgccggcggttgcggcggacggcacggcggagacgaccggggccaggaacgcggacagggcgaagcagatcgccacaaccacggaggtcaggccggtgcggccgcctgcggcgatgccggcggaagactcgacgtaggtggtggtgttcgaggtgccgcagatagcgccaatggaggtggcgatagagtcggcgaacagggccttgtccatcttggaggagaagccgtggccgttctccagagccttctcatcctcggcggagaagatgccggtgcgacggccggtgccgatgaaagtgcccagggtgtcgaacgtatcggacatggagaaggcgaagatggtcacgatgaccagaggcagcttggagacgtcggagaacagcgccgggaagccctcagcggagaagatcgcgccgaaggtctgcggcagctgggagaaggtttcgctgatggactgcgagttggaccaggtggtaacgccgaacgggatgccgatcacggtggtgatggcgatggccagcagcatgccgcccttaaccttcatcacggtgaacacaatggccagtacgaggccgatcaggaagacccatagcaccttgtcgttgaagtcggccagactcggggtcgccgccacggcgcctcccttggctgcggctttcgggtcgccgggggtgaacttgatcagtccgacgttcagcatgcccacataggccacgaacaggccgatgccgccgccgatggcgtgttgcagggactccgggatggccatgatgatcatcttgcggatcttggtgacggtgatgaggatgttgatcaggccgcacaggaacaccatgcacatggtctgctgccagctgaagccgaggccgaagcacacggtgtaggtgaagaacgcgttgaggcccatgccggcggcctgggcgtacggcacattggcgaacaggcccatgaccagggtgccgatgatggccgcgatgatggtggccaggaacacgccgccccacggcatacccgtctgcgacaggatctgcgggttgacgacgatgatgtaggccatcgcgaagaacgtggtcaggccggccagaatctcagtcgagacggtcgtgccgttttccttcaaatggaagaacttctccatttactctctacttccttggttttatgcggggctgcgcaccgcgcgcataatgctgcggctggccccggcgagaattgcgactcgccctgatcggcctgcccaacgcgcgtcaggcgctgcgcatccaatcagaaccgtggccgattatagcttgtggaggtaacgtgaacgggtccgggagtagactgactgccagaataattcggaacaactcagggacacgcagggcacacccgtggaaggaaggcgcgcgatgaaaccggccgtcgaagtcagcatcacctcttggaagaagaatgtcgtcaagcccggtcaggagtacggccgcgtactgctgatgcctggcaccggctacaactgcgaccgtccgctgctctactggtcggcccaggctctggtcgaggccggctggcgaatcgaccgcatgaacgtacgcaacgcttccgacgacctgtccacggtgattccggtcctcaatcaggcgattgacggctggatggccgccgcgcgcgagtccggcgcgggtaaagccggtgattccggggatggcgttgccgccgatgattctgctaccgtgctggccgatggcgcagctggctcgccgaaccgtgattccgacaccccgtccggccctcgcctgttgctgatcggcaagtcgctgacgacgatgacctacccacatgtggcctcacactacggtctgccgttcgtgctgctgaccccggtgctgcatcacgccgacttcgatccatccgcccgggtgattccggtgccggctgtcggcgatgatatcgtcgccgaatccgaggctccgagcgtggccgaagcaagggcgatcatccgcgcagaactgtccgaccagtcgcacgccgccagctcccgatactccggcccggcaccgctgatctgcgccggcaccgccgacccgttctacgatcgagcccgcgccaacgcgctcaccccgcacgtgcacgaatacccggatgccaaccattcgatcgaggtgcccggccactggcgtcgctcgctcgactatctgaaggaagtcaccgcgtccgtagcccagtacgccgccacgttgtaatgccttgcgacacgcccgaattctgcaatgtcgctgaccatccgtaatctaatcatccgtaaaccacagaccgttggttgaagtgcgcgcgagtgcatttccgaagtttggttcgccaagccagcgcaggttgagagatataagcccgtcaagggccggcgaaggtcacttcgcgagattatattgctctgcctgtgcgcagggcttttttgttgcccggccgaaagttccgaactccaagtcaacggccgacttaggaaggaacgccatgaagaggcccgaaaaggaagcggtagtcgctcagcttacggaagaattccgtaacgctgacgccgtctacctgaccgagtaccgcgggcttaccgttccgcagatttccgatctgcgtgaaaagctaggccgcgatacttcctacaccgtggcaaagaacacgctggcacgcatcgccgccaaggaagcgggcatcgagggtctcgacgagattctctccggcccgaccgccatcaccttcgtgaagggcgacttcatcgaggctgcgaaggtcatccgtgacttcgccaaggacaacaaggctcttgtcatcaagggtgccgccgctgacggcactgtctacgatgccgagggcgccaagaagctggcagacctcaagtcccgcccgcagctgcttgccgaattcgccggcgacgtcaaggcatcgatggccaaggccgcgtacctgttcaacgccctgcctaccaaggctgtgcgtacgatcgacgccctgcgcgagaagcaggagaaggctgcctgatttacgccctcacggcatgaatcagtcgcttcgataatttaaacaataaggtttattaggcagcggatctaccacttcgtccgccgccaagattgaaaggaagccataatggctaagtacaccaacgatgagctgctggaagccttcggcgagatgaccctggtcgagctctccgagttcgtgaaggccttcgaggagaagttcgacgtcgaggctgccgctccggttgccgctgttgccgctgttgctggcgctgctgctccggctgaggaagagaaggatgagttcgacgtcatcctctccgccgtcggcgacaagaagatccaggtcatcaaggctgtccgcgccatcacctccctcggcctggccgaggccaaggctctcgtcgacggcgctccgaaggccgtcctcgagaaggccaagaaggaagatgccgagaaggccaaggctcagctggaagaggctggtgcctccgtcgagctcaagtgatttgtgcggcataagccgtaatcacagcttttcgaggaaccccgcacctgtgtttcaggctgcggggtttccgcatactgagtagactagttgacgagggcgaggcggagaacgcgatccggcgtggaatcacaaagctggcaatgagcgaaagttgtcaattctgtgcccagtaatccgccaaaagccggtaaaagatgacacaatggcacgtagtgtggtcaaatagtgtgtccaggaaggcggtcacggtgagcgagtggacggtgaagatcaacggtgtcgaccggatcagcgtcaagccgggggagtgcgtggaaatcggccgtaagccgttacgcccccttgccgatgatggcaacacccgccttgacgtcgccgatcagaccaaatcgatgtccaaacggcacgccatgttcacggtaaaaagcaatggtacggcttcggtccgcgatcttggatcgaccaatggatcgtatgtggtgcgggaaaatggtgatttgttgcgcttgccggccaatgtcgagttcctgttgccgacgtctcccatgcgcatgcagttcggtgatgtgcctgcggacttcattcgtatcgacgatccagtggcaaagccactcgaccttaaggtgcctgatttgtttggctatgcggttcacgaagcaccgcaggagccggatgcggcggatatgtctgtcgacgatattcttgatttgcgggccggcgagccgaccgccatcttcagcgcggataatgttcgacgcaaggtcgacgagcttgaacttggctcgctgaatatcacgcagccagtgacgaaaaacgatgagccggccataccccgtgacctgttcgcggatgcgttggcccagcatgccgagcaggagaccgaacgcaaaaaccagcaggccatggactccgtggtactgccgaagcagcagaccgaacctgagtcgacgactgtaacgcccgcatccaagcacagcaggatctccggtattgtcccggtagatgccatcgcccatgccgttgttaagcacgctcccagcacaagcgagccggcagtggcgtcggcggcggttgttgaatccgatgtggtggctggcgcaagcaagtcagccgaaaacgttcagtccgctccgaataccgacgattctcagccggtggacgctgttgcacagcattctgaaggcactcagtccgaagccgcccagtctgaaaacactcagtctgagaccgcccagccgacaaccacccagcctgaaaccgctcaaccggcaaccgacgcacccgaggatcagcagctggcgaccgaaaccgaaaccgcccagcagtcggtctccgaagcgtatgaagcgtctgatatctactccacgggcgtacacactccggtcttcgagcccggctcggtgttcgagcgtgtggccaagggcgagctgaaagcacaggagccggcagtcgaagtcgatggcctgacctctgacgaggcaaaaaccacgcaagatttcaacgttcagttcgaagtcgcccgtcatcccgaattactggcgttcctcgccatgaatccgtacctgtacgacgacatgtattcttggctcgccgcccgtggcgaggccgatattgacgaagccctgtctcacaacaagggctatcaggaataccgcgaagcggttggaaagtgagtcgagagatgacccagagccagactcagaaccagaatctcacggaaggtctgaatcgcatccgtcgctggcgtgaccaataccgcagcatgcagccgccatcgccgctcgaggatgtgaatcaactggccgcgaagctggagatgacccatgcccatccctccggcatcgcccagctgttcgcttccggccatgttcggttggattcgttgttccgtgacacgggtgtgcttaaggccgccgaacgccatatcgggcgcgtactggatgaccaggccgccaagcgcaggatttccggcgtggcggagttgtcgctcgtggttggtgtggccacgtggaggggcaacgcgctgccggtgctgttgtacccggtgagcgtcacgatcgaggatgatggcttgtcgaccaccattcgattcaccggtcgcgtgaccctgaacgccgcgttcgtcaatgcattgcgtgagcagggggtgttcctggatgaggattccctgtttgacggtgccagctatgacagtggcactcccgaaacttccgcgatgttcgcccgtatttcgtccgaagcatcggagcgtatctccggcttcgccatcgagcgccagattgtgctcggatgcttcatggacccctcgtcgcagatgatcagcgaaagccgacagttcatcgaccagctggagaatggccccaccggcaatgtgctgttggacgcgcttgccggcgacaaatccgcccgcaccgcgctcaaagatgccaatattccgcaatacagtcctttcgacgtagacccgcatgctgagtacgaagtcggcgatgtggacaatacggtgcgatatgccgcgtcacttgctgccaatggccatagcatcgtggtcgacggcaccttcccgaagggcaccgcggagcaggctgtggccatcgcatcgcgctgcctgatgaatggtcgttccgtgctgtacgtgcccggcgtggccgagcagaagcgtctgttcatccagacggcctccgccaatgagatgaaggcgcaggtactggatgtatccgatgaacacgccaacgccgcgcttgataagcagctgattgccgcagtcggattccagcccggagtcgccacccagcgattcgaccagctggccgacgaactcgtgggcgtgcgctcgcgcttgacccgctatctgggcgacctgcacgggagcaacgataagtggaatgtgtccgcatacgagaccattcagaacctggcccgtatctccgtgctcccgacacaccccgccacccacgttcgacttgacgagtcaagtgccctgagcatcgccaacgatattgacacatggatcagcaagatggaacgtgccggcgagctcggcgaatacaccatcggcccggaagacaccgcatggtacaaggcgtccatcaccactgaagaacaagcggtaaccgcttaccagcgcgtggacgatttgctgcgtcgcttcctgcccgccacccgtgagcaggtggcacgcaccgtgcagacctgcggattcccggttcctcccaccactcgcgagtgggagcgtcaggttacggttttgaagaatctgcgacgagtgcttgacgtgttccagccagagattttcgagcgagacatcagctccatgatcgaggccaccaagccgaagagccagcgcaaggccgagggcacgtcgatgggattctgggagcgccgccgccacgtcaaggaagccaaggatctgctgcgcgtcggcgcgcaggtcgaggacttgcacgaagcgttgaaggtagtcgccaagcaaggggagcagtggcatcagttcgtgcctcacggcggttggccggtgctgcccagcaagctcgacgagatcatttccacccaagaggcgttggtcagcaatatgaccgcgctggataccgtgctttccaccacacccgctggtggcaatctggaaaccgccgatttcgagaaggtggaagcacgcctgaaagcactgctggatgatcgcaaggcactggacaccttgccggagcgttgcctgctggagcaggaattcgcttctgccggtctgaacgagttggtcgccgatctcaacgctcgccgggtgggcgtggagcaggtgcgtggcgaagtgcagctggcatggtggaccaccgtgttcgaggacattgtgcgttcttccgccatcatctccaaccaggatggtgccgcgctgcagaccgcatccgaccgcttcgcacaggtcgatgtggagcacgtgcgctccatcggaccgatggtgtcgcaggaatccatgcgccgcctgtgcgacatgctgttctcccgcactcaggaagccaaccagatgcacaccgtgctggcagggcgcgccagtgtgtcgctgagcaggattcgccgtgatcatccggagattctggccgcggccaagccgattctggtggcctcgccgggtacgctcgccgcactcaccgagccgggtgtgctggctgatgtggcgattctcgatgcgtgcgcgcacattcccgctatcgagttgctgtccatcatcggccgcgtgcagcaggtggtggtgatcgcccactgcgcgacggtaaccagcgaaagcgtcaagcagctgatcgacacgttgcctcatatcgaggtggatgctgccccgtctcgccgtgcgccgcgcctgtccgcattccttgaatccgagggatatggtcctgttcgctatgatgtggccaccgagccggctgccggtgaggtgcgattccaccgtgtggaagcgagcggtgtgccggttatgtcttctggtctggtggaatccagccagtcggagattgatgaagtggtgcgtctgattacgcaacgtgccgccggttttgctgtggttccttccagctatcgacttgtggtcgtgatgttgaccgacgcattccgcacacgcttgggtgccgaattgaaatcgttggcaggcaaatccaaggcgatgggccgattcctgcgccatgtgcggctggtttccttgcgtgacgtggccggaggtcgtgccactgacgtgattctgacgatgtgctatgcgaaaaccacgcacggacgtctgcttcagcagttcggcccgctcgaaagcacaggcggtcgcggactgttgctggatgccctggcattggcggaccacagcttggatattgtgtcggcctttggttccgaagatttggatgaagaacgactgcaccagtccggtcctcggttcctgaagaccatgttgacgtgggccgaacagcttgacgaccgtccggtgcttccgttgcgtggtgcggcaggcggcaacgtgctgttcgacgatatcgccgacaggttgcgcgcgcgaggactgaacgctgctgttgattatggattcgacaagggcgtgaagattccgctcgtggtgggattgaaggacaagccgtttgccttggccgtgcagaccgatgacgcgaactttatgtccgtgcaatccacgcgcaggcgtcatcgtttgtcggcacaggatctcatttccttgggctggaatgtgatgaccgtctggagtgtcgccgccttcgtgaaccccgataaggaagtcgaccgtatcgtcagccgtatcggcgagatctaccgcgaggttgaataatcatggcggaatactcggctacacggcgcacaccgcgcaagcacaagcgcgtggtgatgaaaggcactgagcagtttgacgctgacggcgtcaaactcgagcccggagacatgcagaccgaccaacaacggcaatccgacgacgacaaacgcatcctcggcgaactgcctccacactgggctgttttcaacgagcgcgagtaggagttgaggcgcactctgtgcgctctgatgttgtgttttccgcagccgtacggctgcggaaaacacaacatcggccgaaggccgattccgcttcctaccgcacaacggccataatcgctccggcctgttgcagctccataaccttggccgcggcctccggcggcatcgcgaacgacaccagtcggtcgttgcttcccaatgcgccagtcgtatccggtttgtcgacattcatcaccgtggcgttctcggccagcgtgcaatcggcaccttcgcaaccgacggcggaaaccagtctcacctgatcgccggccaatacatcgtcgacgctactggccaagcggacttcaatcaccgtagtgccggtcggtgctacgggcgcatctctggccatatgcgtggaaatgggatcggctgcttcgatatcgatttgcgccaccttgcccaccacatcctcaatattgcacgcccaagatgggcctatcgcagataccggcatatcagccaactgaacgtcggcggccagaataatgtcaccccgtcgaatcgagcgagcggccaccaccatcggctcggtctccaccacggccaatacggcttcaagcccaaacaacactgcgagtcccacgcacaacgcagcagtgagtcggcgcaaggcatccgccatgcgccgtcgccgcaatgagccgcgcgcaggcggcttaataaacgaaaaggtcaccatgcaaccatggtgacctgaagtttttcgtaagcgcaagctgaatcgacctatgtggttctagcttgccaagttatccacaacgcttcaaacccgtgcaacagacagtgcccgtagtgccaatatccgcggcataccgccgtcgacaccgtcgtttacagaggaaaaacggggagccgaccttacttgccggatttgtcggtgcggtagaatccgtgacccttgaactcaatcggcacggcggaatacaccttgcgcacctgctcctgcgagcacttggggcacacggtaatcgggtcgtcattgaacgactgctgttcggtgaagtcatagccgcagttcttgcaacggtaatgataggtaggcaacggattcctccaacaaagtcatatttctcgcgcatggcgtgcaacaccatgccgtgcaaccgttcatatcctagtcgccgccctgacacattggcgttacggtcttactggccagcctgcttttgccactctggttccatcggccagtgtgcgtggctggttggtcagtctggcttgcgccgagtatcttggccggccggtcaactcagccggcccgattcgccaagccgccggtatccccccggcgtcagcactccgtcggccggcacatcatgtggttcggccggcaaatcggtgtccaacacctcccacggccagcacaccgcaatcagggggcacgcgggcttgcgtcgagccaaggcccggtcataccagccggctccacgccccagacgattgccttgcgggtccactgccaaagccggggcgatgaccagatcggccttctccaacgcttcgggcggtagaactgcgccagttggctcatcgggtctgtgatggacggtgctgggagagctgcagctaccggcattgttcgcgccacccactgcatccatcgagcgcaaggattccaatgaatccagcacactccagccaatttccaacccagatcccaatcgtggcaccaacacgtggcagccatgagccaacagccatcgcaacagtggccgggtttcgatttccgaacccatcgacacatatgccgccactgtggaaccatcctgaatcatgtgtgccgggaaccgtcgcaccagcaattcaccggccgctccacgttcttccgctggaatgcgcttgcgccgagacagtatatggtggcgcagcgtcgctttatccatcttttctgttttctccgtgccgctggggtcgctgccgatattcatgccattgtccgcttcgctcataccgcacaatctagtgtttccaccgtaaaacgaaagtggccgaggcgaaggcgcaagcccttcatatggctacaataaaggccgtgtcagttttccagtcgattaaagaggcgttcaagctggaccaccagatccgtccgccgcgcctcacccatcccggtttcccgataatcctgcgccccctgaccatggacgatgaggacggctggaacgaagtgcgctggcgcaacaacgactggctggcgccttgggaatccggcgacccgatgcatggcggctccatcaccttcaatcaatgggtgcagcgacagcgccggaatgagcagcatggcgtcggcgtgattttcgccatcgaataccagatgcgtatcgtcggccagatttcgttgggagccatcgcgtatggtgccatgcgcaccggtgtggtcggatattgggttgaccaacggtacgccggccacggatttgcgccgatggcactggccatgcttgccgattgggcactcggagacccattcgggcccgcgttgcatcggctggaaatcgccattcttccggataacgcgcgctctttggctgtagtgcgtaaggtcggagcccatcatgagggactgcgcgagcggtatatgtatgtcaatggccagtggcgcgaccacgtaacatttgcgctattggctgaagatatggggcaagggttctctgccagactcgccaccaccggttccagataagcgtcgaccggaagaattccgctccgacacgcccggacggaaagccccagttcgtcggtacgtctcctatccttgactctatgggttatgagtcactgagcactgtcgtcgtgctggtgattgtggcgattattatcgttgtatggctgcccgtacgtacggccaacggcatgaaacgtgtggacgagcaccggcaggatcgttattcgccttccctgcatatcgttgatgcagagaacggcagacgattcggagacatcaagccgcataaggcgaaaggggcagcaatgccagcatcaacaccgtcagcgaggctgacacctgagcacatcgcccatgtgcgggaactgcgccgcgcggccatccgccgccggcagattctcgccgtatgcctgcttgccataaccgtgttggtgtttgccgtatcgttccccctgcatttcagcccgctgcttgctcttattccgttcgtgctgttactgctggtgctggtgctgggagccaatgcctcacgccaggcccggcaatgggagcgcaaggtggtccgctacgagcggactcatagcggtacgggctggtccaagaaaccgtctgccgagtccaaggacagcaagcgtgtgaacaaggccgaaccggttgcggccgtaactgcgcctgccaaggagctttccgagcatgttgaggatgctgccaccgaggtcatggaacagcggcagattcgccgcgcgttacgcgatgccgagattgagcaggccaaggccaaggcgttgcgtcagtccgccgccgcatatcaggccgcggcggagcacaccaaacagtctgagaagtctgatactgcacagtccgccgccgataagcctgccgccgaaccgtctgctatggtcgatgaatccgctgaccgtaagtccgctgccgaaaccagtgaatcttccgccgcgcccgatgcctccgctcgcacggataagtcgactaagtcggataagtccgtcgcccctcgagttgaaccatcgcttacggtgcgtgacgagcgtgatgagcgcgacgatgccgctgccgacgctacgtcggaactggccagcgtacgccctgcccgagcactggatgtcttcgatatggccacctcgcaggatctcatctccttcactttgggcggggaacataacgccgacaacgctccggaaagcttggagatcaagtcgacccgtcaggtgtccaaggcggaacctgtcgaacccgcagtggcggaaaagttgattgacgaggcccgagccgtcaaggccgcggacgatgccaaggccgccgatgcgggcaaggctgtcagtgccggaaacgctgtagacactgagtcggagcagcgcgatgatgccgatacgaacgccgctacggacgccgatgacgaggctgcaaacgccgcccagcgagccgcattccacgaatccgaggagcgtgccgacgtcgaagcgccagcggcgaccaccgattcgttgggcgcaggcctggactccattcttgcccgccgcggcaactgagcgttgcgattcgccgattttctctcacagcgttagcactcgagttggcagagtgctaataatcgcgctacgatgtgtcctagcgcaaagggacaacgcaagtgatcgtcagcctcttgaggcgttctggcgcggcattatcgaactacaagtagatacgaggtgacccacagtgtcgattaagctcacaccgttggaagacaagatcatcgtcaagcaggccgaggcccagacccagaccgcttccggtctgtatattccggacaacgccaaggagaagccgcagcagggtgaagtcctggccgttggcccgggccgtcgtgacgacaagggcgagcgcatcccgatggatgtcaaggtcggcgacaaggtgttgtactccaagtacggcggcaccgaagtccactacgagggtgaggactacctcatcgtcggcgcgcgcgacattctcgccatcctcggctgattagtcgcctagcgaacttcatcaaccccgactgttcccacgaacagtcggggttttctcttgtcaggcggaaaggggctcccctcagagaggggagccgaaaaccgctcccgccaaacgcccagccatgcctgctatgcataaaggtgcatgcgcgcaacgtagttgagttcggcgttgcaccgcatctacactgggtaacggattggggtccctatggaagaggctcagtcggcgacttggccgagcggcttaagacattttgcacaagacggcagtaggtcgacggtatgttgttttttccgtgtcgcaggttcgtggtgtcgtcgctgtgccaatggttgtctctctaccgacgctgagtgccgtggcatgaggccagcgtcggcagtgggccacgaaatggcgatgtgccgatgctgagccgcgttggcgtcgttatagggccagtttttggaccattgccgacggcaaatcggcgttttgtgtcggcgacggtccaaaaactggcggtctgccgacgataagtgccgtcatcgtcggcagaccgccaggtattgtccctgtgccgacgtaagaagccctgccatcgtcgtcaccgagccatcttgtgactcactgacggcggcagcagggcggaagaggccgaaatcatgcgcgcggtgcggtctcacacctcgaatccggcctccaccagcgcgtgatcgatgtcgcgcatcaaatcgtccgtatcctccagacctacggccagacggaagaagccgcggtggaactcaggcgggtacaggtactggcgctcgtcatcctcaccgaggaacacgatcatcgattagtcatggccgagcgagagggcagacgtaatcacattgagcttggaaacgaatcggttgtgcccgtcgtggtcggtgtcgaggccgaacgacagcacgccgccgaacccggagtccgggcgggccagctggctggccgccacctcgtggtgcgggtgcgattccagaccggggtacgccacgaaacgcaccacatccagcgattcgaggtgcttggcaatcgccaaggccgaggcgtcgtagggcagcgcgtaggtgttcgccagcgtgatggggcgacggatcgcgccggtttcggcgtcgaccccgttgccgaggtgaatggccagcgtgccgaatccgagcggctggtcgtcgaatgattgtccgtgatgtacaggatcagaagccatgcgcccagcatgccggcatgcgctgtgccgccgcaaacaggcgacaccgctcgaaaaccgcgccattgcaaggttctggaacaccatataagaaaaatgattggtagaagtgcggggtgcggccttggtcggggctgtttgcagggccgaagcggaccctgaaaccacgctgtgagacacgccgataaaaccgcagaattccgcggtaaaacaaggttcgcgtagaggtcgatttgcgtacttggaaaatatgtggttatatagccaagttgcctgttgaggtcaaacaccgcggcgggaaacagactggcggatttcccaagcggtcaaagggagctgactgtaaatcagccgcttcgtgcttcagtggttcgaatccactatccgccacgccccgatagctcagtggtagagcacttccttggtaaggaagaggtcgtgagtccaattctcactcggggctctctggcggggtagctcagctggctagagcgtacgactcataatcgtaaggtcaagagttcgagcctcttcctcgctacaaatcgcgcccgctaaccggtgggcgcgcactatacctaagaacacagaggtgaatgacaatggctaagagcgccgacatccgtccgggcatcacgctggcctgcaccgagtgcaaggagcgtaactacattacgactaagaaccgtcgtaatacgcccgaccgtcttgagctcaagaagttctgcccgcgctgcggcaagcagaccgtgcaccgcgagactcgttgatcgcaagcatcacagctttacaaaacccggcccattcggccgggtttttgcgtattgactccaaagtcgagtggtagggtgcggaatcagtatccgcatcgcgtgagaaacggcagaaatcccgcgtctgaacgaacccctcgcgggcgttctgccgtttcagccgatgattgccccgatatcgcacctgcgccactaagataggaagtcatgacaagctttgcagacatcaccaccatgggcgtgggcggccccatcgcccatttcatcgagccgaccacgcgcgtggggctcatcgaagccgtggaggatgccgattccaaaggcctgcccttggtcgttatcggtggcggctccaacctgcttgtttccgataagccttttgacggcgtggtggttcgagacgcccgacgcctcatcactgtgccggacgaggctgcaccggtagagggcgaggatcgcaccgtgcatgtcaatgccgaggccggtgccaattgggatgatttcgtggccttcaccgtagagctcgggctcgagggcgtcgagggactgtccggcattcccggcacagtcggcgcttccgtggtgcagaacatcggtgcctacggacaggaagtcgccacttcggtcgaatcggtggaagtctgggatcgagacaccaaaacaacgcgcgacctcacacccgccgatcttcgattcggctatcgatactccgcactgaaggccagcatgtacgccggtcccggccggccggccgaccgattcttcccgacgccacgttacgtggtgctctccgtcacctttgccctgacccactcggccgaaggcacggtaggttacggacagcttgccaaagcgcttggcgtcgaagtgggcgaccgtatggccaccgccgacatccgcaaagccgtgctcgcagtacgtgccgccaagggcatgcttgaggatcccactcgctacgccttgcccgacatggccaccgccaagcgcgaggccaatatcctgaccgatctggagcgtctggcctccctcaatgaggccgccggcgttcccgttggcgatgacggcctgcctgctcccgactacaatcgccacagctgcggctcgttctttatgaatccgattctgaccgccggccaagcggcggccctgcccgaagatgcgccgaagttcgacgcgactctgcctgacggcactcccggcaccaagacgtccgccgcctggctcatcgaccatgccggctgccataagggatataaggtcgatgcgtacgcgccggccagtctatccacgcagcacacgctggccttgaccaatcgtgggggagcgagcgcggccgatatcgcagctttggcgcgtgcggttcagcaggcggtcaagagcgcgttcggagtggacttggtgcccgaac

SEQ ID NO: 816 - DNA, 4659 bp, Unknown
  R14_18m  MAG No. k141_6213
aaccgtgtcggacttgatgaccacgccgagggcaacgtgcttgaccttgccgtccttgatgatttcgtcggccacacgcttgacgaggttggacgggatggcgaagccgatgccgatcgaacccgcggagtcggatgaggtggcggtcgaggcgatggacgagttgatgccgatcacctggccggccgcgttgaaggtcgggccacccgagttaccggggttgatggccgcgtcgatctggacggcgttggtgacgatctcgttgttgttgtcgtcggtcacggtcaccgggcggttcagggcggagacgataccggtggtggcggtgtcgtcgtagccgagcgggttgccgatggccatcacgttctcgccgacggcgagcttgtcggaatcggcgaatttcacggccttgaggtcgctcggcgggttgtcgagcttgatgaccgcaagatcggtggtggtgtcggtgccgacgagcgtggcggaatacatgttgccgttggcaagcgtcacctgaatctgctgggcaccggagatcacgtggttgttggtgatgatgtggccttcggtgtcgatgatggcgccggagcccttggcggtgccgttgctcaacgcggtctggatggagaccacggagccggagacatcgctggcgacagtctgccagtcgggggcttcgccgctcttggcggtggcggacccggagccggacttattcgagctgacgttggacagcgaattgctggtcggcaaggtgatcaggccgctggtgagggcgccgtaaccgaggcccaggcagagggccgcagccagaacggcggcgaccacggcgatgaggatgttgctcgccgtcttggacatgccctgcttggcggggccgggctgaccgggctgtcccggctgggccgggccttgaccgttcggcgtaccggtaccgggagtgccgaaaccgaacagaccgccctgctggggctgctggccattccggccattctgaccggactggctggcaaacgggttgccgttgttctgctgcggctgcgtgggcggattgaacggattgccgttgccctgcggctgcgggttattggtgtagtagggattgcggttgccctgctggccctgtggggtttgctgtgcaggctgaccgaacgggaattgctgcgtgggctgggcattgctgccggcctggccgccctgctggccctgtgcctgagtcggggtcggaccataagcgccatattccggggccggacgatacagcggagttgtggccgaggtctggcctgcggccggtgctgccggagaagccggcgaggaggagaccaccgtgctctcgcccttggcggaggcgtagtccgggatgggctcggtggcggcagtgtcggtagcggcttgtgtaggctgctgatcggcagcgagggcggccgaggaaaccggggcttgctgctcgctggaatcgctggcgttgccggcatcaaccgagtcgccacccacaaacgggttcttcggctcggcgttgccggtatcggcagtactattggggttttcgttattccgcggggtctggtcgacgccctgcgggttaaattcgtcagccattgctgctccttttcctaaattcctatcacgtctgttcggcggctattcgggcacttgcccattgccacttctcgtgtgctacctcagtagtaaaggcagtcaatctggaggttttctgaacgttgattgaaagtctatgcgtaatcatcgcagagtcttatgggcatctcggcttcgaggggctgatttcctgtttcgggaacatctacttgcacttcaaggggctgttcgcgcggtcaattccgagtatcaagggccctcatttaacgccattccgccatttttgcagccggcctacttgaccgggagccccttgaagcggaagtagacgttcgggagcggcgaaatccgcccctcgaaaccgagttcttcacaatttccggcccttttctggcccttctgcctaaagtgaacatatgacgatcagccttcttgaacatccgttgggcgcacagcccggacagcccggcgaccgcagcgccttccatttcgaaacgatcacccgcctgccatccacggccagcgggcttgggcgagacggtgcccgatacggccgcaccggcatcattcacacgccccacggcgatattcgcacgcctgccttcgtgccggtgggcacgcaagccgcgatgaaggccgtgttgcccgagcagatgaaggatctaggcgcacagtgcctgctggccaacgccttccacctgttcgagcgcccgggcgaggacgtgctggacgcggccggcggcttggcgcgtttcatgaactgggatgggcccacgttcaccgattctggcggtttccaagtgatgtcgctgggcgtcggcttcaagaagacgctggcaatggacgtgaccggcatgaagtcggacgacatcatcgccaagggcaaggagcgcatggcctgggtggatgaggacggcgtgacgttcaagtcgcctttgaatggtgacgcacatcgtttctccgctgagatttcgatgggcatccagcacaaaatcggcgcagacatcatgttcgcgttcgacgaactcaccacgctgatgaacacccgctcctaccaggaggactcggtggagcgcaccttccgctgggcccgccgatgcgtggacgagcaccagcggctgacggctgagcggctgggcaagccctatcaggcgctgtatggcgtggtgcagggcgcgaattacgaggatctacgccggcgcgcggcctcgcagatcgcctcgctggacttcgacggcgtgggaatcggcggcgcaatcgagaagcgcatcattggagacacctgcgcgtggatctgcgacgcgatgccggagaaccgcccgcgccatgtgctgggcatcgcctccgtggacgatatcttcgcgtgcgtggagaacggcggcgacaccttcgactgcgtggcccccgcgcgctgcgcccgcaacggcgcgatctacacgcgcgccggccggtacaacatcaagcgcgcccagcataagttcgatttcgggccgctggaggagggatgcgactgctacacatgccagcattattcgcgcgcgtacgtcgaccacctgctgcgcgcccgcgagttcaacgggtttacgttggccacgatccacaacgagcatttcttcgtgaagctgctagacgacatccgcgcctcgatcgacggcggatactttgatgagttccgcgacgaagcgctggcccacttctacggcaacggcgagcgccggccagggttgtgagtttttctccttcgttgcggcttgtgccgaacttctctctgctcccctcgctgaggctgagacgttaagcaaacagcccagtgggctgtttgtagtcgaaggtgagacgatagtcgaaccagcaggttgcaggcaaggcccgtccttaattgcggacgagctgtcacgaagtgactgaggggagtgccgccaccctcaaagatcacggcgcccgcaggagacccacaagcgatatatccctgcctcccatgcgacacgccgaagattgcatgattacccagccgggtgtaagttagtcgattgtctgcgagtgtggcggaatggtagacgcgctgtcttcaggtggcagtgagtgtatgctcgtgggggttcaactccccccactcgcaccagcaactaaagggctggaatcggaaggttccagcccttttgctttgtccgggcaagcgccgtttttcaggggggctttaggacttgaggcttatggcccaactttcgtggcggaaaatgtcccggtacctgcatcaatcgtttgacgttcaagccaggccagaatccgctgtcccggttcgcgatttcgggcgatctttgcaaaccgggacaatttttgttgccccggtataaatgtcaatcgatttatgcgaaaaccgggacaacgtgccaattccagaatcggccttattccgccgattccgtctgccagacgatatgagttgaggaaaccggagtgtcccggttcacgaaaacaagccgaaatcgccgaccgggacagcggattctgccccggtcgacaggtcaaacgattgacatatgaaccgggacaaatacagatcagagagaagcccatgaagcagatttaactttcctcaactttccatccgccataaactagcattacataacatcatgaaccgagacgaaaccaacgaagtatctggagtcaccgacgaccagctcggccgaacggccgagccgtacgaatccggcaactggcggggcggcgtcgggagcatcattcgcagcaatccgaaatcaggaaccgacacaagtcggacccagcagacacgcataatacgagttcacagactcggcgatgtattccgcaaccgcaccaccgaataccacaccacggaagaactgtaagcattacgaaatcaaccttgattattgcgcgggcctatactaagttacggtagcgtaggttagtggtcgggagagcgtcgccggccatagcgaggtgatcagtatgagcgtttccatcagcacgccatctggacgaaccatggcttccgccgcaacagttgcgccttccgcaaccgcgagtcaa

SEQ ID NO: 817 - DNA, 21398 bp, Unknown
  R14_18m  MAG No. k141_6281
acggacacatcgcccacggccatgccgaggcccagcgaggccatggcattgtctccgccgccggggccgatgatgcagccgccttcaacgtccttgccggcaatggcggggtcggccttgacggcggctgcctcacgcgggcccagcacggtgggcagcacaatggcgtcggcgtgggccttggcggcttcctcgccctcggcgggggtcagcaccatggcgatgagatcgcggcggtactcgtcatgcgcggcatcgtagtaaatggtgccggaagcgtcggaacggtcggtgaacagggcttcgagatgagcgtcctcgccctcggccaccgggccatagccggcgatacgccagctcagccaatcgtgcggcaggcagacggcggcaatcttcttggcgttctcaggctcgttctcggccacccacgccaccttggtcagtgtgtaggaagcgacgggggaggatccgacggccttgacccagcgctgcttgccgcgggcggtcacgtcgtccggttcgtcgccctcggccggagttgcaccgagcttgtcgatcagggcggcggcctgcggggcggaactggtgtcattccagagcatcgcatcgcgaatcacgttgccctgcttgtcgagaatgaccatgccatgctgctggccgccaaccgcgagggccgcgacatcgtcaagcccgccggcctgctcggcggccttggtgaaggcctcccaccagaattccgggttgaccgaggtgccatccgggtgcttggcctgcccgaaccgaacctgttcgccggtggcggcgtccgtaatgcggacctttgttgattgagttgacgtatctacgccggcaaccagtactctcgtcatgcattcctcctcgatgagggtcgcgcttgcaagtttcggcgcgccacaaccaataagttagacgattaaactatactgtattgcagtgtatgattgcaaacggaaacacgcgaaggtgcgtatctggttcaatcgtttgacgcacaatatcattgtgcgatagacggatgtgagcgcctgtgcggcgttcgagactaggggtgcaaggaggtaggagcctatggcaagtctacgcaggatcaatcaggaggatctgcgcaaccataatttgtcggtggttctcgacactttgttgcgcgcggagaaacccatgagcagggccgacttggccaaggaaacgggcctgaccaaggccacgctttcgctgttggcctcgatgctgatcgatagtggcgtggtgcaggaaggcgagccggtcgtctccaccacatatgggcggcccagcacgccgctggagattcatggcgggtccatcgccggcatcggcctgcagatcaacaccgatggctacggttgcctggcactcgatctgaacggcgacactctcggtcaggagtgggtgagtgaggatatgaccggcactgacccgtacgagatcttcgccaagctcgatgcgatgaccttcccgttggaaagccgactcaaacgacgtggctgcaaagtggtgggagccgggcttgcgctgccgggcatcgtcaccgacgacatgtggctgttggtggcccgcaatctgggttgggaaaacgtcaacctcacccggttcaacgtggtacgccggctggatgtggtggccggtaacgaagcgaagatggccgccatcgctcagattccggggtatgccaccgaacgtgcgtccttcctgaatgtggtggatcgcacggattcctttatttacctgtctaccgatatcggcatcggcggcgcggtggtgcgtgacggcgaagtggtgatgggctcgcacggattcgccggcgagatcggccatctgtccgtggcgatggatgggccgttgtgcagctgcgggcgccacgggtgccttgaggcgtttgcgggccgtcgcgccttggtcgaggctgccggcattgccgaagatggggatgccaccagcagcgaggccatcgatacattcctccagcgttggcgtgcgggggatccagacgtggccaaagtggtcgatcaggccgctgatgcgctggtttccgccatcgcttccgccgtgaatctggtggatgtcgatacggtgctgttgggcggactgtggacgcacttcggcgacgagctggccaccgtgcttgaaggccggctgcgttcggaaattctgggatacccgaatgtgaagatccgcgtgttcgtgccgccggtggcgctgcatccctcgctatatggcgcggccgaaatgggcttgcgacggttcatcgagaacccgttggggtacatgggggagaagtagcgccgggagatgctgcttgttgtgctggcgggtgcatggcatgggcgcatggtgcgtgtgccggcgttggtgggttcatgctacactttgcaagttggctgttttacgcagcgaacgtggggccgtagctcagtcggttagagcatgcgactcataatcgcccggtccagggttcaagcccctgcggccccactcttttgcgtcgcctcctgcggcggcacagcgcgtcttcacgtccagataggcgcgtacaatcccttaggttccggttcacgtcctgccataggggcatgacgacccgggtcccccgaatccataggagacgtaaaatgcagcagggtatccatcctgattaccaccccgttgaggtgacgtgctcgtgcggcaacaccttcgtgacccgcaccgctggcaaggaagatcacatgttcgttgacgtgtgctctcagtgccacccgttctacaccggcaagcagaagattcttgacaccggtggccgcgttgctcgcttcgagaagcgctacggcaagaagagcaagtagcatacttcacgccagtccgattcgattcggcatgctccggcatacccgatcgaggactggcgtttttgtattctttgacatttttttgacctgcacaaccgaatagacaccaccgtacgaaagaaagcgtgttatggcagacgaacagttcccggcggcggcaaccgcgcttgaggagtaccagtccatcgaagaacagatggcgagccccgaagtcgtgtccaacccggacaagctgcgcaagctgggccgtcgtcacgccgaactgggtgccatcgtgggcgcctacaaaacctggttgcaggtgaaggacgatctggcagccgctcaggagatggccggcgaggacgccgacttcgccgaggaagccaagcgtcttgaagccgaactgcccgacgccgaggagaagttgcgtaccgcgctgatcccgcgtgacccggatgatgcacgcgacaccatcatggaaatcaaggctggcaccggcggcgaagaagccgcactgttcgccggcgacctgctgcgcatgtacacccgttacgccgagaagcgtggctggagcgtgaacgtacagtccgagaacaccaccgagctcggcggcgtcaaggacgtgcagattgccatccgcgccaagggcacgcccgctcccgaagacggcgtgtgggcttcgatgaagtacgagggcggcgtacaccgtgtgcagcgcatccccgtcaccgaatcgcagggccgtatccagacttccgccgccggcgtcattgtgttccccgaagccgacgaggatgacgacgagatcgagatcgatccgaaagacctgaaaatcgacatcttcatgagctccggccccggcggccagtccgtgaacaccacgtattccgccgtgcgcatgacccacctgcccaccggcatcacagtgaacatgcaggatgagaagtcgcagatccagaaccgcgccgccgcgctgcgtgtgctgaagtctcgcctgctggccatgaaacatgagcaagaggccgccgaagccgccgacatgcgtcactcgcaggtgcgttcgcttgaccgctccgaacgtattcgcacgtacaacttcccggaaaaccgtatcgtcgatcatcgcacgaattacaaggcctacaaccttgacgccgtgctcgatggcgacctgcaggccgtcatcgattccgacatccaagccgacgaagccgaccgtctggccaaccagcagtgatagccgacctgattcgtcaagccgccgcgcagttgcgcgaagccggcatcgagacgcccgaacatgatgccaaactgttgctggccgaggccgtggacgccgagctacgcgatatcgacaaggccatgctgatgggggagggcctcgattcgctggcccccgccggcgggggctgtcgcgcagcgactgggggtggtcaggccgaccccgtcaccaatatccttgccgccttccacgccatgctttcccgacgcgccaaacgcgagccgctccaatacatcaccggccacacgcctttccgctacctcgacctgcaggtgggccccggcgtctttatcccgcgcccggaaaccgaaaccgtagtccaggccggtcttgactggctgacccggcacagcatgatccacccgcgcatggtcgacctgtgcgccggttccggtgccatcggcctgtcgatagtcagcgaagtgcccggcagccaagtatgggccgtcgaattatccccgcgtaccgccgaatggacccggcgcaatctggcggtaaccgcgaaacgatacccctccatcgcctccaattaccaactggaagtcgccgacgccacgtcactggccacgctggcgcaactcgacggcaccatcgacatcgtcatcaccaacccgccctacgtgccacaaaccgacatccccgaacaaccagaagtacgcgactgggacccggaactggcgctatacggcggttcggcagacggcacgctcatccctgaacgcattattgagcgcgcctggcgcctgctcaagcccggcggcgtattggttatggagcatgatctcacccaaggcgagcgattagtggcctatgccaaggccacaggtttcgccaccgcctccaccggcaaagattggaccggccgagaccgctatctcttcgccgagaagtagccacaggcgcggggccgccgctgctactgcgcgtaatactgcagggcggaggcgtccgcgtccgtgatttcgcgaatcggacgggccggattgcccacggccacggtgtgcggcggaatatcgcgcgtcaccaccgagccggcaccgatcacgcaaccctcgccaatcgtcaccgggcaacaatccagcacagtgaagttgaagttggcgaacacgcgctcgctggcgcgcggcatacgcagttcgacgggaggcatggtggtggattcagcattgattccgctcattgaacactcctgtaatttcgcgaaagagcatggatgaactcattgtatctacggtctgtgcgtatggggcgaatcggaaaacagcagtacggcaaacgagcgatgatgaactatgcaagtcggggcgcaatggtgcaatggtagattgtgaatacacaggcgaacggaggtgtcgtgagcgtggagggcggaacaacgctgaaagtcacggatgaatcgctggcacaagcggcgcgtgtcatccgggatggtggattggtcgtcattccaacggatacggtatatggagtggcgtgcgatccgtgtaataaggccgccatcgaccgtatctaccggctcaagcgtcgcccgcgctataaggcgttgcaggtactgctcgcatccaccgaccagcttgatgaactcggtctcgacctgccgtctccactgaatcgtttgtcggcggcgttcctgcccggcgcgttctcgccgattgccgtagcccggcccgactgcacgttggagactttggccgacaccgccgatggtcgccccggcacgcagggcatccgcatccccaattcggcgctgtgcctcgcgattctcaaggccactggtccgctggccgcgtccagcgccaaccgttccggcgacgaaagcgcacagactgtccaggaggcggttgacgcgttcggcaacgaagtcgacctgtatctggacggcggtcccacccaaggccatgtctccagcaccgtcgtcaaagccgatccgtatgcgcgcgacggcatcgagatcctgcgtgaaggcgtcatcgcccaaaacgtgattcgcaaggccctccacctcaacggcgggggactcggcgcatgagaatctacctactgattgccgccatcgccggtggcgtcacctggctggtgactccgctgattcgccacgtcgccatcgaaatcggtgcggttggcgaggtgcgtgcccgagacgtgcacaccattcccacgccgcgcatgggcggccttggcatgcttatcggttttgccgtggctaccgtattcgccagtcggctgccttttctctcgggattgttcaacggcaattaccagatgtgggtgattcttgccggcggcatcatgatcagtctgctgggcatggccgatgacctgtgggatctcgattggatgctgaaactcgccggccagctgctgatttccgtattcgtggcttgggacggattgcagatcatctcactgcctttgggcggttcgctgattaccgcctcgccgagtctgtccatggcgatcaccgcattcctgatcgtcgcctcgatcaacgcggtcaatttcgttgatggcctcgatggtctggcggccggtatcgtggcgattggtggcatagcgttcgccgcctattcgtatatcatcgcccggtcttccccgagttatgcttcgttggccacgctgatcgacgtgatgatggtgggtatctgcgtgggcttcctgctgcataattggcatcccgccaaactgttcatgggtgattccggttcgatgctgcttggctatctcatcacctgcgcttcgattgtgatgaccggacgtcttgacccggcctcgattcatgccagcatctatctgccggtgttcatgccgattctgttgccggttctggtgttgttcctgcctgtgctcgacatgtgtctggcgattgtgcggcgtttggccaaaggccagtcgcccatgcatccggaccgtatgcacctgcaccatcgcatgctgaagatcgggcattcggtgcgtggcgccgtgctgatcctgtggggatgggccgcgttgatcgcattcggttcgctaacgattctgttcttcaaagcgcagcacgtggccgtgggcatggccatcgctgtggtggtgctgaccatagccacgatgtacccctatctgcggcatcgtattcccgagatccaagccgagaacctgacgttcgaatccgcacgtaaaaacgcgcagcatacagtgcctaaatcgcagtctgcagtaggggagagccgggattcgattggctctcaggcagcggattcgatgactgattcgcctgcaaattcgcgggactcgcaggtgggtgaggtgcaggacccggcagcggataagtgagcgctcacaagcgtgtgtcgtgaaggtcagcgcattttcatatagtgtttacatggctacaaaccttgatgaattaaacgcccagtcggcgtatgctccccttcccccgattttcgccaagctcggccttgcctatgacgatgtgttgctgttgccgaacgagacggatgtcattccctccgaagtggacaccagcactcatctgactcgcaagatcgtgatgaaggccccggtcctctccgctgccatggataccgtgaccgagtccgagatggccatcgccatggctcgtaacggtggcatcggtgtgttgcaccgcaatctgtccatcgacgaccaggccgctcaggtcgatgtggtcaagcgttccgagtccggtatgatcaccgacccgctgaccgtcaaccccgaggtcacgctggccgacctcgacaagctgtgcggcaagttccacatctccggtctgccggttgtggacaaggacaacaagctcgtcggcatcatcaccaaccgtgatatgcgcttcatcgcctccgaggattacgacaccctgaaggttaaggatgtcatgaccaaggagaacctggtcactggcccgtccaacatctccaaggacgacgctcaccgtctactcgctcagcacaaggttgagaagctgccgctcgttgacgaggaaggccacctgaccggcctgatcaccgtcaaggacttcgtcaagaccgagcagtacccggacgccaccaaggatgagcagggtcgtctgcgcgtggccgccggcgtcggcttcctcggcgacgcctggcagcgtgcctccgctctgatggaggctggcgtggacgtgctcgtggtcgacaccgccaacggtgaggctcgtctggcactcgacatgatttcccgcctgaagcacgactccgccttcgacggcgtgcagatcatcggcggcaacgtcggcacccgctccggtgctcaggccatgattgaggctggcgcggacgccgtcaaggtcggtattggccccggctccatctgcaccacccgtatcgttgccggtgtcggtgtcccgcagctcaccgccgtgtacgaggccgcccaggcctgccgtgccgctggcgtgccctgcatcgccgacggtggcatccactactccggtgacatcgccaaggccctcgtggccggcgcctcctccgtgatgctcggcggcacgctcgccggctgtgaggaagccccgggcgagaaggtgctcctgcacggcaagcagtacaagctgtaccgtggcatgggctccctcggcgccatggccccgcgcggcaagaagtcctactccaaggaccgctacttccaggccgacgtgacctccagcgacaaggtcgtgccggaaggcgtggaaggcgaagtgccgtaccgcggcccgctgaacgccgtgctctaccagatgctcggtggcctgcaccagtccatgttctacatcggcgcccacaacatcgccgagatgccggagcgtggcaagttcatccgcatcaccgatgccggtctgcgcgaatcgcacccgcacgatatcgtgatgaccgccgaagccccgaactactccggcttccacaacaactgatcggttgatgcccgctagcttgcgctagttaggggttgattccttgtgaaaagggtctgcttatgcaggcccttttcgcgtatgtggctcgagatagcttgtatgcgctggggtatagtctgaactgttctgcataagcgatgaccagcgaagaaaagaggcacaccatggtcgacagccatgacgcggaaacgtacagcgcgaaggactcgcgcctgatttggatcgattgcgagatgaccggacttgacatcttcggcggcgacgaactcgtcgaggtgtctgtggttcccaccgactttgacctgaatgtgctggacgagggcgtggattacgtcatcaagccgtccgagaaggctgtgaaccacatgaacgatttcgtgcgccagatgcacacccgttccggcctgatcaacgagtgggagaatggcctgagcctggccgaggccgagcagaaggtcaccgaatacgtgctgcgcttcacgccggaaggcgtgcgcccgctgctggccggcaacaccatcggctccgacaagaagttcctcgaccactacatgccgggcctcatgagccacctgcattaccgcagcgtggacgtgagcaccttgaaggagctcgcccgccgctggtacccggccgtctacgagaaccgtccgccgaagaacggcggccaccgtgccctcgccgacatcatcgagtccttggacgagttgcgctactaccgtaaggccttcatggcccccgtccccggcccggatgatgccgcctccaaggccatcgccgccgacatcgtggccaccagcattctcaataagtagtccgccgtacttggctcccctccctgaggggagtctagagaggttgatatgcgccaaaccgaagccctagccattctgaacgccggcgcgaacgtgtttctgaccggtgcgcccggtgccggtaagacctatgtcttgaacgagttcatccgccaggctcgggccgacggcgccagcgtggcagtcaccgcgtccacaggcatcgcctccacgcatatcaacggccaaaccatccattcgtggagcggcgtcggcgtggccaccgccctgagcccgagtctgctcaaactcatcaaatcccggcgcaaacgcaagattcaggctacggacatcctcgtcatcgacgaggtctccatgctgcacgcatggctgttcgacatggtcgaccaagtctgccgcgaagtgcgtcgcgacccacgcccgttcggaggcatccaggtcgtgctgtccggcgacttcttccaactgccgccggtttcggtgtccgggcgcaaccgcgacctcatcgcccccacccccgaattcatcgccagtcgcgaacggtatgcccgtgccggcttgaaccccgaaggcttcatcaccgaatcgctggtatggcccgaactcaacccggtgatctgctatctgaccgaacagcaccgtcaggacaccggcgaactgctgaccgtgctcaccgacattcgcgaaggcgacgtgacccagtccgaccgtgacgtgctcgtcacccgtctgggcaaactgcccgagcccggccaggtcgccgtccacctattcccggtgaaccggcaggccgacaatctcaacgacatgcgcctgaaccagatcatgcttgagccgcacgagttccacgccgagacagcaggccctgccaacctggtcgaccgactcaagaagaacatgttggcccccgagcgactggtactcaaggaaggcgcggctgtcatggccctgcgcaacgacaccgatcgccagtacgtcaacggctcgctcggcaccgtgcgcggcttcgcgcaggagaacaagggcggctggccgatcgtggaattcgaaaacggcaacatcgtcaccatgaaacaggccacatgggaaatgatggacggcgacaccgtgctcgcctccgtctcgcaggtgccgttgcgttgcgcgtggggcatcaccatccacaagtcgcaaggcatgacgcttgatcgtgcggtcatggatctgaagcgcaccttcgcgccgggcatgggatatgtggcgttgtcccgcgtcgaatcgctgggcggactgtatttgactggcgtcaacgaacgcatgttcctcgtctcgcccgatgccgtggtgctcgacggcgacctgcgcgaagcctcggcctcggcttccgaccagttggccgatgaaggtgcaagcgcgttcaaacccgccgagccggacgaattcggtgtcaatcccgatgatgacttcgcccaggacgcgttattctgacggtcgatatatcgaacgaccgctaatttgagtgtttctgcacttcgaggggcggattttgagttttcgggacatctacttccgtttcaaggggctgatgtccaagtagacaacgcttaaaaacggcggaatgacgttggtatgaagccgtttctatgtgcgattgagcggatgaccagcccctcgaaacgcaagtagatgtctccaagaggcggaatcggccccttgaagccgaagaagacactgcgaacttgtcttcattgaggaactgaacggctaccatggaataagaggtggtagttatggtgctatccgagatatttcgtggaaacaatgaggttcgcgaggccgcccgggccggtgtgcaaatcgatacggttagtgtggctagtgcgtcagatgcagcaagcgcggcagacggcagcggcaaaatcactggcgcaatacgtccgccagcggtggctggttcgttctaccccgctgaccgcacaacgctcaagcaactcattaaccatcaattggattacagtcgagaggttctgcaacagttggagcccacgcttccagcgggagtgccaaaggctgtaatcgtgccgcatgccggttatgtgtattccggcacggcggccgcgcttgcctatgctttgctcgaacgagggcgggggagtgtgactcgcgcggtaatcgtgggaccgactcaccgtgtggccgtgcgaggcgtcgcctgttccacggcagcggcgtttgaaacgccgctgggcactgtgccggtagacattgcagccgagcgtaaggctctgggcctgtctgtcaatgagccattgcgctccggtacacatgcccgtccgggcgcgtcggctcccgcaatgatcgtcaatggcccaacccacgcacaagaacatgcggtagaagtgcagattccgttcctgcaaaccgtgctcggcccagacctcactattgtgccgttgaacgcgggcgatgccacgccacaagaggcgggtgatgtgttgcgtgctttgtggggtggcccggaaaccgtcatcgtgattagttcggatctctcgcactatcatccgcacgaagtcgcccgcgcgttggatgaccagaccattgcggacattgcggctttgcatctgccgattcaccctcgccgggcctgtggcgcatacccgatcaacggccttctggatgtgttaaaaggccgcaaggacatgaagctcttcgagctcggctgttccacttccggcgacgacggcgtggtggcgcttgccggccaacctcgccccgcaatgcgagacgccgacgagccggtagtgggatatgtctcgtttgccgcgtgggaatccaaaccagaagcagatgctccagccggtgcagatgacttaggcgaatcgggaacagcccatggtgatgtgctgctgaaactcgcccgtgccgctatccgggaacggttgcatattgaacatccaacagccgccgattcgaccgcgtccattcttgccgcaaacccatggctgaacgagtccggtgcctgtttcgttaccctgaccgagggtggccggctacgcgggtgcatcggttcgctggccgcccaccgctcgctcggcaaggacatagctgcacatgcggtggacgccgccacccgtgacccacgtttcaacccggtcaccgccgcggaatacccgttgctcaacgtggaggtatccgtcttgggcgagcccgagccgattaccgtgaactcctgtgacaccgattcgcgcgataccggctcgaagaccgcgactctggcatcgctgcaatccggacctcagaccgacgccgtcaaacgggacggcagcaacgtcgaacgcccggtacgttcgcgcactgaacttgaggaagtattacgccccggcaaagacggtctgattctcgccgaccgtcgtggccgcagcgccacattcctgccacaagtgtgggatgagctgcccaatccgcacgatttcgtcgctcacctgctcgccaaagccggtatccgcccgtcctacgactggaacgatggcgaaatcgactgtcaacgctacgaggtgaccgcctatgccgagcactaacgcagcaaccatgtcccctcccgctggcgggaggtggcgcgaagcgacggagggtggtcaccgagaatcagagggtggtcaccgggaatcgtgcggtcatacggcgtcagtcacagatgttcgtaaccccgccatagcccgctggcaaacgcaattccacgacggtaccaaccgcgctcgctgcgaactatgcccgcgccgctgcgtcctcaagcccggccaacgcggcttttgcttcgtccgctcaaaccacgacggactcatcgtctccgacacctacggccgcagctccggcttcgccgtggacccagtggaaaagaagccgctcaaccacttccaccccggttccagcgcgctgagttttggcacggctggctgcaattccggttgccgattctgccagaattgggatattgccaaagcccgcagtttcgaccggctcggcgtggaagccagtccggagaaaatcgcgcaggtcgcggccgaccggggcatcgattcggtggcgttcacctataacgatccgatcgtgttcgccgaatatgccatcgacacggccgaagcctgccgagcgctcggcattcatcccatcgccgtgactgccggatacatgagcgccgaagcccggcccgacttctacgccgccatggacgccgccaacatcgatctcaaaggcttcaccgaagaattttattggaaagtgaccggcacgcatctggccgatgtgctcgaaaccatcgactatgcggtcaacgaggcacgcacaccagaaggcgaacacgtgtgggtggagctcaccacgctactcatccctggactcaacgatgacgacgcccagctgcatgctgaatgtacatggatacgcgagcacttgggcccggacgtgccgctgcacttttccgcattccactccagttaccgcatgatggacgtaacgcccaccccgcacgagactctgacccgcgcccgaggcatcgccctcgaagagggactcaattatgtgtacaccggcaacgtgcatgatcgtgaaggcgataccacatattgcccaaaccctgaatgcagggccaagctcgtggaacgcgattggtatcgaatcattgccaaccgtttatctgccggatacagtggcaatgggcactgccccgtatgcaggactgctatcgccggacgttggtaatctgcctcaggtcgcccgcgcgatttagcgcagatcgccaatacgcgcggcgatcgtcctcatcgatttgaggctcgcctcatagcgcgcggctgccacaatcagaatgatgccgcccaaagcaagccacacccaccggtagtggcgggagaattcggcccgccatggccacagcacagtcaccgtgctgacgataagaatcaccgtgccgtagatcaacggtgcttgcagcaaacgcacacccacaatcagcgcggccgctccggacaggccgcttgttccgggaccgacataggcgattgcgcaaatggtggcatggccattggctgttgcgataccggttgtcgcggaactgccgttgggaattgcggggttgcagcagaaaattgcggggcccatgctgggccggttgatacaccggttgctccgcgggttccggctgattcccctgttgctcggtcggctgcgtcatcgtgccctcctacccttctagccatcattgttgtacgaatgagtccgaatgccaagatgaaggccggaatagtgcgaatagcaggcgggcttgtcggttcacgcgaatatcttggaacacatgacttccaatacccttcgtatgtcaaccatgttcctgcgcaccctgcgcgaggaccccgctgatgccgatgtcgattcggccaagctgctgcagcgcgccggctatatccgcaaggccgcacccggtatctggacctggctgccgctcggtctgcgcgtgctgaacaagatcgaggccatcatccgcgaggagatcaacggcatcggcgcccaggaagtgcacttcccggccctgctgccgcgcgaaccctacgaggccacccatcgctgggaggagtacggcgacaacatcttccgtttgaaggatcgccacgaggccgattacctgctggcccccacccacgaggagatgttcacccttctggtcaaggacatgtactcctcttacaaagacctgcccgtcaccctgtaccagatccagaccaagtaccgcgacgagttccgtccgcgtgccggcctgatccgtggtcgtgaattcatcatgaaggacgcctactccttcaccatcgatgaagaaggcatgcgcaaggcctactatgacgagcgcggcgcctacgagcgcatcttccagcgcctcgacctgaagtacgtacctgtgttcgccatgtccggcccgatgggtggctccgcatccgaggagttcctggctccgatgtcgatcggcgaagataccttcgcgctggcgccttccggcaaggcatggaatgtggaggccctgagcactccggagctgccggaaatcgatgcttccgccactcccgccgcttccaaggaagccaccccggatgctaagaccatcgataacatgattgagcgtgccaacgccgaccacccgcgtactgatggccgtgaatggcaggcttccgacatcctcaagaacgtggtgattaccgtcaagcaccctgaggatgaagagcatgacgagccgtggcgtgaagtgattgtcgtcggcgtgcccggcgaccgtacggtggatatgaagcgactggaagcccagttcgctcccgccgagcttgaggaggccactgaagaagacctgaagcagcaccccgaactggtgccaggctacatcggaccgatggtgcttggcccgcaggccgaggctgctggcgtgaagaacccggttcgctacctggtcgacgcgcacgtggtcaagggttccgcttggttcactggtgccgatgagaacgaggtcgactactacaacctggtgtacggccgtgacttcaaggccgacggcgtggtggaagccgttgaggttcgccacggcgacatgagcccggacggttccggtccgttgagcttcgagcgtggtgtggaaatcggccaggtgttccagctgggtctcaagtactccaaggcactggacctgaaggtgctcgaccagaacggcaaggccgtgccggtgtggatgggctgctatggcatcggtgtttcccgcgtgctggcctgcatcgccgaaacacaccacgacgaagccggcttggcttggccgtccgtgattgccccggctgccgtgcacgtggtggccaccggtaaggacgccgtggcgtttgaaggtgccgagaagctggtcgccgagcttgaggccaagggccttgaggttatttacgatgaccgcaagaaggtgtctccgggcgtcaagttcaaggatgccgagctgatcggcgtgccgctggtcgccgtggtcggccgcgattacgtcaacgacggcaccatcgaactgcgcgaccgcaacggcgaaaacaaggtcgccgtgcccgccgccgaagccgccgacgcgctcgccgagcgcttcgccgccctcagctgagtcccacttactcagcctcggcgttaatcgcatcaagcgccattctgcccagtcgcagaatggcgctttgttgtggataaccgaaacttatccacattcttaaaatttcaactgcgtcacagtatccacatttgccagttgcccttgtgcacttcaaacgtcatgcctcacagtggaggtaccgctggggcgtgcaagccggcaatgaagccggagacaggctccggcggtccacatccaaacaacaggccagcaggccgaggaaaggaccgatcatggcaaatcaacaagcagcagtgaccgtcaccggctttgtggccggtgatccgacactaggcggaactgagagtttccgcgtgctgacattccgtatgggcagcacccgcagtcgactcaacccgactaccagacaatgggaggattacggaaccgcatgggtgggcgtcaaagcgttccgtgctttggccgtgaacgccgccagttcggttcgccgcggtgaccgcatcattgtggtcggctcactcatcaccgagcagtggaccaatgagcaaggcgaaccgcgcagtagaaccgttctcgaagccaccaacattgggcatgacctgaccttcggcaccacgtcgctgatcaagccacagcgtgccggtaatgggaacggaggcaatggtggcaacggtaacggcaatgccaacggtgccgccgaaggcatggatggcggaaacgggcaacgagcatcgtcaccgcacatgaggccaacgcaatatagtgtggacggtgccgcatccggtgtgggtatggacccgtatgcgacctcgtcggaatctggccccgtcgaatttggggtcacctccgattccggccaatcgccgtcgccatcaaccgagtcagcggctgcgtccatggccgatgccgtcatgtcgcaaccggacgctggcgctaatcagccacagtccgcagcccaacaaacctacgtcgacggtttcgccgaatcttccgatcccggcgaatccgaattctgagtgccaaccatacatcatgaaaaaccgctgtgttcgcctgtaatcgaggcaagcacagcggttttctcttacataacggggattaccagatgcgtacacggtccttgggtgcgagccacatggcgtcgccttcggtcacgccaaaggcatcgtagaagaggtccacgttgctggcgatgccgttggtgcggaattcggccggagaatgcgggtcgatctgcaggtactgttcggccagctcgtcgcggttcttggtgcgccagatggaggcgtagctcaggaagaagcgctgcaggccggtgaatccgtccatttcgggggcggtatcgagcagtgccttgatggcggcgggggagccgtcttcttcggcgtcgggcttacctgccgccttgccgagcgcgaatgcatacgccttgagcgcgatgttcacgccgcccaaatcgccgatgttctcgccgatggtcagcgcgccgttcacgtgcggcgccttatcagactcgtcagcgtacttctctgccagctgcagcggcacaaagctgttgtactgggcgatcaatgcgccggtgcgggcctcgaagttcttgcgatcctcgtcggtccaccagttgttgagcttgccgtcgccgtcatactgcgaaccctgatcgtcgaagccatggccgatctcgtgtccgatcactgcgccgataccgccataattcgccgcatcctcggccttcgggtcgaagaacgggggctgcagaatcgcggccgggaacacgatgacgttcatgctcggctcgtagtaggcgttcaccgtctgcggattcatcagccattcgtccttgtcgaccgccttgccgaccttggccagctggtagccggtctcgtacaggttcgcggccttggcgttctcggcgggcagcgcatccgcggagacactcagtgccgagtaatcgcgccagtggttggtgtagccgatctttggcgtgaacttggagatcttctccagagccttggccttggtgtcttcgcccagccaatcggaattggcgatggacacgcggtaggcgtcaatcagattggcgaccagctcttccatgcggcgtttcgagctttcggggaagtgcaggcgcacatactcgcggcccacatcttcaccgcagacgccgttgaccaggctcaccgcgcgcttccaacgatcgcgctgcttcttggcaccggagagcaccttgccgtagaagtcaaagttggtggtgtcgaagtcgcgagacagggaggaggcgaagcccagaatcatgtgaacacgggcccacagcttaaggtcggccagatcggcctcggcccagaacgcatcaagaccagtgaggaagctcggctcgtgcacaatgatgcgcgcgaacacagacttgaaatcgatcgactgagccttggcggcctcggtggcgtcataggcggtctgccaggcgtcgatccaggaagcgagatcgaagttcttcagcgtggcggccaaatcggcgtaatcggtggggttgtaggtcttcaccgaatcgcgcgtggccacattgtcccaatgattggcggcgatcttggtttccacggcaaggaagtgtcgggccatatcaagtgcggcttcgctgggaaccgtggtgggagcattgctctcgtcatcgccggtgttggccggcagttcatcgccaccgttggattcggcggcgggcgcgtacccggcgttcaccagctgggtggcgaccatcgccacgtatgcttcgcgcacggggacgtagtggtcctcacgatagtaggcttcgtccggcaggcaaaggccggcctgctcaaggtgggcgatattgcggtccgggtcgccggggtcgccgtaaacggccaagccgaacaggtcggggccgccggctgggttgatggtgccgagcacgcgcgtgagagcggccttgtcgatggcggaatcgatgaggtcaagctcatcgcggatcgggtcaaggccggcggcctcgatggcgtcggtgttcaggaacgaatgatacagagcctgcgatttggtggccgggcagtcgtcggcgtcgaggatgtcgcgcacttggttttcggcgtcttcggcgagcttgtcgaaggagccgtagcgcgaacgatcgtcgggtaggcggtaggtgtcgatccatggaccattcacgtagcggaacaggtcattggtcggcttgatgacggaggagaacgatgccgggtcgatgcccgacgtcagcgtttcggtttcgttggtcatggccctaagcctaatcgcggcgggggagaagcgttggtgatgcagatattgcgttatgggtattgcgctgtcagtgaactagacggattgcctaactgtagtgatggttcaaattaggtaacttgcctaacatggtatgtggaacctgaatatggaccttgagttaaggagttacgatgagcaatccaaacgagggtcagtggaatggccagacgggccagcccaaccagagccagccgagccagccgaatccggcgggccaaccgggccaaccgcagtatggcgcgtatgacagcaatcatggcggccaatatcctccgcaaggtgcgccgggagcgcaagacactcagaatcagcaggcgcagaacggccagccacaaggcggaccgaaccagaacccgtactacggcccgtacgcctacaatccgaactatggcccgaacggccagccagcatggggtccggacggtcggcggtaccaggcggacggccaatcgaatagccaagcggacgggcagccgaatggttcatggggcgatcaaagtcaacccggctggcagcagaccaactggtatgtcggcaatttcagtccattccatctgatcgaggaatggctgccggaaaaggccaagaccaagattcgcatcatttacggcgtggtgggcgtggctgccatcgccttgggcgctgcgctgttgttggtgccgaacaagacgctggctttggccgcattgttgctcggcgtgtatttcgtgatttccggcgtggtgcgcatcgtcagcgctctcgtggagccgggtctgccgggcggctggcgtgtgctggacgtgttcgtcggcattctgctgaccttcggaggcgtcgtagtcgtacgaaactacggtatgaccggtcagaccttggcattactcatcaccctgatggtcggtttcggttggattatggaaggcgtgatggctctagtcgaatcatggcgcatcccgcgctccggctgggccatcgcctatgccatcatctcgattatcgccggcttcgtggtgctgatgagcccgctgagctccgccgtattcatgattatcttcggcggatgtgccatggtggtgatggggattacttc

SEQ ID NO: 818 - DNA, 27420 bp, Unknown
  R14_18m  MAG No. k141_6398
cgagctccgtcttgatggcgttcataccgagtcggttggccaaaggcgcgtacacgtcgagggtttcacgcgccttcttctgggcggacgtggtcttcacatagcgccaggtgcgggcgttgtgtacacggtcggcgagcttgaccaccaaggtgcgcacgtcgcggctcatggccaccacaagtttgcgaatggtttcggcttgggcggagtcgcccacttcaagctggctgagcttggtgacgccatcgaccagaccggccacggtgtcgccgaactcggcacggcattgatccaacgtgtagtcggtgtcctccaccgtatcatgcagcagaccggccgccaccacaatcggccccatgcccagatccgcgagaatctgggaaacggccaacggatggatgatgtatggttcgcccgacttgcgccgttgcgtgcaatgctggatgacggcgcgccggtacgcgcggtcgaggatggacaaatcctcaccgggatggtgggacttgcacactttcttgattggatccagcggattgagcggatcggcactgatctcacaacccaacttacgggcggcgtactgctcgccatcaatctctgccatgccagtcacctccctcgtcatgaagttcattgtaaccgcgaaccggagccttatgcatgcacctgttcgccatcattggttccgcaaccgtcgttgccgtcatcaccttggtcattcaaccggcccaatccggtcaggacgccactcccgtcgaaccgaacccacgttcggcgcgatcggatccgggcagggtttcagccgggatgaaccgggcctcaacataccgctgaatcaccaattgagcgatgcgatcgcccggatggaagacggcggtgcgttccggatcgaggttgatcagcggcaccttgatctcgccacggtagccggcatcaacggtgccaggcgcgttgagcacggtgacgccctgcttggcggccagcccggaacgcggatgcaccaacgccacgtagcccgcaggtagggcgatggccacgccggtgggcaccagtacccgttcaaaaggcttcagcgtcacatcgacggtggtgatgaggtcggcaccggcatcgcccgcgtgggcataatgcagctgggccggatgttcggggtcgaggctcttgaccaggacctcggtggattcgggctcgttgtaggtctcgtcgaacgccatcaggcggcgcactcctcacacaccggctggccatcctcgtccgtgtaggcgagctggctgcgatgcttgaccaggaagcactgcgagcagatgaactcgtcaccctgcatggggatgacggtcaccgaggaatcctcgttgctcaaatcggcgcccggcagttcgtagtcttcggcgatggcgttctcatcgtcgtcgatgtcgctcgaggcgttctgcgaggacttccccagcgcctgcagcgattcctcgtcctcatccttattgcggggggaatcataatcctgagccatcatggtcctttcgtcgtctttggttcgtaagtcgatatatatagcacggtcagcgccgtactcgcccataggatacacgatttgaaatactcgtaaagttcgacacgtggggcatacttaaaagaagtaatgtctttgcgacggaaagtggtgcgaatatgccagatgatcggcttgaaaaagcccgtttcgtgcgcgtgagcaagacgggggacctcgtattctccattggcggcagggaaatggccgtgagcgtggacgacacgctcgaacgggcgattcttgaggccaagcaggtcagaagcgagatgcgacaggccccccagccgcatcagcagtccactttgccgatttcccagatacagtcgctgattcgcgccggtgccgatccggcccgtgtcgcggagaaatatcatctgagcgaaacgctggtacgtcgtttctccatggccgtggagaccgagaaacagtacgccatcgaacagttccttgccgtggcggcacccaaagacagcagggtgcgcaccatcagcgaactggtggaacgcacgctggcctctgctggaatcggcatggaatcagtgacctggaaatccacccggcgcggacttgagccttggcgcatcgtggcgatattcacttccgcgggccgtgagatccatgccgaatggacgtggaatatgcacgacaattccgtgatgagcctgaacaatgccgctcgaaaactgctcggcgaacagaatccggaatcagccacggattccaaactcaagccgacgattcctgaactgcccggcgactccgtacgttccgcgcgtatcgagcgcgccgtgtctgcttgggcggcgcctacgccttcgattccggccgcacggcctgccgcgatccggccctccgtcacttccacaggttccatgcccccggtggacctatccacgtccatctcaccggccacgaaccaggctcatgacgctacggcccccagcccggtctcttcgcagaccgccggacctgtttcgtcatctgccgcaggattgcagcaatcgcctgccacggcaccagagcagggttctgacaatatttcggacgagaccgtacggcgtggccccaatgcacagctggtagccaccgagcaggagcgggcggccgaatccgccgccaccaaacacgaggcaccagccaaaccggccaagcgtaaatcaggacgttcggccgtaccaagctgggacgagattctgttcggagactgaatttccgaatcaggccatatcgatcaggcagggaatatccatttccaatgccgtttgggagccatgcacgctcggcaggtgggtggctttgtctccttgcgtacgcgaatcgacgagggtcacggctcccgctgcctgcacgaccacatcgccgagcatcggccggactcgctcgcagaccggtccaaacaatccgtccgcgatggcctcatccctggtccgcaccaaggctcggtcttgcaggtaatcgcgccaccggcaagctatatcctcaggtcgttcatccggctcggcatacagcatcagcgagcgcggctctcccccgaccagtgacacgcctcgggtgagctgcggttcaacggcgatgtcaatccgctggcccatgtcggtttgcaccatgccgtggtcggccacgatgacgatcagcgtgcctttgggtgcgctgcgtttcaggagcgcgagctgggcgtcgatatgttcgaatgcggccacccagtgttcggaatcccacccgtaattgtggccgactttgtcggcgtcacggatgtacaggtaggtcaggccgggggtacgggaggcacgtgaggcggccagcacacgatcgcgtggggtgacgttgccttgatagtcggtgcctcgcaatgcggcttcggtcaatggcgatttggagaacttgggcagccccgagcttgtgacgcgcacctcttgagccgcaagtttctcgaacaccgtctcctcgcgctgctggtcgagcggatcgaccatgggtggcacaggaatgtgcggattggctggtttgggtgccagcgcgtctttgaactggatgagttggatgagcttatggctggcgggttcgagctgcgtatagcccgccattgcggtcagtcccgggcaggttccggtaccgaatgcggccatggccgccacagtggtgcttggagcgcaggtggcgatgggacgctgattggcgcgttcgttcatcagcgaacgcagatagggcgcgtggccgaggcgcatggcgaggttccagaagcccaggccgtccacgagcaccacgatggccgattcggcgtcgggcagtcccaacgcgcgctggcaggccttgggatcggcgtggaccttggtgggagtcggatgcccaatcgcggcggacaaggcgggcagcacggcggacaggtgcagtgctcccccacgccgatcggccggggcgtcatccccatagcccacagtgggcaccagccgcagcaactcgtccatatccagcgtctcaacactcatagttgcccattcaagtagcacccctccccttggctcagtgcgcagagaacggttctcaataacaactgtgcgccccaacgcacataatcaaacaaacacacatcgactgaaacactggaatcacgccattttatcggcaaacatgtgcgattggcgcaccgaaaccagcgcacagttgttatcgagaaccgttctctgcgcactgtttcgcgccctcccgctaatatgggggcgttcgaaagggagtttcatggcatcacaccgcaaaccgtccgcgcaaacctacgatccgcgcacggtcaaggagcatatcgtcgagacgccgctgaacgaggagatgagcaaatccttcctcgagtatgcgtattcggtgatttacgcacgcgcactgcccgatgcgcgcgatggcttgaagccggtgcagcgccgtatcgtctaccagatgggcgagatgaacctgactcccgaccgcccgtatatgaagtccgcccgcgtggtgggcgaggtgatgggcaagctccatccgcacggcgattccgcgatctacgaggccatggtgcgtttggcacagccgttcgcgatgcgtctgccgctggtagacggccacggcaacttcggctcgctggatgacggccctgcggcctcccgttacaccgaggccaggcttggcccggcggccctcggcatgaacgcggatatcgatgaggacaccgtcgacttcacgccgaactatgacaacaagctcaaggaaccgaccgtgctgccggccgccatcccaaatctgctggtcaacggcggctcgggcatcgccgtgggcatggccacgaacctggccacccacaatctgggcgaggtggtgaacgccgccaagttcctcatggcgcattcggacgccaccctggaacaactgatgcgttacgtgcccggccccgactggcccaccggcggcacgatcatcggccgcgacggcatccgtgaggcctatgccaacggccgtggcacgctcaccacgcgcgccgccacgcatatcgaacatgtcacggcccgcaagcaggccatcgtggtcaccgagctgccgtacatggtgggcccggagaaggtgatcgagcgtatttccgacggcgtgaagaaccgcaagctggaggggatttccggcgcgttcgatctgaccgatcgtcataacggcacgcgtatcgtcatcgagatcaagaccggtttcgacccgcatgcggtgctggtgcagctgttcaagcacacgccgttgcaggacaattttgccatgaacaacgtggcgctggtggagggccgcccgcacacgatgggcctgaaggagatgcttcaggtgtgggttgaccaccgccgtgtggtgatccgccgtcgcagcgaatatcgcaagaagaaggcgttggagcgcctgcacctggtcgagggcctgctgctggccatgctggacatcgacgaggtgatccaggtaatccgcacctcagatgatgcggatgccgcgaaaagccgtttgatggttgtgttcgacctggacgaggtccaggcccagtacatcctcgacctgcgtctgcgccgtctgaccaagatgaaccgcatcgaacttgaggccgaacgcgatgacctgaagaagcgcatcgaggagctgacccgcattctggcctccgccgaagcgctcgaccaggtggtcaccgacgagatggacgaggcggtcgccaagtggggctcgccgcgtcgcaccgtgctgctggacgccgacccggatggcacgctgacgccggtcgtggcgcagggcgccggggcttcgggtgtgtccaagtccgcactcgaagcagtgaaggccgccaccacgatttcctccgccgaagccgatgtggccgccgcagcagcagcagccaagaagaccggcgaacagtccgcgctgaccggagccttgaagatcgaggacgagccgtgcgtggtgatgatgagcgccaccggtttgattgcccgtaccacgccaagcgcgatggacgtgttcaatgcacggtccgcatccgatgaacgtctgcgagacgatcagatcaccacaatcttcgagacctccacgcgcgccacgtacgggctggtcacgtcggccggccgcctggtgctcgcgcatgtggttgatttgccggcgctacctgcttctgccacgttgtcgctgaagggtggggtccaagccgacgaactgatcggcatgaccgaatccaccgatccgattcgtggcgagcgcgtgattacggcgatcgccatggagcagccgacgtccggcaaggccagtgccaaggatgagagcgaggatggcggggccgccgaggccaagccgttgccgtcgctggctatcggtacccgtaacggtgtcatcaagcgttggaaccgtgaggcacccaccaccatggattcctggcccgtcattgatctgaaagatggcgacgaagtggtattcgccgccgtggccgaggatgacgaccgtctggtgttcatctcctccgattcctcgctactgacctttgaggcgaagaacgtgcgcccgcagggtcgcaccgcgggcggtatggccggcatcaagctggccgagggtgcccgtgtggcggcattcaacgtggttcccgccggcaaggtggcatggacctatgaggagggcgagaacggtttgacttccggctccggcgcggtggtgctcaccgtggccggcgactccgatgcactacccggcaccgaaaacggcgccgccaaggtcaccccgctggaaatgtaccccaccaagggccgcgctaccggtggcgtacgctcccagcgcttcctcaagggccagaacacgctgattcttgcctggattggtctctacccgttgcatgcctccacatccgcaggctccccggtcgagcttcccaagcccgatatgcgccgagacggctccggagtggacctcgcctcccccatcgccttcattgcgtaacctcaattaagctccctctgatgggccgagccgtaaagcaaacacccccagtggggtgtttgtaggcgaggagcgaacgatagtgagccaaacacatagagaagagaccctaaacccgacctacactaagcatcaaggaggtggcgatgagactactggttgccgtatccaatgaaccgttggcccgcgccattcgtggtgcgctgcttgcctgtcgtcatgaggtgtccttggcaagcaccggcagtatcgcgctcgccgcggtcaccaaggagctatttgacgcagtgattctcgatgaatccctgctcggcatctccaccgagcaactcatcgaatcccttcacaatgcccgtgcctccgttaaaatcctgctgctgacttcgacgccactcagcaaaaccatcggcgaaggcagccgctggcgagcgctgcctgacgagtacgccccgatcgaagagacgccctacagctccttcagcgcggattcacacgcaaacaactcagatgccgaagccgaacagtgcacggacaatgctgccgctagcgcacgagctaatgtacgacacccggatgccgtactgagcaaaccattctccgatggcgaactgctctcatacgtcggctcgcttgccaccgactcccccaccatgatcattcgtggcaatctcacgttggataccacgaatcgcaaagcctactacgcatccacacacaccgcaatttcactgtcccgtctggaatacagtttgcttgaagcactggtcaaggctgatggccagtttgtcaacaccagcgaattggtcaagctcgtcggtggcccattcttcgagcaacaagggctcctcaggaacgccctctacacactggataagaagctcacccacgccggcctcatcatgacccaacgcggctccaactaccgcattcgatagctgggctcaatcagtacagccgcatgcctcggggaacgggggtgaagccggactggtggaggatgcgggcgaaggggtgacgggcgttgaggggttcgccattgatgtcgctgaacgtcacggaaccggtgccattgcgtttgagagcgtaggccagttctgtggcggccttgcgcatttgttcgtcggaatcattggcggcgggttcatggccgaccgattgatcgaacgccgtcaagtgcttggctttggcagccgcgtatagtagcgcaccttgcgcattgagcacgaccgtggctccgatacggcgtgccggtttacccgcaccggcaggcgcgtccggccacgcgatggcggagccactgagatttgcggggtcgagcacactcaatgccaccacggactggccgcgatgctctgacggatgacgcaacgcatccacggtgtcgcgctcggcaaattgggccgcgccgaaaccacggacgaacatgcctcgtaccagtcgaccatgctcctccatgcgctgcaatatcggatacaacgctgagtagccacccgggatattttccttgtcgatcaccggctgcgcgatgacgccatacctgtccagcaacgtctcgaccagtgcgagcgcctgctcggtctgatcagtgtcttcggcttcagcttgcccgattacggcagaccacaaacctcctaacgtcatatccgtagtggctcggtgaatcggagcgacacgcccacgacgacgtgatgtagtggatttacgcgggcttgctgcgcctgcggttaatgcacgtaccggcgcgaagctggaattggtgaccttaccttgccagaccaagctccacaaggcatccttgaactgctgttcgctccactcttgcggaatgatttcaccggtgtttggattgatgtccggctccgcggtctcattccacacacgtttggcggcatccaccagttgacgggcatggaacgctccccctgagtccagtgcggtcagaatcgcttccggcatggtggcgtctgaagcgttcgatgtcgtaccatgttccacaccgctgagcaatattgaatccgccggatagaaagcaacctcaccggggtccatcgcactggttcccccggtttttgagccgacccagaccacatcgccgctggtcagcaactcatccagcaatgcaggttggtagtctcgtactcgtgcggggaataccgccgactcccagagtgcagtgggcagtgctatgccctccagctgctcgataacgcgcatgagcccgtcggcaccttcatatcgttcgccgccgaccggcccgataccttgtcggtcgataagaaacatctggaacgcctctggttctactggcttgactgctttacgcgccttggccaatgagcgagaccgaatgcggcggaatacgtccttatggagccactgttggccttgcttgtcatcatctacaaagtggccttgcagcaactcgcctttggcagccagtacatccaaagtatgcacggcatccgtagcatcgaggtgcagatcgtccatgagctgatcggcggtgaaaggaccatgggttttggcgtaacgggtcacgcgaccagtcacatcatcgtcggcaagttcattccagaaagtgcgctcccccagttcctgttcgacttcgcgaatcacgtccgggttgagcacttgtgccatgtcggtggtgccgagcaagcgttcgagcacgtgcggatcgagagacaacagttgcgcgctgcgctcggcctgaggttggtcatactggtacatcaccacgccgacgaagccaaagagaatgttctcggcaaaaggcgatggcggctcggtctccacgtccttcacggtaatggtgccggcttgcaatccggtcatcacctcgttcagggcgggcatgtcgtatacgtcttgcaaacattcgcgcgcggtttccagcagcagcgggaagttcttgaccatacgtgcggcttgcaggagctgtgcggcgcgcagtcgctgctgccataggggcacgcgacggcccgggtcggatcgcggcatgaacagtgatcgggcggcgcattcgcggaatcgtgcggcgaatagcacggactcgcccacttgacgttctacatctgctttgaggtcttctgggtcgaaaaggaacaggtcttgagcaggaatatgtccgtcaccgtccggtagctgaatgacgataccgtcatcggcggcatatacctgcccatcgaaaccgtagcgttggcgcagtctgcggctgatggccatggaccacggttcgtgaacgcggcggccgaaggggcttaacagtacgatgcgccagccgccgtcttcatcgcgggtccgttccacgatgagggtttggtcgctgggaactgtgccggtgatggcttgttgctcggagagtaggcgggccaggttggtgatagcgttggggtctaggccgtctcggtggagacgggtgaggattgttgggatgaaggttgggacagctggaccttctgcggcagaactccccccagtccgcttcacgtctaatccggcggcgatttctcgggtgaagcgggctatggtacggctgaaaccgtagtcacggccagcgccttcaccgtgccagaacggcagacgggcggtgcggcccggagccggagtcacgaccacacgatcacgggtgatttcctgaatctgccatgtggaggtgccgagcgtaatgacatcgcccacgcgcgattcgtagaccatctcctcatccaactcgccgacgcgacgctggcctttgccggcgtccgcctcaggcaggaccacggtgtacagccctcgatcgggaatcgtaccgccagaggtaacggccactttctgcgaaccgggacgggcggaaatcaggccattatcccgattccataccagtcgcggccggaaggccgagaattcctcgctgttgtattcgccggacatcatgccgattacggcatcgaacatgtcacgtggcagttcggcaaacggcgcagcacggagcaccgtggcataccagtcatcagcgttcaaatcatgcatcgcggcagcggccacggtctgctgggcaagaatatcgagcggattgcgcggcacggccaatggttctatatcgccggcaatcatggcttccagacttgcggccccagtgacaatctgctgacgggtgagcgggtagaacaatgcgtgagagacgccaccgacctgatgatcggcacggcctacacgctgcaatccggaggagaccgacaatggcgtatcgacttgaatcaccaagtcgaccgaacccatatcaatgccaagctccaaactggaggtggccaccacgcagcgcaattcaccacgcttgagccgttcctcaatcattttgcggcgatctttggagaccgacccatgatgagccatggcgatgacatcatcgccctcatgtgagccgacaagcatggtggtggagccgaccacagcatcgtaatgtgtggagaacccttcgcggccttccggagagcccggatcacgcacagtgtcgggattggtgccatgccgggtctgcgcatagagatcattgaggcgcgcggtgagcttttcggccacaccacgcgaattgacgaacaccaatgtggtgcggtgcgcgagaatctcatccaaaatactgcgttccaccacggaccagatggaaccggaggtacggtcgcccgccgctccaaccaacgcggaggaatcgaacgcatcactcgcatcagaatcgtccccagaagtggaagaaacatctctatcatccaccggcacaatgcccctgcgttcggcaagtcgctgcatggccggcgtgacaccgctgatatgcggagcggaccgttcagcctccacgccaccgacacgctgcttggcattcacggactgcaaatcacgcatgttttccaacggctcaatcatgcgcagatccattgcaggccgcccaccgggattcacgatggtaaccggttgtccgccgcccaggaatcgcgccgcctcttcaggcggattcaccgtagcggatagaccaatgcgctgcatatgaaggtcactgaggccagcatcgatggcggtatcactgccctcatcagcatccgcatcgattgcatctcgcttgcgcgattccgcgacaaggttctccagccgttccagacttaccgccagatgtgcgccgcgcttggtgcccgccactgcatgaatctcatcgacgatcaccgtatcgacagtgccgagaatccgtcctgccttcgaagtgagcaacagatacaacgattctggcgtggtaacgaggatatccggtggatgggaggctatgcgccgccgctcctgtgcggtggtgtcgcctgaacgagtggcgaccgcgatcttcggcacgggcagcccttgcgtctcgcattgtgcggcaatgccctccaaaggctgttctaggttcttggccacatcggccgcgagcgcctttaacggcgagatatacagcacacgcacaccggcacgccgcgtgcgtggcatggtcatcagccggtcaatggccgagagaaacgcagccaatgttttgccggagccggtaggtgcgatgaccaagacattacgaccggaatggattgccggccatgcctgagcctgtgcctcggtcggctgaccgaaggcatgctcgaaccacaccttggtgggttcggaaaacaggctcagggtttcgtacatatgtacgattataggtcagctgaagtaggcgatgacttcttcggcggtgccgtaggcgctttgggcaccaagcttggtggccgcataggcggagacataggagccgatttgcgcggattgcagcagcgtatggccagcggccaagccagccagcacagttcccatgaacgagtcgccgcaaccggtggtgtccaccgcattgacttgcgcggcggatacgcgatgccaacgtccgttctcgatcaccaccgaccccgacgcaccaagcgtcactatcgcccggtcgaatccgtaatcggtgaatcgttcggcgacctcataccagtcgagtgattccacatcgccgtccggcagacccagtaactgagccacttcatgctggttgaccagcagaatatccgtggcttccaccagttcgtgaggcagctcgtccataaatggcgagtcgttgagcagcacggtcacgccagcgtcatgcgcggtctgtgcggcgacgataacggtggagatcgggctctccaaacacagtcccaataccgcgcattcggcgatggtcgtgcgatgtgattgcacatagccggcacttgccttggcattggaacccggcgaatagacgatggtattctcgccctcagcgctcacggtgattaccgtggtgccgctggggccttcaacgtgcaggatatcggcggtgtcgacgccggcctcatccagcttgcctaataggaagtccgcgttggagtcctcgcccaccgcgcccagcaactggacattgacaccgaggcgagcagcggcagacgcctgattcgcgcctttgccgcccggcaacactttcatggcaccaccattgacggtttcgcctggcttgggcagtcgtttggtggtcacggtgtaatcggcgttcatcgagccgaccacgattaccgagcccggcgcatccttcagcgcttccaatcgttcccgtacgggctcgggcatctgtttatgttcttcttcacttatcaccatgggctccaagcatagtaggcggcgggcccaaatgcgcgcatgatcagccgcgcaacttacgaagacgctcgtgcatggccaccatcagcaccaagagcaccagcaaataccacgggtagagactgattgtcacatattgcgcgatgatgccgaacagtggcggcatgagcagtgagcccacataggcacaggccatctgcacgccgacgacggcctgcgatttgtcttcgccgaagtaggccggcgtcgagtggatgacgcacggataaatcggcgcgcacccgaagccgatgaccaccagcccaacgaccacgccaaggtggtgaggcaatggcacgaacatggtgaggatgccggcgagcaccagcacttgaccgaggcgaatcatgaccgggtccttgaatcgcatggtcagaaagccggaaagcgcacgccccacggtgatgcctacatagaataggctggcccagctggcggcggtgatcttgtcgatgccgctgtgcatcaccatgtagctggaggcccacagacccgccgtggattcgatggcgcagtagcagaagaacatcacgaggatttccttggcaccgcgaatggcgagcacgccggccacgccgagcggtttgcgttcagcaacagacgccccttcagcattaccacatccctcggcattgccgtcagatgatgcggcaccatcggtcgattcgccgcccccggtcgtgccacgtttcttccacagcggcaggctcagcaccaggatgacggtcagcatcacctgcaggatcgcgatgtaccgatagccccacggccagccttggccttgagacagcgcatagcccatgatgtaggggccgaccgatgcgccgacgccccacatgcagtgcagccagctcatatgccggctttcgtagtgaatggctacgtagttattgagcgccgcatccacgccacccgcgccaaggccgtacggtatggcgatggccaacagcacccagtaattcggggcaacggagaaacctgccaaggccgccgcagtcaacgccaccgaaacggcggtgaccttgcctgccccgaatttcaatgtcattcggtccgaaagcaacgccgagacaatcgtgaacatggaaatcaccgcggagatgccgccagcccacgccaccggcacgttcagatcctggctcatggtgggccatgcggacccgagtagcgaatccggcaaccccagactgataaacgccacatagatgacggcaagcaacagactggccatgttccatctcccattcacagtacggcaccggttgtgataacgatgtcatcagtctatcgaatgactcatgggcaacacgcataaaacatatgacaacgtgctcacctcaaacgctaattacggaaattctcggtaagcacgatgtcattatcagcgacgtcttcggtcaggtatcgatcttggagcggtcgaaatcgtcggcgttgtcgacgatgaactgcttgcgcggcggcacgtcgtcgcccatcagcaggctgaagatctcggatgcctgggcggcgtcctccatgcggatgcggcgcagcatacgcgtgcgcgggtccatggtggtgtccgccagctggtcggcatccatctcgcccagacccttgtatcgctggatgtcgtcgttgtaaccgatgtgcttcttgtcgaggtcggccagtttgccggccagctcgtcatcggaatacgtgtagatgtattcgcccttgtgcgagccggtcaacgcgatgcggtgcagcggcggtactgcggcatacacgtagccgtgttcgataagcggccgcatgtaccggtagaacagcgtcagcaacaggatacggatgtgcgcgccgtccacatcggcatcggtcatcatgatgatcttgtggtagcgcgactgttcgatgtcaaagctctggccggagccggcgcccaccacctggatgatggccgcgcattccttgttggagagcatctgcgtaatcgacgccttctgcacgttcagaatcttgcctcgaatcggcagcagcgcttggaaaccggcgttgcgggcggccttggcggtaccgagtgcggaatcaccctcgacgatgaacagttcggccacgtcgtcattgcccggctggcagtcggagagtttggccggcatcgaggcggattcgagcgcgttcttgcggcgcgtgacctccttggccttgcgcgactggatgcgtgcgtgcatttcgccgacgatcttctccagcacgcggccggattgttccttgtatccgcgtttggagccggtgatcatctcgccgaattgcttgtcggtgagccgggtgacgatcggcttgacctgcgcggtgccaagcacgtccttggtctggccttggaactgaggttcggccacgcgtgcggtgaccacggccacgagtccggcttggatgtcgtcgcgctccaccttcatggcggagtccttcatgttcaccttgagcttgcgggcgttgtcttccaccgccttgcgaatctgcttggtgatggcgttcatgaaaccgtccacgtgagtaccgccgccgggcgtctccacgatgttcacgaagctcatgattgtggtgtcgtagccgttgacccatcgcagggcgatgtccacgccgcaggtgcgttcgatttcctgggcgtgcagttcaccgccttcgcccacggcctgggtctcctccttataggtgccctcgccttggatgcgccagatgtcggagatcggctcgcctttggataggaagtcgacgaagtccttgacgccgccggtgtgcaggaattccacgacgcgcgggtgcgcgggctgctcgccgaacgcgccatcgacgacctggtcgccggccgtcagcgagaagtcctcctcggacaggctctcggtactgtcggcttgagcctcggtggagtcgtcgaagagttcggcatcgttggacgagacgtccaaagccggggcctggtcttgcgcaggttcgactgcgtcggcatcaatggcttcggcggtgtcagtcgccgtttccggtacgttttcgtcaacaatggtgattttgaggccgggcaccaggaagctggtctggcgcacgcggtcgatgagctgttcgtatgagaattcggcggttttgttgaaaatctccggatcataccagtagcgaatacgggtaccagtggttttgggagataccttgccgatgatttccagctcggtgggtcggttcttgcgagtgcgcttgaacggggaatcgggagacagattggccgggtcggcatccgtgtatacgccagggtgaccttggtggaaggtcatgtggtgcgtcttgccgtcacgatccacttcgacgtccagtcgggagctcagggcattgaccacggaggagcccacgccgtgcaggccaccgacggcgttataagacgagttgccgaacttggcaccggcatgcagtttggtcagtacgacctccacgccggacaggccggttttcggttccttatccaccggaatgcctcggccattgtccgcgacttccacggaaccgtcggtgtgcagggtgaccacgatatcgttgcagaagccggccaaggcctcatccacggagttatcgatgatctcccacaggcagtgcataagaccctgcgagtcggtggtgccgatgtacatgcccggacgcttgcgcaccgcatccaagccctcaagaacagctaggtccttggcgccgtattcttctttgggcatacagtcctattttctaataatttggctcccctcttcaggggagccttcaacggatggctccgtcgtctgacagcccactgggctgtcaaactcctcgcgcggtcggcctactaagcgggccgaccgtcattgatccaggaagtcgcgcagggtctgcgaacgggacgggtggcgcagcttggacatggtcttggactcgatctgacggatgcgttcacgggtcacgccatacacacggccgatgtcgtccagcgtcttcggctggccgtcttcaaggccatagcgcatcttgatgacgccggcctcacgcggagacagggtttccagcacctgcttgaactgttcctgcagcagggagaaggccacggcgtcggacggagcgatggcgtcggtatcctcaataaggtcgccgaactcagaatcgccatcctcgccaagcggggtgtgcagggaaatcggttcgcggccgtacttctgcacttcctgcaccttctcaaccggcatgtccagctcgcgggccagctcgtccggcgtaggttcacgccccagatcctgcagcatctggcgctgtacacgggacagcttgttaatcacttcaaccatgtgcacaggcacgcgaatggtgcgggcctgatcagccatggcacgggtgatggcctgacgaatccaccacgtggcgtaggtggagaacttgaagcccttcttccaatcgaacttctcgacggcacgaatcagaccaaggttgccttcctggatcaaatcaaggaagagcatgccacgacccgtgtaacgcttggcgagcgagaccacaagtcgcaggttggcttccagcagatggtccttagccttcttgccgtcggcggcggcccacttgagttcacgcttgcgcttgaactccatgccttcactttcggtgtcgagcaggtgctgggcgtacaggccggcctcgatgcgctcggacaggtcaacttcctgttcggcgttcagcaggctcacacggccgatctgcttcaggtagtccttgaccgggtcggcggttgcgccggccgcgatcacacgacgcttcggattgcccgaagggatgatgttctcttcctcatcatccgtgtcggagaccacgtaggcacccttttccttgggctgctcgggtgccttggacttggcttcttcctcgtcctcgtcgtcttccacatcgtcgtcgtcggcatcgtcctcatcgaggtcttcgtcgtcggcatcgccttcgtcaacgtcgtcaagatcctcgccgaggtcgtcaacatccaaatcgtcgtcgttgacctcggcatcgtcatcaagctcgtcatcgacctgagtgtcctcgtctttgacgagctcatcgtccttggccttcttcgcggttttcttcgcggcggacttgcgcgtggtctttttcgagggctctgcggacttggacttcttggcagaagtcttgcgcgcggtggtcgtagagctggccttcttcttggtctcggtctcctcgctggactcggctgtctgcttggttgccgtcgtttccttcgtggccaaaactgctccttctgatctctcgccgtgaagtgcatataccacacgggcccacttctggcaagggcaaatcgtcaactatgtgagtaaaccaccctccacggacgattattcccacatcgttgcccgacgtgttgccaatcaccacacgctttccttccgcgcatcgcgcataaaacctcggaaatccgccgtttctgttcattcagcccgagcaccatgccggtgccacgcctcgatcggcggctgagaatatcatcgccgccagcgaacaatcctcatcgagcagcaggcatcgcaaggcgaacaccattgctcgcggatcgcccagccaccataaggtgtaggcgattacggccaatggttgtatgcagtacggcaccggtgaggcttccgcgatatcgagcaacataccgatgccggcatggcaacgctccttatccggcatcatgccttcatcctcgaatgcgcaggtcagcagctcgcccattcgtgttctcgtacgtgccagatgcggtcgcgccgcgaattccatgagccatgacttggggcaacggctttcatcaataaccaacgagagaatcagcgcatcacgaatcgataaggtctcgcgcatgcccaccgcaaacgcggccatcgtctctcggcctaggtcggtgttcccggcatcgagacaagacagccattcatccaatggttcggccacccagtcggcattagcctgttgcgcgcctcgaagtcggcgatcattgcgaaattcctgtgatctcgtctccaactcatcaaagccaaagggctccgtctgctcggcggcgtgccgtttggcgtgtcggctcttacgcggcttgtgcggcgtgttgttgttcatcatgtcctccttgactaatggtgtgcaatctattggtgttgtggtgcgcgccgagccggatagctcatgcgccgagggggtgtgtgcccactatggctgaaaacgccgtatgacgcaggaaaaaacgaccattgtggttctagcttcaaaacccttgattcccaacgttcttgtgttcttcaaaccctgtggataagttattaggcatgtgcacaactgctaacaaccgcgaaatcatcgagccacgcatcattcagttggtgcgggaactgactgccgcccccgccaccgacgaggttgccgacgccctgaaaccggtgatggaacaggttgtgggccaagccgcctcctccagccaaggaggcaaacgactgcgtgcgttgctcgcattggacgccttcgatattcttgccggcgacgtgactcctgatcggcgtgacgccatgatcgacctagcctgtgccattgaagtgtttcagacggccgcactggtgcatgacgacatcatcgacgaatccgatctgcgccggggcaagccttccgcacaccgtgccttggaacaggccgtacacagcggtgccataggccgtggcttgggcctgatgcttggcgatattctggccaccgcctgcattgaaatcacacaccggtccgccagccgtcttcccaacaccgatgccttgaacgaggcgtttcttaccatgcagcgcgaggtggagatcggccagatactggacttggccgtcgagatgaccccgttgtctgatcccgaagctctggcgaacgcctcattgaacgtattccgctggaagacagccagttacaccaccatcgccccactgctgcttgcactgctggccgcaggagagagcccggatcaggccaggcattgcgcgttggccgtaggccggccgctcggactggcgttccaactggccgatgacctgttggatgtcgtcggatcaagccgcaataccgggaaacccgttggcggagacattcgagaaggcaaacgcacagtgctgtgggctgatgctctgtctgcggcagatacggaggataaggccgatctgattgccatcttcgaagcggattgtcgcaacgacgaccaggtagcccgcaccattgaactgttcacgtcgaccggtgctcttgatcgatcccgcgagcgcatcgctgccctatggggtgagtcccgtaaggcgattgccggtcttgagctgaattccgaagcgcagcgccgtctgaccgaggcttgtgcgcgattcgtccccgaatccttgcgatagtccacaatgcgagccgccgggtcatgagaccatgaacaccggtgaaaacccgtgacaactatgcgccgatgctccggccgcgtaaccggggccatgtacactgaacatgtttagtcgtgattaaaggaaccgtacgatacaacatgagtgagaacgagcccgcgcagatgattgagggacgctaccgcatcgtgcgcaatatcgccgagggtggtatggccaccgtgtatgaggccatcgatgagcgtctggggcgcaccgtggcgattaaggtcatgcacacacaactcgccaaaggcccgcatcgggagcagttcgtcgaacggttccgccgcgaggccaattcggccgcgtccatcgccaacccgcacatcgttcaggtgtatgacaccggcgagttcaatggacttgattttctggtcatggaatatgtgcatggcgtcaatctgcggcatgagatgaacgcccaaggcacattctccgtacgtgagacgctgcgcgtggtcgcggagacgctggatggtctggcttccgcacatcgcgccggcgtggttcaccgtgacatcaagcccgagaacattttgatcaatgatcgcggccatgtgcagatcactgatttcggtctggccaaggccgccagccaggccacattgagctccaccggcatgctattgggcaccgccgcttatctggctcccgaaatgatcgagaacaatcaggccaccgcgcaaggcgacctgtattccgtgggcatcatggcatgggagatgctgaccggcaaggtgccgttcgattcggataatccggtgacgcttgtcttcaagcatgttcatgaggacgtgccgtccgtggccacggtctgtcagggcattgatccgtccgtggcggcgttcatcgcccatctgaccgcgcgtcaggtggatgcccgccccgccgatggcgcggcagcagctgaggaattgagccagttggccgccaaattgccgctggaggcgtggcaataccgtttgcatgccgaacccatcggaggtgatcataccgatgccaccgctgcagcgctggtaggcaatatcgccgagcaggccccgctgaccggcgtacctgccggtgcagcaacgttcgagccgtccgtaccggcgtttttggccgatgatgtcgcaagcaataccgccgataccggtggcgccgcagacgtcaatcctccggctcctccggtcgcccccaccacggcacttgattcgtcgacgccagccgatgcttcggctccccataagacgcaaatcatggcacagtccggcagcgagacacaagtgctgcctcaggccggcgatgccttcacccgagcgcttgccctttccgatgagccggacgtcgcttccaacggcaccgggccaaagaagcagcgcagcaaaaaaccgctcatcatcgtactggtgatcgtgctggtactggctgcaatcggcggaaccgccggctggtggtggtttgccggaccgggcagctattggagtgtgcccaagccggatgacgtgacctgcgatgcgaatgcaggcaccgaatgctcgttggccggcgcggattgggccacgtatgagagcacgttgaaggctctcggcatcccctacaagacgcacaaggaatacagcgacgacgtggcggaaggcaagatcatctcttcttccgtgaacaagaccaaggccgttgtgaacagccgcataagcaagcgagccaatcaggagcttacggtggtggtgtccaagggcgtgcggatgaccatcatcccgaaggatattctcgacgcgaattcggccaatggcaaggacccgttgaacgcgctcaagaaggccggcttcgataatgtcaagcatgacgagtcgaaggatgagtattcgatggacacgccgcagggtgtggcattgacgatctcccctgatcccggtaccacggccaagcacaacgatgaggtgacggttactttgagcaagggaccgatgccggtgaccatgcctaacatcgtcggtaagacccaggatgagatgcaagccgcgctcggcgagttgaagctcacggccaatgtcaccgaacagtacgatgacaaggtcgaggccggtcaagtcatttccgcgtctcaggaagccggagcccagctgaagtggggcgatagcgtggacgtggtgatttccaagggtccggagatggcgacgataccgtccggccttgtcggcaaacaggaaagcgccgtaaccaagacacttgaaggtctcgggttcgaggtgaaaaccgacaaggtgctcggtggcctgttcggcacggtacgtaccgtgaaaagtggcgatacggacctatccaacggcggcaagattcgcttgcgcgatgccaacggcaaccccaccgtcatcaccctcaccatcgtgtgagatttgaatgaggctccctctgtcttcagacgagggagcctcatttgttaattacttttcggcttcttcagcggcctgccgggccttgagctcggccttgaccttctgggcgtattcgttcacgaattcctgaccgctcattttctggattgcggtggaaacacgatcggtcagcgaacgcaaatcatcatgtgtaatttcatcagccggcttcttcgcaacctcaatcggcttgccatacaacaccttggtcttgcccttcttgggaatcgacgtgccaatcggctgcagcttgtccgagccgatgatggcggtcggcacaatcgggcaaccggtctcgagcgcaagtcgtgcggcaccggtgtgtcccttgtacagtcgaccgtccggactgcgcgtgccttcaatgtggataccgaacaggtgcccatcctcgataatctcgcgtgcatgctcgagtgcgccaagcgacttgctgccaccggaacgatcaaccgggaacacgcccacggacgtgaaccaccacttcttgaacttgcccttcaatcccttgccctcgaagtattcggctttgcccatgaagtgcaccatgcgcgggcaggtaatcggaatcaaagcatcgtcaatcaccgccagatggttggctgcgataatcgcgccaccctctcgaggcacgttattcagtccactgacagcagggctcaaacgatgatgagcaatagggccgagacctttgacgaagaaccagtagagcacttggcattcctcccgcagacgaactagccattggccggtcgcctgattagagtgacagttatgactgagaaccagaatagcaatgccgacggagagcggccaacccccacgccgggcaacggacaggattccgatacttcgtccaagtcgtcgactcccggtgccgccggaccggccacgaatggtgccgatacaccgcaatcgcatgacgcgaacgatttggatgcggcgtgggccgcgttcgaagccgagcatcaggccgacttgcatgacgtggcttcctccaggcaggccaaaaagttcgagaagcaggccaagaaacgcgagaaggaagcactgctttccgtagatgacttggatatcggctcgttcaccgatgatgctcgcccgagccgtggcggcaaaaaaggcaagcagtcaggcccccgtgatttcaccggctccagctggctggataccgataatgtgatggatgcctatgatgatggcggcttcactcccccgaaccctgatcttggtccggtcaaagcatctacggtactgctgacggcgttgctcatcatcggtctcgcaggcgaaacggtgatgatattcgttcccggcttgaacgcgattcctctcttaggcgtgctgctcaatattctcttcggactgggcgtcattttgggtctgggcggattggtggccaaaatcctcaaccgcaaagaccgccccggtgatcagggtggctattacgacgacggcgcgagggtgtagttcgcgtaggttgtgtagtccttggctcccctctctgaggccgagccgttaagcaaacagcccagtgggctgtttgtaggcgaggtgtgagcgatagcgaaccaatgtatcgcaggcgtagctcgtccgtaattgcggccgagccaagataggtcacgaattgaagtcgatggactcctgcaactcgaaatagttgataatgaaggaaaggtaaacatattcgagcaaacccattccatatcacgccttggacttggcggtttcgatccacttgttgaacagggcttcagccttgccggagtcgacagtatcctcggccagcttgtaggcctcggcgaagcgctcggccagtgtgccgttgccgaccagattgccgtcagccacgatggcggaggcagcgttgagcagcgcggtggtgcgggacgtaatgtccttgccggccaggaagtccttaaatgcgttggcgttgacgtccggcacgccgcccttgagctggtcgacggtaatcttggcgagacccagatccacggtcgggtcgaactcggtttcggtgaccttgccgtcgcgaatctcccagacggaaaccgggccggtgggggcgagctcatccatgccctcatgcgaagtgtagaccaagccggactgaccacggctggcgtagacggcagccatgatcgggctcaccttgcggttggcgcagccgatggccacgtgtgccgggttggcggggttggtcaacggtcccaggatgttgaagacgcacggaatgccgagcgcggcacgaatcgggcccacgaagcgcatggccgggtggaaggtgcgggcgaacgcgaaggtgatgcccacctcgtcgcccacttcgccgacggcctccggcttcaaatccagcggcaggccgaggtcttcgagcacatcggcggcaccgcacttcgaggatgcagcgcggttgccgtgcttgacgatcttcacgccggctgcagcggcggccacggagcccatggtggacaggttcacggtggcgaagccgtcaccaccggtgcccacgatgtcggtggtcccaccggaaacgttcagcggcacggcgtgggagaccatggccttggcggcaccacgcacctcgtcggcggtcagtcccagctgctgctgcatagcgagcgcggcacccacggcggccggattggcgttaccttgcatcaggtcatccacgaaccactccgattcctcagcagtaaggtggtctcccccgaccagcttggtgagaatcgacttccatgtgatctcggccatgatgccctccttggcgtttcctacgccgtgtgatgtatgttcgccgctcattgtaatggttcgtcatttcaaggccctgaatcttccatattgcaaaatatggcgctattgctgttttcgtggatgtcggttcgtcgtcgagccgttggtttcgtaagcgtgaggggcgttcccgcgtattctgttttccgaccaaagaaatgaatcacgaagaacgctgggcaaaagcccattcaccggattgccgaacgtcaaaggcacggttgcagaggatgcgcggatcacggattcgccgccgcgttccgaacccgtgctcgagatccgggtgcgtccacgtgcgggcatgctccgatgctcccgatgcggaaggaggcgccgcgggcatgaccaggacggcggcgtgcggcgtcgtggtcgcttccgtgccgtgggccgagccgggcagccggttcacacgcgatttcgaatcggaacgcgcgtggccgatgagcgtcgcgaaccagaagaccgtaagcggtttcccgcacgtcgcgtggcgcaccgccggaagacgccgcccatagggccgccgaacggttgaaggcgtcgatgccgtcttcgttcggcggcctcacgtcgatcggcgtggacgagaccggctaccgcaaaggccacacgtgcatcaccgcggtcgtcgaccacgaacggcatcgggcgatatgggcgcacgacgggtacggcagggacgtgttcggcctgttcttccaaacgttgacgcccgaacagcacgcctccatcagggtcgccgccggggacggggccaggtggatcgactcatgcgtgcatgagtggtgcccgaacgccgaacgcgcgcccgacgggttccacatcgtcagttggacgagcgacgcgcccgacaaagaagtcaggagacacccgtggaaccaggcgcgccgcgacggggacgagaaatccgtcaagcgcatgcgcggcgtcagatacaccgtcctgaagaaccccggcaagctgaccgacagacggtccgaggcgtccgggaacctgc

SEQ ID NO: 819 - DNA, 4179 bp, Unknown
  R14_18m  MAG No. k141_6558
ccattgccggcctcgcccaaaaggaggtctccagcctgaccgtcacgccaagcaaaaccacctatcaggtgggcgatgccatcgatgccgaccatgatctcaaggtcgtgggcaactattccgcaggcatgggcaacgtgacgctttccgccgaccagttcacgctcgattacgatttctccgctcccgctgatgcggcgaaggttaccgtaacgctcaagtcgaatccgaatgtcaccgaaacctatacggttgcggttaccgctcgggccgaaggtggttccggcaacggctcggacggtgcgggtaatggcggggctactatcaatcccgatacgggcgagggcgataagaccaacggtgcgaatggcgacaagatcactggtgtgctgagcaataccggtagcgcggtgactgccgtgggtcttgcggttgtcgttctcggcgtggccggcggggtctcgcttgctttgcgtcgtaagcgctcctgatagagactgatgcggcattatgatgcggttgccggcagccggcaaccggctgccagatgccatctgtcggctgtcgtttatcggttgtcggctgtcagatgcgtctgtctcggcgcagcgatgcgattctgtcccggttcgtgcatcaatcgtttgatgtgggtaccaggacagaaatcactgtcctggtttgcgaaaacgggtgtttttcgcgtaccgggacaattcccgttgccccggtttgcacgtcaatcgttctacgtgagaaccgggacagtatgttgatttcgggattggctgtattccgccgattctgtttgtcggggtatgtggactttggggattgtcttgtcctggttctcgaaaatggcccgaaattgcgtaccgggacaacgatttctgccccggtgcaaacgtcaatcgattgacgcctgtaccggggcaaattcgcgcccgggaacaatagggcgagggccggtcgcaggagtagagcgtgatgttgtcatgattgcgcccggctctcccacacggaaggccgggcgcaatcatgccgtttggttgcagcacccgcacatcgcctgcataaccgtgtacagtggcgtgtagttgcagtacatgaaggagcatcacaagccatgaccaacggacacatcaatcccgccaacgtgccggacatcgccttgaaagacggccattccattccgcaggtcggccttggcgtgctacgtatcgatgacgagggcgtggcccctgtcgtcgaatctgcgctggaagccggataccgccacatcgatggcgccgccggatacaacaacgaggccggcgtgggtcgtgcgctcgccgcttccggatacaacaccggtgccaagcgcgagaccctgtgggtcaccaccaagctgcgcgactccgagcagggctacgactccgcgctcaaggcattcgacaactccctgaaactcctccagctcgattacgtggacatgtacatgatccattggcccacgccgttcgactggcgcagcaccgacacctggaaggcgttcgtcaagctgcgcgacgaaggcatggcacgcacgctcggcgtatgcaacttcatgcccgccgatctgaagcgtctgcacggggagaccggcgcatggccggccgtcaatcagattgagctgcaccccacgtggcagcagcgcgaagtggtggcgttctgcaagaagcacggcatcgccgtggaggcctactcgccgatggcgcgtggcgccgacctcaacgccggcgacggcaccatcgagaagatcgccgccgcccatgaggtcagcccggcccaggtgattctgcgctggcacatcgaaaacggcacgatcatcatccccaagtccgtgcatgccgaccgtcagagggagaatctcgacctgttcggcttcgccctgaccgccgatgaacacgctgccatcgacgccctcgacggccccacccgcgccggccacgaccccctcaccttcacctatgcgtgattgatggcacgtcgtaacgcccactttcgccgtcgtttcaacgcctctggaccgctggagcgcgtgctgattctcatcgttctcgccgtagcaatcggcgtgaccatcggcctgttactgccgcaggtcagctccgacgtggccaaaatcaccggtggctacactgccaccggttcagccgccgacactttgaacgcgctcgccgtagacgacaaccaaagctcctccggctacgaccgcgattccttcggtttccgcaccaccgacgtcgacggcaatggctgcgacgtacgcgacgacgtgctcgcccgcgatctcacggacatcacctacaaatacgccggttcctgtgtggtcgagtccggcacactggccgatccgtacaccgcccagaccatccatttcgtacgtggccgcgccaccagcgccaaagtgcagatcgaccatgtggtggcccttgaaaacgcttggcaatccggtgcgcacgactggtccactgccaaacgccatgaattcggcaatgacccctataacctgctggccgtcgacggtccggccaatcaggagaagggttcggcttccgccgcctactggctacccaccaacgccgactaccgttgcgactacgtggcccgccagattggcgtcaaagacaagtaccagctcaccgtcacctcccaagaaaaggatgccatgctcgccgtcctccatacctgcccgggccaggccgtgcccgcagacgaataggggctaccgctcaggattgttgagcataggtgcctgcccctcgtcataagcgcgcaggagccgtcggagcaaaaatgtggtgaagtatggtgcggtgaacacgtgtttgctgctaccgatattgccggcggatagtttcacgccgaactgaatttccggataagaatccgaagcgattagcgtccgcatggatttggcggtgccttttttcgatttcacctccaccggcaccagccattcgcgcgtgcggacgaagaaatcctgttccagtgtggaatcctcttttttgtagtagtacaggtcatagccggattttcgtagcgcttcagagacgatgctctcgtacatagcacccttatagacaccaagattacgattggcccgcagatcatcactggcctcgtcgtcaagcatcgctacgaacagaccggtatcgccgaaatatatcttgaacttgttttcgtcataattgcctttcaacggcagttcaggataggacatacatcggcagatattcaccattcccgaggtttcaagccattccacgcatcctcgatagtctttgaaacgcgctccgctggcaaccttgctgatttggaacttcttgttttccttggcgagttgcacgggaatatggttgaacacgttgagaattcgtgcctgatcgggtccttgcgtgtatttgcggatatcctcctggtagtccaaaataagctggcgctgcaattgcagtgttccctcgaacgtgccagtgcgtatatgggaggcgacaaccgcaggcatgccgccaagcacgcagtaatccataaatgccgtggagaagacgttcatttccacttcagagaatggcgtagcatcacacaggtgggtgaacatgctttcgatgacggcctcatcgtatccgcgagcccacagaaattcttcgaagtccaacgatcgcatttcgtagtcggtcttatatcccacgctattgctttcgatttgcttatagctgatgcccaacattgaaccgctgcaaatcacatcatatttgccgtcgattttaaagaacttcagtgcagtggcgatatcaggatgggcctggatttcgtcgaaaaagatgagcgtatcgcccggaatgaactttttggctgggtcgatcagggaaatattgcggacgatggtattcgcgccataaccgtccgcagtgattgcacgatatttcggttcctcaacgaagttgatttccactaccgaacggtagttgtgtgcggcaaagtaatcgatagtctctgtcttgcctacttgacgagggcccttgatgattagcggggagcgattcgggtcggatttccatgcattgagataggcatcggctttgcgtttgagatacatgaggagcccctttccgaattactgctatatcaatgattttacactttcatgagcgagttttc

SEQ ID NO: 820 - DNA, 9735 bp, Unknown
  R14_18m  MAG No. k141_6830
aacgcgcccgcaaggccggtgccaaggtgatcggcatcaatgcgcgcaacctgaagaacctcaaggtggacgtgaacaaatacaacgaactcgcggccgatctgcccgatgacgtcatcaaggtggcggaatccggcgtattcggcgcggtcgaggtcgaagactacgcccgcgcgggagcggatgcggtactggtcggtgaaggcgtggccaccgctgatgatcatgaacttgcagtggaacgactagtaaaggcaggagcacaagtgaaagcatccgaaaccaccccgctcagcgaacatcagggaccgtactggggacagttcggcggccgctatgtgcccgaggccctcatcaccgccctcgacgagctggagcgcgtgtacacgcaagccaaggccgaccccgaattccacaaggaattcatgacgctccagcagcgttacgtgggccgtccgagtccgctgaccgaagccccgcgcttctccgcacttgtcaagcagaagaccggtctcgacgcccgtatcttcctcaagcgcgaggacttgaaccacaccggcgcgcacaagatcaacaacgcgctcggccaggccctgctcgtcaagcggatgggcaagacccgcgtgatcgcggagaccggcgccggccagcacggcgtggccaccgccaccgtgtgcgccatgctcggcctcaagtgccgcatctacatgggccagatcgacgcccgccgtcaggccctgaacgtggcccgcatgcgtatgctcggcgccgaagtggtcgaggtgaccctcggcgacaagatcctgaaggacgccatcaacgaagccctgcgcgactgggtcaccaacgtcaaggacacgcactacctgctcggcaccgtcgcgggcccgcacccgttcccggccatggtgcgcgacttccagaagatcatcggcgaggaagccaagcagcagctccaggactggtacggcatcgaccatccggacgcgatctgcgcctgcgtgggcggcggatccaacgccatcggcgtgatgaacgccttcctggacgacgagcgcgtgaacctctacggctacgaagccggcggcaacggccccgaatccggcaagcacgccatccgcttcgcccccggcaccggccagctcggcatgttccagggcgccaagagctacctgctggaaaccgacgaaggccagacgctcgacacctactcgatctccgcaggcctcgactacgcttccgtgggccccgagcacgcatggctcaaggacatcggccgcgtgaactacagctgggccaccgacgaggaggccatgaacgccttccgcgacctgagccagaccgagggcatcatccccgccatcgaaagctcgcacgccgtggccggcgcgtacaaggccgccgccgatctgaaagccaagggctatgacaaggccgtgatgatcgtgaacatctccggccgaggcgacaaggacatggccaccgccggcaagtggttcggctacctgaccgacgatcaggccgccgcgctcgatgtgaccggcgcccacggcaatactgtcgcctgaacaagaagaggagattgttgattatgaccaacgaagcaaccacgccgtccggccagccgctgggcatcagccacaagcccagcaagtcggtcgctatgttcaccaagttcaaggccgagaacaagcctgccttcatcggctacctgccctacggcttccccaacccggacgtctcgcttgacgccttcaagacgatggtcgagcacggcgtcgacgccgtggaaatcggcctgccgtactccgacccggtcatggacggcccggtcatccaggctgccgcctccatcgccctgaacaacggcgagaccatcaagcgcgtgttcgaggccgtcgagaccgtggccaacgccggcggcgtgccgctcatcatgagctactggaacctcgtgtaccactacggcgtcgagcgtttcgcccgcgacttcgagaacgccggcggcgccggcctcatcaccccggacctcatcccggacgaggcgggggagtggatcgaagcctccgaccgtcacggactcgaccgcatcttcctggtctccccggactcgtccaccgagcgcctcgaaaccgtggcccgcaacgcgcgcggcttcgtgtacgcggccgcccgcatgggcgtcaccggcgaacgcgccaccatcgacgcctcgcccgaactgctcgtggagcgcacccgtcaggccggtgccgagaacgtgtgcgtgggcatcggcgtgtccaccgccgaacagggcgccaaggtcggctcctacgcggacggcgtcatcgtcggctccgcgctcgtgcacaccctgctcgcggacgacaacaagaccgcacgcgacccgaaggaaggcttgaagctgctcgccgccaagagcgaggaactggccgaaggcatccacaacgcccggtgaacacccggtgcgcctcacgcgggttgtgccgtgacacggtagggtagtcacagagcatcaagcacaacccgcgcgtggacacaccatgagcaccagcaagtagaggcacgatgaatctggcttatattccctcgccgaccttctccaagttcgagatcggcccgttcactatccacatgtacgcgatctgcatcctgatcggcatctgcgtggccgtatggatcctcaccacacgttggaagcggtacggcggcaccttcgaccagattctcgacaccacgctcgtcaccgtgccctgcgcgctggtgggcgcgcgcctctaccactgcatcaccacgccggccgactacttcccgcccaccggcaacttggtcaacatcctcaaggtgtgggaaggcggcatggccatcttcggcggcatctccgtcggcaccttggtggcgttcctgtggtgccgccacaagcactatccgttcgcgatcttcgccgatgccatcgcccccgcgctgcccgtggcccaggccatcggccgactcggcaactggttcaaccaggaactctacggctggcccaccacgttgccgtggggcctgaagctcaacgacgcggacgccatcggcaaatccgaaatctgctattccggcgcgcaatgcccggactacagaaccacgctgttccaccccacgttcctctacgagatgatctggaacctcatcggcgccgcgctcatcatctacctcggccacaagctcgccgaccggctcaaggccggccagcagttcgccatgtacctgatgtggtacggcctgggccgcacctggatcgagaacgtgcgcatcaactactccacggtgatcctgggcctgaggaccaacgtgtggaccgcgatcatcgtcttcgtgctcggctgcatcctgttcgtcgtgctctaccagtacggtccggaccccaaggcgcaggcgcgcgggcttgcggcggtcaccgccgacgagctcgaacgccagagcatcgaagaggaacagcttcgccagaagaagcaggccaagcgcactaagtgacaccacaataaacagcgccgaaacagcgcgaaacacgggaccccaagtcccattgcacagataaggtaggaaaccatgagcaatatcgcaatcgcacccagcatcctgtccgctgacttctgcaacctcgaacgtgatctcaaggccatcgccaacgccgacctggtccacgtcgatgtcatggaccatcatttcgtgccgaacctgaccctgggcgagccgatcgtcggccgcatctgtcaggtcaccgatctgccggtcgacgtgcacctcatgatcgaggacccggaccgttgggctcccgaatacgccaagctcggcgccgcctccatctccttccacatgggtgccacccacgcccccgtgcgtctggcccgacagctgcgcgagatgggctgcaaggcctgcttcgccgtgcgtccggccgaaccggtcgagccgatcttcgatatcctcgacgagttcgacatggtcctcatcatgaccgttgagcccggcttcggcggccagaagttcctcgacaaccagatggccaaggtccgccgcctgcgcgatgagatcacccgccgcggcttgaagacccgcatccaggtcgatggcggcgtgagccccaagaccgcgcacatcgtggccgaggccggcgccgacgtgctcgttgccggttccgccgtgtacggcgccgagaatcccgcccaagccatcgacgacatccgcaccaaggccgaggccgcgttcaaggcctgagctccaagcctgaaccgcaatccacctttcatccataaccgcaagaaaagaatctgaatcacatgaagacgtttgaatccctgttcgccgaactgtccgaaaaggcccagacccgccccgaaggctccctgaccgtcgacgagctcgacaagggcacccacttcatcggcaagaagatcatcgaagaggccggcgagacctggatggccgccgaatacgagggtgcggaccgcaccgccgaggaaatgagccagctgctctaccacgtccaggtcatgatgatcaagcacggcctgacgcttgaggacgtctataagcacctgtgagaggaacgcaaatgctgagaatcgcagtgcccaacaagggcatgctatccgaacccgcgtggaacatgctggccgaggccggctaccgtctgcgcaccaaccctcgccagctggtcgtgcaagatcccgacaatggcatcgagctgttctacctgcgtccgctcgatatcgccgtatacgtgggccgcggcgccatcgacgtcggcatcaccggccaggatttgctcaagaactccggtaccgccgcgctcgagcacatgccgctcggctttggtgcctcgaccttccgtttcgccgcaccgaacgaatccccgatcaccactctggaggatgttcagggcaagcgcgtggccaccacatttgataagctcgtacacgactatctggtcgagcacggcatccaggccgagaccatccacctggacggtgcggtcgaatcctccgtgcagctgggcgtggccgacctcatcgccgacgtggtctccaccggcaccaccctgcgcaacgccggcctgcgcgtgtttgccgaaccgctcatgcactccgaagcctgcctgattcgctcgccgcgtctgaacgagcaggatccgcgtctggccgtgctgacccgtcgtctgcaaggcgtgctcactgcgcatcagtatgtgctcatggactatgacattccgatcagcaaggtcgccgccgccgtggccgtgacccccggctttgaaagcccgacgatctccccgctgcacgacaaacagtggaacgccgtgcgagtcatggttcccaaggccaaggtcaaccagctgatggatgatttgtacgaagtcggcgcacgcggcatcatcgttaccgctctgcaagcctcccgcatgtagactgttagtcgatatgaccaaccagaaagtcaacgccagatacagtccggaagcacgtgacatctatttcaccgtgcccaatttgatcagcgcgctgcgaatcatctcgattcctttcatcagcgtgctgatctccaagcatgaggtgattgcggcgctagccctgatcgccatttcctcggcttcggacggactcgacggcatcatcgcgcgcagattcaaccaagtgagcaagatcggtcagattcttgatccgatcgccgaccgactgctcattttctgctcgattctggccctcagcgtcgccggcatcatcccatggtggatgctgattatcgtgggactgagggatctgtggatggcgattcaggtgctatggcttgcccagtacggttatggtccgctgcccgtgcatttcgtgggcaaggctggtaccgcgctgctgatgatttccatcgtcagtcttattttcgccgatttgggcaccagtacgttcttccacttgctctacatcgccgcgctggccgccggcatctggggcatcgccatgtattggctcgccggatatatctataccaagcagggcgtcggattgctacgcaaggaactgggggagaagtatggcgcttgaggccatggccccggtctcgttccccatacccaaggagaatgagccggtacgacgccgcgccgtgttctcccactcagtccgaggcgcggaatcgcatcatgcgctttccccggatgacgccgccgccatccgcaccagacgtcgccgtaaaaccaacgacgattcgcttcagctcatcgatgatcttgtcaatcgtccgatggatccgatgttctccgactcacgactggtccatgagcatcgttcgaccttctccatctggtttaatcgcatcgtcgtattcatcatctgcgtcggcgttggctttgcctgcagcctattcgtgcaacagttgcaatccgatccgcgtaagcaggtacggcagactttggccacgcaattggagaatcgcaactcgcagatagacgaactcaccacggacgtcaataatttgcgatcccaagttgacgaacagtccaagaaaatctccggcagcgtgaaaagcgacacgcttatccaagacgaaatggtcaatggtgccacggtggtcgaaggcgaaggaatcaccatgacgctggccgatccaatcgcggcaagccagtcggatcaatcctcctcgacgagagtcggcacctccacgaacatccgagtcatcaccgatctggatctgcaacaactggtctccctgatgtttcaaaacggagccgaagccattgccatcaacggtaataggctcggcgcgcaaacctcgatacgcaaggccggcgggcatattctcatcggcatgaccgcgatacaaagcccctataccattgaagccataggcgataagagcgccttggccgaagcgatgggggagaagagacttgcaagtctttacgattccttcaaggaagccggtatctacccgcaggtgagcaaatccaattcgattacacttgaggcagcagtcactggcgaagtgaagtacgcggaaaggaatgaataatggcagccgttctgggactgatcatcggcgtcgtcatcggcgtgttcgtcaagccggacattccgatcatcgtgcagccatatctgccgattatggtggtcgctgctcttgacgccctgctgggtgccgcgcgagcctatttcgagcgcagcttctccgaccgcgtgttcgtgatctccttcctcgccaacgtggtgacggcaacactgctcgtgttcctcggcaaccagctcggcgtcggttcgcagctgcagacggccgtcatcgtcgtactcggcatccgcatcttctccaacgtgtccgcgatcagacgcttcatcttccgaggctgacaagggtactgacgtatggcacgtaaagcacaatcagacaacatgctggagaaaatgcgcgaccagcatgcacaagacaaggtcaacgaccggatggaaaccgggtcgttccccacggtgcgcaagaagccccggaaggatctcaaccgggccagcaacaaatcacggctactatcctcgattctcattgctctgatgtgcgcgctgctgggtttcgcctacatgagccagatcaataacactaaatccacgtacgaaacgatggacgagagcgaactggtaaggctgctgaacgagtcgaatacgcaaatctcgaatctcgagcagcgtaaaacccagttgaacagccagctcaactcactgaaatcggcggctaacgagcaggagcaggcgcgtaagatcgccaagcaaaacgaagagaccagcggcttgatctccggcagactcccggcgaagggccagggcgtgaccatccggatcggacgaggctcgacgactaaagtggacgcctcaatcatgttcaacctcatcgaggaactccgcaatgccggcgccgaggtaatcgccatcaataacgtgcgcgtcatcacctccacctacattcaggacgccgaggaaggcttgatcgtggatggcaccaccatcaagcccacatacacggtgaaggccatcggcaatccgcaggagctgtccaacgcagtcgatatcgccggcggtgtgggcgctcagctccaggtgaaatacggatccaacgtcaacgtgcagccttctgacagcatcattatcgacgaagtacgcgaagctacgcaaaaccagtatgcaaagacggtagaataggggattatgaccaacccgattcctagcgcaggcgaaaccaccattatcggcctgcccgcgattaatgtactgcccattaccaccaccggcgatcgaccgctgactcaagaggatctggacaccatcaccagattgtccgagggaacggcattgctgatttccgccaggggagcggtctcaggttctcgttacttgcttgacgaggatgaaatcaccgtcggtcgtgatccgcgagctgatattctgctcgacgactccaccgtatcccgtcagcatgccgtgttccgcagggtcaacggtcagttctttgtggttgacgcaggaagtctgaacggcacctacgtgaaccgtcagcgtgttgatcaggcgtcgctgaagaacggcgacgaaatcatgatcggtaaattccgtctcgtgttcttcacgaaatccgccattatttcccaatagtccacacccagcacggggttagactgattgcagaaattgcaatcatgtgattacaccagtgtgagtcacatgcgagacacgcatgagttaggggagtgccatgggacagacagggctgcatcttcatgtttcgcttgaggaccgtcagaatctgaacgctgacgcgattcagggggagttgttctccaatgtcgatactgaggagatcaagcgcggctaccgtggcactgtggcctccaaggtggccggcatcacgtaccgacagctcgattattgggcacgcaagcagattgttgagccgtccatcacgccgtctcatggctccggttcacgccgactgtactcgtttaaggatgtggtgattctcgctgtatccaagaagctgcttgatgccggtgtgaatctgcagaacgtgacggcggccatcggattcttgactcaacgtagcaccgatcagctggccaatgtgaccatcatgtgcgatggtcaaaacgtgcacgaatgcactaccagcgaacagatgctcgaactgttgcaaagcggtaaggcagtgttcgccgtgtcggtgggttcgttgtggcaccagattgagacggccttggaacaggaagaatatattgatcttgaggctaagccgctgacgactgccacgggccgcccgattgatgaactgactgccatgaggatgcgcaagaagctcgaggcacagcgcttgcaacgcgcaaccgcctgatacatgtatggttgttggcgacttgccggctttggtcggcaggtcgctttgttgtatgtgttgcttttgttgcctgccatcttatgtttttatatgttgcggtgattattatgactgattggaggaccgggtgaacgggattgttgtcggattgttgccgggcgttctgtggatggtcgccgtcatctttgctgtgtccatcatcactataacggtcagccgaggccatctgttcacgccgaaacgccggcgaccgccggtcgatccggtcgactggtcgatggtgaaaacgcatttcatgtcgtttgcggcggcgctgattccgtttcccgt

SEQ ID NO: 821 - DNA, 9973 bp, Unknown
  R14_18m  MAG No. k141_6970
gcgatatcgtcaaccgtcatcatcagagggcttaagatgagcccgtccgcgctgtgcgtgcccatcgatgcgatgctttccagctcgcgggcacgattgttagtggtggattccacgatgacgccgtagccatgttgccgggcctcggccagaatatcctcggcgagttcggagaagtacacctgccgcagatcgggaataaccagcttgagcaaccgggtacgcccggaacgcaggtttctggccgacgagttgactttgtatccgagcctgtcgatggcttccgcaatacgcgcggccatcgcctcgctcatatatggctgtttgttcagaaaattagacaccgaggctaccgaaacaccggcctcatgggccacgtccgccatcgtcactctgtttttgcctcgcacggtgaccaccctacccgactttgctggagatacgaaaacgactcccctgctacgatgagcagcaagggagccgttgggtaattaggcgctatgcgcggttttacagcttgacgacgagtacgccgttgggctggatggcggccgtgtgctcggactcgttgacctgggccagcgaggcgaccagcggttcgccttccacgtccacgaccgcaacatcgtgggtgcggttgaacaggaacacgaagtggttctcgccagtttcgtccgcacgctcgacgcgcagcacttcaccgcgatcgtcttcggccgaagtctcgatgccgagttcctccagcagcacgggcaggctcttggccaaaccctcacggccgagacgggcaccgacgtatgcggccttgccgtcgccgaagtcgttgacggtgatggcgggagcgccgtcgaaaccggtccacttatctgccttgaaggaggcgaccacgtgagcggtatcggccacggaggtgatcacgtcggcgaaatcgtgcgccacggttccgttgtccaagtcaaggtggtccatggcaccggggaagtcgttgcccatcggggcgaattcctcaacgcgcacacccaccacgtcacggatggagccggggtagccacccagccagacgtgatccttgtcgtccaccagaccggtgtagtaggtcacgaacagcttgccgccgttcgccacatactcgcgcacgcggcgcgtggtctcttcggacaggatggtcaggctcggcagcacgacggcttcgtactcgtcccaagggccgcgaaccggcaccacgtctgcggtcagaccgttgtccgccagcgcgcggaaccacgcgagcggctcggtccaatggcgtacctcctgagtaggcgtggcggtgtgttccgtagcccactgggactcgtaatcgaagacgacggcgaccttggacttgaccagcttggtgctcagcaggccctcgtcagcaagcttgttgaggtcggcacccagctcgcacacatcgcggaagatctgggagtcggggcccgcgtgaggaaccatcgaagagtgccacttctcggcaccggccttggactggcgccactggaagtagcagatggcgtcggagcccatggccaagtgagccagggagtcgcgcaccaattcgccgggttcgacgcgatagttgatcgggcgccaattgacggcggaggtggagtgctccatgaggaaccacggattcttgcgggcgatgccgtcgcacagggaggccgagtaagccagctcgtcgaagtgagcttcgccaggcgtgaagtagtgatcgttggacacgaagtccacgtcgtaaccccacttgtcgtaatcgatgacggcaccgccggcggagaccatgaagttggtggtctgcggcttgggggcgatctcgagcagggcatcgcgctcggccttgtaaaagtcgagcagggcgtcggagctgaaacgcttccagtcaagcagtttgcccgggttcatgaagttgccatcgccgatgaagcgcggcgggatgatctcggagaaattgttcatgcgctgcgcccagaaggcggtgccccaggcgtcgttgacggcgtcgatggtgccgtacttcttctcgcaccacttctggaaggcgcgctcggcgtcttcggaatagtcgaagcggttgtggcagccgtactcgttgctcacatgccaagagaccacataggggttgtccttgtagtgctcggccatcttgcggcacaggttgagcgcgtagtcaaggaagaccgggctggtggcgcgccagtgctggcgggcaccgggctggcagacgtcgccgcggtagtcgacccagaggatctccgggtgggcctgggtcatccacatcggcggggatgcggtgccggaggcgagatcgacggcgatgccggccttgccgagcttgtcgatgacgcggtcgagccaatcgaagtcgtacacgccttcttcgggctcaagcttggcccaggagaagatggctacggagacgaggttgacgccggcctgctgcatgagggctacatcttcgtcccacacttcctcaggccattggtcggggttgtaatcgccgccgtaccagatgcggggcttgttgcccgcaagcggctgcggccacttgaactctttacgttccatgatgattcagctcctttattgaattttatcgataatctgcgtccgcgggaataaacagcccacagggctgtttgcctaacggctcagctcgtcagagggggggcttggcactattttacctccctctgatgaggaaggttgtctcggcggagccgggacggagggagggaccccgccgcgaggcggtgaagacaccgcgtcggcggagccgactccatcactccttgacggcgcctgcggcgagtccggactgccagtacttctgcaggcacaggaacgcgatcaccagggggatgatcgtgatcagggagcccgtgatcaccaggttctggatcgcctggccgcccgcggtcgaggcctggtccttccactggttcaggccgatggtcagcgggtaccagtccgcgtccttgagcatgatcaacggcaggaagtagttgttccacgtcgccacgatcgtgaacaacgccgtcgtcacgatgttcccgatactggccaacaacacgctgggggcgagcacgtcgatgtccgtgcccaggaaatcgttcaacgaatccaccaggccgtacttcgcgccatacacgaaaccccagatcaacgtcgacaccaccgccggcaccgcgtagggcaggaacgtcgagatacggaagaacctcgtgccatgcagcttcatcgaatccaacgccagggccatcaaagccgacaggcacagcatgatcggcacctgcacgcacgtgaacagggccacacgaccaacactgctccagaactggccatcacccaacaggcgcgcgtagttctcgaagccgacgaacttggtgccgccgatcatctgcttcttgaagaacgaaatataaacggcgtacacgatcggcacgatgaacacgaacacgaacaccaccgcaaaaggccacatgaatttccatccacgccaatcggccttgtgcttattcacacgagccttgcccgaatgcacgggcgcagctgcgatatcggctgaagccattcccaacccctctccttcgaaggttgaccaaaatgtttgcgttatcatcataacaccatttgtaacattgtccaatcgtgttgagtaccgtgttgaattaagggtttctcagtcactctgctacaatggtcacgaagacaacgatgttatcgttaccgtaagcgtccctaagataagcgttgtaaacgaaacaccgacattaatgagtcaagcgagggtgaaatgtcgagaccaacacaggtgtccatgcaagacatagcgaaagccgccggcgtttcgccacagacagtgtcccgcgtggcgaatggcagcgatgcggtgaaacccgaaacacgccagcgtgtcgaagctgcaatgaaacgccttgggtatcgtccgaattatgcggcccgagccctaaagcacggccgcttccaggatatcggcgtggtgatgttcaacaccaccgcgttcggcaacgcccgcatccttgattctattgtggccaacgcggccgatgacgattattcagtcaccatccagaccatgcgccacggtgcggaacgcacgctttccgccgccatcgatcgcatgcagcgtcagccggtggatggtgtcatcgtagtgctggaggaacgcatctccgatttcgtcggatacaagcctccgcgagaacttccagtcgtgctcatctgcgaatccgccgccgaccactgccccaccgttgacgccgaccagtatggctgctcgaccgctatcgtcgattacctgatgggcaaggggcacaagaccgtctaccacattgccggaccgtccacctcgcgcgccgccgaaagccgcgcccgcggctggcgagaagcgttggaacaaatgggagcacgcgtaccgagcatgtacatcggcgattggtgcgcggattcaggctatcaggccggcgtggcgttggcccacgaccccgactgcacggccatctacgccgccaacgaccaaatggcatacggcgcaatgctcgggttgcagtcagcgggcaagcgcgtgcccgaggatgtcagcatcgtgggcgtcgatgattcgctggtagatatggttccgcgcttgaacctgacgaccatgaagctgcgctttgacgacattggcgccaccgccttctccatggtccgccgtcaatgcgaaggcgagaagataccggtcggcgtcaaaaccgtaatcccgccggaactgatcgaacgcggttccgtgcgcgacatcagctgacgagcggcatgtgctggcatccactggtacctgtcagtgattcacctgtcagtgatccataggcaattccgcaccgaccaatcgactcggttgtgcaatattctgcacatttccaactatgtgcagaatattgcacactttactatactgtgatatattttgcacatgattgtcatggatatcgccgaatacgcgcggcttatcaaggatgaaaggcaacgccagggcatcagtcagaccgacatggcccaacggctgggcgtgtcacgtcgctggctgatcgaatttgaacacgcccgagtccccaatcccggattctccaccattctcagcgctctgactgagcttggcttgtcgctggatgtctgcaaaaccccgcagcccgccgaactctatgaatggtgacaccatgagcgaaaacactctcaatgcatttctcggcgaaacacccatcggccagtttcgaagaacaaacgatggcagcattattttccaatatcacgattcctatcgttggtcgcaatcacccacaccaatatcgctttccatgcccattaccgcagccgaatattcaggcgacatcccgcgtaatttccttgaggccctggtcccggaatcccctcaggcccgagatgaagccatgcgattgcatcatgcccgatcgacaagcgcatttgatctgttgcaagccatcggattcgatgccaccggcgcattacggctgtccgccgacccgcacttgcccatagatgacgattcgcttattccaatcagcgattcgcagatcgcgaatcgactacgcgcagccgcccccacaggcatccagtccgcaagcgtagacgagcattggtcggtcgcggggcagcagggcaaaatcgcactgaggaaccgcaatggatcatggttctccaccactggaatcgcgcggacgactcatatcatcaagcccggcataccgacccttccacaccaagcattcaacgaacacatcaccatgcgcattgtggaggcgatgggaatacccgtggcccacacctcttttcacatctttgatggggtcccagccatcatcagcgagcggtatgaccgtatagtgtccgccaatggtacggtgacggccctgcaccaagaagactttacccaagcgctgggcattccctcatcgctgaaatacgaggaacacaacggcccaacgtccaatgcatatgcggaaatgttgcgcaagcacggtctgcccggtcaggccgaaagcaatatccgagccttcaccgacggcatcctcaccagttatctcgtcggggcaacagacagccacgccaagaactactcgctattgctcgatggcgcgtccgtgcggcttgccccgctctatgaccttgcttcggtgttcccttatttggggcatggcaagcagatcataaatgccactttggcgatgaacatcggcggacgccgagatcttcttcaattacgccgcaaacatctggaacgattcgcacagcggatgggattagatgaggaatccgtgattttacgattccacaccttggtggataggctgccggaggcattcgacagcaccgtgcaacccgctcacgacgttatcgcgagcattggtgcgcaggaattcatcgatagctatcgcaagcgcatcatgatggtgtacgacgatgcaatgagctggatggccagtcgaaagggacagtgattcggacgggcggggattggtctcgccatcccccccccctaagaaatcagatcttaagcggcacacgggaaacgaattcgcgcttctcgcctgttattggatcggtgaatcgtagcacacgcgccactaattgcagcggctggctgaaatcgtcgtaggggcgtgtctggatgcgcgggtagaagtcgtcgcccacgatgggcaggccgagcgaattcatgtggacgcgcaattggtgggttttgccggtgcgcgggtggagtgtgtagcggcagatggggtgatttcccggatggggaccaccctccggcgcttcgcgccacctcccgccagcgggagggaaacagaggtcgccgcgctcgatgagggtttcggcgttggccaaacccggttcctcgaatgcggccatcgtgccgtgttccttggtgatgtgcgatcggcgcagcaatgggaacgggcgtggcggttcgacctgcatgatcgtgccgaatcgtgggccgctgatcggccggcagggtgccaggcattcatagatcttgacggcctgccggttctggaacagcatctgatacgcgccgcggcaggccgaatcccgcacgaacaccaatacgccggcggtcatgcggtccaatcggtgcgctggcgtgatgtccggctcccccagccgctcacgcaatcggatcagcgcggtctgccgataccacatgccgcgtggcatggtggccagaaaatgcggcttgtccaccacgatgatccgctcgtcctcatacagcacgtccatctcaaacggaatatgaggctcgtcaatcacataccgatgtggcttactcaacggtcacggacttggcgaggttgcggggcttgtccacgtcgtagcccttgagctttgccatgtccatggcgaacagctgcagcggcaccacgtcaaccagcgggctcatcagcgttgggcaggcggggcgccagaacaccacgtcagcgtaccgttccacatccgggtcgccctgctcggccacggcgatgatgtacgcgccacgagccttgacctcctcgataccagagatcaccttggcgtgcaacacattgcggccgcgctgcggcggcacgatgaacaccacgggctcaccctcgtccaccagcgcgatcggtccatgcttgagctcgccggccgcgaagccctcggtgaacgtgtaggcgatttccttgagcttcaacgcgccctcaagcgccaccgggtagcccacatggcggccgaggaacaagaaggagttggcgttcaccatgcgctcggcggccgcctggatggtcttgggctgggtgtcgagcacccactgaatcttgcgcggcatgtctttcagggagtcgagcatctgatgaatctcatcgcggaacatcgcgcccttgacctgcgccagatacaggcccagcaggtaggcggcggtaatctgcgccacgaacgccttggtggatgccacggcaacttccgggccggcgtgtgtgtagagcacggcgtcggattcgcgcggaatggaggcaccctgcgtgttgcagatggccagcaccttggacccctgttcgcgcgcgtggcgcagggccatcagcgtatccatggtttcgccggactgagaaatggccaccacgagcgtacgcggggtcagaatcgggtcacggtaacggaattcgtgcgcgagttcgatttccacggggatacgcacccagtgttcgatggcgtatttggctacctggccggcgtagctggcggtgccacaggccacgacgatgattttgtcgatggccttgaagtcgtgttcgtcgatacgcacttcatcaagggtgatgtcgccattcgtgtcgaagcggccaagcagggtgcgctgcactgcggcagggtcttcgtgaatctccttgtccataaaggaatcccagccgcccttttcggcggccgaagcatcccaatccacggtgtaggtcttcgggttttcgaccacgttgccgttgaaatcggcgacgatgaccttgtcggcggacacgcatacggcctgatcctggtcgacttccatggcgcgcttggtgtaggccacgaatgcggcgacgtcggaaccgaggaagttctccccctcgccaaggcccacgaccagtggcgaatcatggcgggctccgaccacgatgtccggctggcggcagtcggtggccagaatggtgaacgcgccttcaagcatgcgggccatacggcgcacagccttgaacaagtctggcttgccttcgtccgcgataatcttgtccacgatcttgccgagcagcttagcggccacctcagtgtcggtggcggaggcgaatcggtagccttcggcttgcaggtcgaaacgcagctgagaggcgttttcgatgatgccgttatggatgatggccaccttgccgtccatgctggtgtgcgggtgggcattcacgtcgctcggctcgccattggtggcccagcgcgtgtggccgatgcccaccgtggcgagcggcatcggcttgcgctcgatgtcttcgaccaggttcttcaaacggccggccttcttgcgcacgaccaccttatccatgccgggcgcggtcagcgccacaccggccgagtcatagcctcggtattccagacgttccaggccttgcaggcagacctccaaaggcttgccgcatgccgtttcaatatttcccgcgtatccaacgattccacacatggctcaccagcctagcggacgattattgcgcaaagcgaatccaacccgccgcctttgcaggattggaacatgccccttcgtgaaaagcgtacgctgagttcatcagcgtacgcttttggagctgcaacaacgagccttcctacagcacgtgctgtaggcggagccgtaaagcggggagcccagtgggctccccgtaggcgacgccgaagcacgacagtgctgaggtaatataacagccttcctacagcacatgctgtaggcggagccgtaaagcggggagcccagtgggctccccgtaggcgacgccgaagcacgacagtgctgaggtaatataacagccttcctacagcacatgctgtaggaagtccttaaacctaggctcggtggggtggtcgatgatgtcggggccgcccttttctacgactacgccgccgtccatgaacacgatctggtcggcgacttcgcgggcgaagccgatttcgtgggtcacgcacaccatggtcatgccttccttggccaaggaacgcatgacgttgagcacttcgcccaccagttcggggtcaagggcggaggtcggctcatcgaagagcatgatctccggcttcatggccagagcacgggcaatggccacgcgctgctgctgaccacccgacagctgggaggggtaatagtccatgcgatcgcccagaccgacgcgctgaagctcggccacggccaggtcac

SEQ ID NO: 822 - DNA, 2624 bp, Unknown
  R14_18m  MAG No. k141_6977
agccgaccacgaaacaggacgcccagccctctacgacaacgctatcgacaccgactacacccactcaatcggcattcaaaaaggccaaatctaacccccgcgacacgccgagccagacacacattttgacccttaacccgccgaacatgatggagaagatcggcagatcacggccgcgcgacttataggcgctttcgaattcgtcctgatgatcggagttggagcggccgtcggtcatgagcacgatggcggtggtgtattgcgaggcttccgactcgctgggcagctcgtcgagcgcgctcagcaggccttcatagatatcggtgccgccgctggcatcggtggcatcggcctcatgcagcaggtcgctggtgcttgtgccagtggccttgaccgggcggtgggcctcggtttcaaacgggatgagaatgttcacgtcgccgctggcgggctcgatgtacgacttcttggcctggtccgggtcgagcgccgcgttcaggcctttgaccacgccgttcttgccctctccagacatcgaaccggagtaatcgaccacccaaatggtccagctgggcttcctgagcgcggtctggtagacgttgagcgcgctgtcgatcaccgtggcggaggtcatggagaacgtgagtttgccgtcgctgaccgcggcgaggatgtccgcggtggagacgggcttggtggcgccggagtcgtcagcccagccgagtttgacggccttggatttggcgatgccgaacacgatcggcgtggtggaggtgctggccgcgtctttgacgatgtgcttggtgtctcccatcgaaatccacatcgaggaggcaggccagacggcgtcgtgatcctggccgccggccttgagcgcgttcataatctccagcgaacccatgtagtgcatcgtcacggctacgttggattggtcggccgctttctggatggcagtggcgacttccttgttctcggagccggaggcaatgctcagggtggcggtcggtttgccgccggacggctggaaggtctgcgtggtggcggacgtgccgttgccgtccgctgtgccgtcatcggaattattgaacgccgtgcaaccggtcaacgcgagcacgccggcacataccgcggccgcaaccgcggcggcggagagaagacattatgcccataattccatggctctcccgccatctaaagcgggccgggccacaaggtgaccgcacggtgaacaatgggtgaagagctacatcagtacgcggcgcaggcaatcatggggtcgtcgtagaagccgaggatcttttcgaggtagggcttgtaagtgctgttgggcatggagaagatttcgtggcgcgattcggggaagcgcacgatgttcgcctcgccgccgccgtccttgaccagttggacgaagtgattctgcggcttattgagtacccagatgtcgcgtccggactggaagagcagcaccggcgtctccacttcggcgcaggcggacggattcagtatggcccggttgagcttcaacgcctggcgcacccattcgaacgccgcgcagtaggtctggtattcgctattctcgcaacgcagcttgaagtaccagcgttcacgcgcctcggaagcgccctcgttgccttccatcgagaactccggcgtgaagtccgactgcccgaacacacgcttcttgccgaagccgagtccgcacagcgcgccgaccagcacacgggccacgcccagcggcatgccggtggcgggggcgaccatcggggcggagagcaccgctttgtcgaacagggtggggtatcgctccaacacggccgcgccgatgccgccgcccatcgaatggcagaacaggttcagcggcatgccggccgcgtactgctggccgatggtttcggcgaagccggccagatcggccacgtagcgctgccagtcatcaatccacaccatgcagcggttgtccacgtcgcgcgcggacttgccgtggccgcgatgctcgagtacacacaccgagtagccggcaagcaggaagtaccagacgagctcgtcgtacttttcggcgaactcggtgaagccgtggctgatgacgatggccccgcggaaggtggcggtggcgccttgctcgcgaatcgcgtcgaatttggcggagtcgtagcacaggtagtgcagctggcccgaacggccgccggtgtccataatgccggacagcggctcgaccccggccgaacgttcggcggcggacggatcgaaccagccctcctcgcggcattgctcgagcgcgggcagcaccacgtcggccatcgtttcggcgtacttgttttcgtcgatcatcgtcacctgcatggttcccatcttaggacaagcctcacgccgctgaccgcacaggcgcgtaggttgtgagtatgagcgaaaccaatgatgtcaatgacgcaatcaagcatttcccacgcctcagggcgcgcacgctgcggttcggctgcggcgcaccgcgctccgcacagaccgtgggcgacggctcgcgggccctgttcctgcgctccgacggccccgaggatctggtgaccgcactgtggctaagctggttcgacgagtccggcgaacaccatgagaccaagctggccgatccg

SEQ ID NO: 823 - DNA, 15070 bp, Unknown
  R14_18m  MAG No. k141_7060
caagaccgccgcgccctgccgttatatcgccgccgatatcgagaacgcgggcggccattacgtcgacgagcagctgcacgtggacgacgccaacggcttcaagctcatcacgtcccgcaagcccgctgatttggactacttcgtggacgcaatcaaggatgcgctgaagtaactaccgctccttagcggccaactgcccgcaggcaccgtcaatgtcctggccgcgggtgtcacgcagtgtggcggtgatgcccgcgcggtgcaggatctccaggaaccgctgttcgtctcccggcttggaggcggtccacttcgagccctcgatggggttgagcggaatcgggttgacgtgggcccagttgtcgccgtaatggttaagcctcttggccagcaactgcgcatgctcggcctggtcgttgatgccgcgcatcagcgcgtattcgatactgacgcggcgcttggaggccagccaataatcgtgcgcggcatccaacacctgcgtggtgttgaaacgcttgttcatcggcaccagctcgtcacgcagttcgtcgctgggggcatgcagggaaacggccagacgcacgggaatgccttcggcagtgagcttcttgatgccgggcaccacgcccaccgtggatacggtgatgttgcgcgcggaaatgccgaagccttcgggaggcatggcggaaatctgtcgtacggcggacagcacggagttgtagttgcccatcggctcgcccatgcccatgaacacgatgttgctcaggcggccctctcccccggccacttcgccgtcacgcatcattttggcggccacacgcacctgttcgattatttcaccggtggacatgttacgggtcaggccaagcttgccggtggcgcagaacgggcagcccatgccgcagccgacctgcgaggaaatgcacagcgtggtgcgggtcgggtatcgcataagcaccgattcgatgagggagccgtcgaacagcttccacaaggtcttgatggtggtgccttcgtccgccacttggcgggtcacctcggtgatgagctgcgggaagaacgcggcggcggcctcgctgcgcttggctgccggaaaatcagtgaattcagcggcattcacatcgaaatggccaaagtaatggttggcgagctgcttgactcggaacttcggcaatccgagttcggccgctttctcgatgcgctgctcgggcgtcatatccacaaagtgcagcggcggcttgccacggcgggcatggtccttggatagcacgtcacggaaggcacctgatgtgccgccgggagtaatgccggtttccggagtgtcaggatgctgtgtggtcatgatgggttcgcttcgctctcaataacagaaaatagtcaaacatgcaatagaaatatcagaatccaccatacggcgtgccgcatacgaatcagatggctcatgtcttagcccatggcgaacgcatattgaacgatgatttcccccatatatgacatgtggcaccgtgcgatatacacacgatgccacattgttcatgcacgaggcatgcgaatcacagtccggtgacccacagcaaggcgcaggtgaacggtgcactcatcaaaatggaatccacacgatccatcacaccgccgtgtcccttgagcagatggcccatgtctttgatgccgatatcgcgcttgagcatggaagcacacaaatcaccgaacgtgcccacggcgccgatgagaatacccgccacgatcggcacccaccaacgagtggcccatttcgaggcatcatacgtgcatgcgaatacggcgaatgcgccagccatggcgaagagcatcgagccgatcaggccctcaacggacttcttcggcgagatacgcgggctgagcttgtgcttgccgagccaggcaccggcaaacaaaccacccgtatcggagagggcgggcaggaacaccagcatgatggcgtgtgcaatcggatgcccattgaaagtcaacgagatgatgatgcagctggccagcaacggaatgtacaacacggtaagcacggacacagccacatggctgagccgggaatgatgctgttccccgccctcatgattgaacgaggattcgaggcgcgcgctggcatccgtgttggacagtttgccggcaaccgccagagataggcggttgccgacgctgatttttgcgctggccgcgatggcgaccagaataatcgacacgatgatactcagcgacatcgtgatgagatggtacggggaataataggtggcgatgagggtgaaggacgcgcacagccacagcatgaacaccgggatgtgcaggcctacggtggcgaagtccaccctgagctcccacagcgccagaatcatgaacacgactaccagcagcacgaagaggtcgacgctgagcagcaggcacgcgacaataaggatgaccagtgccgcgcctgtggcgatggcctgcggcatgttgcggccggtcttcttgttgatccggtcgagcgtctcctcggcctcttcatggagttgttcgttgcgttccataattctccggacctagtctgaatcagacctccatgatctccttctgcttggtctccagcagagtatcgatctcgtcggtaacggacttggtgaccttgtcaagatccttcagcaggcgatcgccttcgtcctcacccatctcgccgtccttgacggccttgtcgatggtttccttggtcttacggcgaatgttgcgcacggcgaccttgccgtcctcggccttgcccttggcgagcttgacatactccttacgacggtcctcggtgagttccggcatggtcaggcggatgacgttgccatcacggttcgggctgatgccgaggtcggagttgcgcagggccttttcgacggcaccggcctgggaagcgtcaaacggggtgacggacagggtgcgcggttcgggaacgccgatggaggcgacggccttaatcggggtgggggcaccatagtagtccacggtgatgccgttgagcagggccgggtttgcgcgaccggtgcggatgccggagaagttttccttggtgttttccacggtcctggccatctgttccttggcctggtcgataagagacatattcactccttgtgtgttggtgttcgtctgtgttgttcgtctatgaacgtttgattcgattgtaggcgtttgcggcttactcggccacgcgcgattcggcggtggagaccagcgtaccgatttcatcgccgacgagggcgcgggtcacgttgcccggctcttcgaggccgaagacgcggatgcgcttcttgttgtcgcgggccatggacagtgcggaggcgtccatgactgccagattgtccacgagggcgcgattgtagctcagggtttcaaaacgcttggcgttctcgtccctgcgcgggtcggcggtgtagacgccgtcgacgccgttcttacccataagcacttcgtcgcagtggatttcgagggaacgctggatggaaaccgtgtcggtggagaagtacggcatgccggcaccggcgccgaaaatcaccacgcgacccttttcaaggtgacggatggccttgagcggaatatacggctcggcgacctgtcccatggtgatggcggtctgcacgcgggtggcctgaccctcctgctccaggaagtcctgcagggcgaggcagttcatcaccgtgccgagcatacccatgtagtcgccgcgggaacgatcgataccggcctgctgcagttcggcaccgcggaagaagttgccgccgccgaccacgatggccacctgcacaccctgttgtacggccggaacgatttcctcggcaatgcgacgaatcacatgggtatcgatgccgaccttgccaccaccgaatgcttcgccggacaacttgagcagaactctgcgcggcttgtcgctatcagtcatatcatgcctttctcaaaaccgaaagtgcgaaattatccgtagacaagcgtatcggtttacgacgacaccccctagcaacgacacccttggaatagcgaaacgccatccgattattgaataaccggatggcgtttcgctgaaattacgctaagcgcgtggagtaagccttaggctcactcctcttcgcccttgccgacctcgacacgagcgaatgcggtggcgttgccaccgacttccttgaacaggtcgccgacggtcttggacgggtccttgacgaacggctgctcgagcagcacgacttccttgaagaaagcgttgagacggccttcgacgatcttcggaacgatcttctccggcttgccctcggccagggacttctcggtggccacgcgacgctcggactcgaccacatcggccggaacgtcctcgcgggtcagccacttagcgcccatggcggagatctgcagagcagcttcgtgagccacggcggcgccggccttgtcggtggcgatcatggcgacgatgctcggcggcatctcggcggacttcttgtgagcgtagacttcgacgtgctcgccggagatcttggcgaactggccgaccttgacgtgctcaccgaacagggcggcggcctcctcgacagccagcttgacggtggtgtcgccagccttggcctcgagcagctcgtcagcggagttggcgtcggcgtccacggcgtagccgagaacttcctcggtgaactcgacgaacttcggggtcttggccacgaagtcggtctcggagttcagctcgacggcgtagccggtctcgccattggcggtctcgacgaccttggaggcgatggtgccttcctgagccttgcggccttcacgcttgccggctgcggcgatacccttggctcggatgatttccttggcgcgggcgacgtcgccttcggcttcggtcagagccttcttgacgtcgagcatgccggcgccggtgtcttcacgaacctgcttgatcagtgcggcggtaattgctgccattgattattctccttgagaaattttgcttacccatgaacgatgggaagcgcttattcaggcacttcccatcgtagagcatcactcggccttgggggcctcggcggtttcgccctcggcggcagccggagcggcggcttcagcggaagcctcggcaggagcctcgttggtcaggagttccttctcccaagcggccatcggctgctcggcggcttcgccctcggccttgttggcgccggagcgctccagcagaccttcggcgacggcgtcagccatcaggctggtcagcagttcgatgccgcggatggcgtcatcgttggccgggatcgggtactcaacggtgtccgggtcggcgttggtgtcgacgatggcgacaaccgggatacccagcttgtgagcttcctcaacagccagggcctccttggtgatgtcgacgacgaacatcgcggacggggtgcggttcatgttgcggataccgcccagctgcctgttgagcttgtccttctcgcgctcgagcaggaggagctccttcttggtcaggccggagccgtgcacgtcggtgaagtccatttcctcaagttccttgaggcggttgacgcgcttggagacggtctggaagttggtcagcatgccgccgagccaacgctcggagacgtaaggcatgttcacgcgggtggcctggttggcgatagcttcctgagcctgcttcttggtgccgacgaagagcacggtgccgttgtgggccacggtggtcttgatgaagtcgtacgccttgtcgatcatgtcgagcgacttgaacaggttgatgatgtggatgccgttgcgctgggtgaggatgaactgcttcatcttcgggttccaacgacgggtctggtggccgaagtgcaggccagccttcagcatatcgctcatagtgatctgagccatggtattactacctttcattgtcggttcttgcctggccatgcgcacctgcgtgcagctgctcccccggtttcacgagttgtgcagccgaccgacacaggccgtcgcgagcatgacgcgaatttgttgtgtgccggttgacaatattgggtggttccggacgccagcgactgcgtccgttgccgggtggcacacaagtttcaaggatagcacggagccagtactaagaaaaacaggctcccctctctgaggggagcctgtcgccgtaggcgactgaggggagttacgggcggtaccggcagaaccaccctcagtctcactacgttcggcggctcccgccagcgggagccgggtatggactacttcgcctgacgattgcgcatgtagcgcagggcttcgcggcgttcttccttttccaggcgatccaaatacacgtggccgtcgagatggtcgcattcgtgctgaagcatacggcccatcagcccggagccctcgagcacgacctcgttgccgtccaggtcgatgccacgcacgcgagcgtagtcggcccgacgggtcttgtaccacaagccgggcacggacagacaaccttcatcgccatactgctcgccggacttctcctcgagtacggggttcagaacgtagccgaccttgccgtcgatgttgtaggagaaggccctcaggctcacgccgatctggttggcggacaggcccgctcggcccggatcgtccacggtttccatcaggtcgtcaaccaggcggcgcacggccggggtgatttccttgatctcatcgcagggggtgcgcaggactgggtcgggcacgaccctgatctcacggatggccacttctcgttactcctcgttcttctcgtcagccggccggtccggcttgctgccggtgtcagcggcattgtcggcattgtcggcggaatcgccggtctcgccctcttcgggttcggccttcgacttcttgatcttctccgacacgctagcaatcgaatcagacacgctggttttcatctgttccgaggcctgtttgacctgttcggacgcctgcttgaccgattcggaggatttcttgacggtctccagcgtgctgtcgatgatcttggctgtggcgggcagcggtttgttggatggcttgggcgcatacagatcctcttcgatgacggtggcgtagcgctgcaataccttgggacgcaccactttcatgctcggggtgagcgtgccgtgctcctgactgaattcctcatccagcaccgcgaatttgcgcacggactcagcgcgggagacattggcgttggcctggtcgatgtactgctggataaaggcacgcaccgcgtcgttgtcgctggcctcggcgagtgtcatgtcggcattgaggccctgaccttccagccaggaatgcagcatttcggggtcgagctcaataagtgcggacacgaacggcttgccgtcgccgactactactgcatgagccacgatcgggcaggtgtcgatgacatcctccatcggggcggggctgatgttcttgccgccggcggtgatgatgatgtccttcttgcgtccggtaatgaaggtgaagccgcggtcgtcgatacgacccagatcgccggttttgatccagccgtcggcagtcatcgtctgtgcggtgagttcgggctgcttgtagtagccaaggaacacgttcgggccggtcagctcaatttcatcgtcttcgccaagacgcacgcccatgccaggcccaggcttgccgaccgaaccgacctcgttgtcgtcctcccaattgacgagcatcggagcggcggtttcggtcatgccataaccctggatgaaggtgatgtcatccatgccgttgaagaagtgggccaaatccacgttgagcggcgcaccaccgcaggccagccatttgaggttcggtccgagagcggaacgaatggatttgcccaccgtggccatgtagaacgaatggcgcatgcgctcgatgaacgaatggccgcggccggcctgctcatccttgctccacttgacgaagtgcttgaccgactgggcgaagatatgcccctggatgccggcaccagccttctgcgaggccgcgttatacaccttctcgaacacacgtggcacgcccagcaggtaggtgggcttgaagctgcggatatcggcgagcagtcgcttggcgtcgggaatgtatccgaccacgccgcagccaccgatgcacacgtactggatgtagcgggcgaagcagtgcgccagtggcaggaacagcagcagacggttgtcgtcgtacagcatgccacgcagaatctcgtagccgttaagcacgatgtgcgtgtaattgcggttggagagcatcgcgcccttgggcttgccggtggaaccggaggtgtagaccacggtaagcagatcatcggctttgatacgagcgatagccgcatccaacgtctcatcggatacgccatgcccgaagtcagcgacagcgtcaaggccatcggccttgaaattgaacacgtatttcatgcccggatgattgacacggatctgctcaagcgtctgtgcgcgctggaagtcgccggcaaaggcgatggcgggatcgacttcctcgacgatgcccgcggtctgacgggcggaatcggtctcatagacgggcacaaccacagcgccgattgccgcgcaagcgaaatcagccacaccccactcatagcaggtaggcgagtaaatcagcaccatggtgccggctttgacgccaagtcccaacaggcccttggccacctcgcgtacgcgggacagcatttcagtagctgtggcgccgcgccattggtgggtgttgtcatcctgccattccgcgatgatgtcatccggcgtgcgagctgctcgtttggccagcagcgagtagacggtgtcgtcatcggtggtgacatatctgggttcttctacatgttcacgcatggtcactactataggcgaaccagcctatgacacggcagaaccgtcttccgctgccagcgtaggaatcggtgtgcgggcggggccgtctggtcagcccagatcggcatagatgcacatccatcgagaaccgatgaacttcagtttgaggttgactcgcagattttcctggccgatggtcatgaataccgccatttccagcgtgtccttgccggtgatcatgccgtcgatcaatgtggggacagtgggcagatagcagaatttcgctttgagctccggatgagtgaccatgtgggtgccgagcaggtattgcatggtttgcagccgttccaggcatggttttgtcatggctctgttgagatgtgcgacgctgagtctgccacgtatcgcgtccgccgatgtgcaggcgatgcggcatgcagccatggccatggaatgacattccttcgcattcagcccgcctatgaatgtgggttggatatgataccgcaccgggcgatccgacagctccacaacgatgaatccgtcataactcggcaacggcccgtactgatatgtgccgtggaaaaatcccgaatactccatgatgaccccttcaagcccccttgcaactcaccatcatcggcgagcgtttgtactacaacatcacgaaaggcgcgccaagtcaaacgacttgagcgcgccttagggcaagctaagcctcctgcatggagggcaaacccccattttcaggggggggtaatcgggattatcgtgcggaatacgggttgaccaccatgccgcaacgctggaagttcttcacgtcgacgtagccggtggaggccatcgcgcgcttgagggcgccgatgaagttggtcttgccgtccgcctggtggctcggtccgaacagcacctgttcgagcgggccgaccgtgccgaccgtggtgcggtagccgcgcggcagcgtctggtggcgggcttcggaaccccagtgggtgcccttgccgggggcctcggtggcgcgggccagcggcgcgccgagcatgaccgcgtcggcgccgagggccagggccttgacgaagctgccggagtcgcccatgccgccgtcggcgatgacctgcacgtagcggccgccggattcgtccatgtagtcgcggcgggcctcggccacgtcggcgatggcggtggccatcggggcctgcacgccgatggtctggcgggtggcggagaccgcgccgccgccgaagccgacgagcacgccggccgcgccggtgcgcatcaggtgcagggcggcggtgtagttggatgcgccgccgacgatgacgggcacgtcaaggtcgtagatgaacttcttgaggttcagcggttcctggccagaggagacgtgctcggcggagaccacagtgccgcggatcacgaacaggtccacgcccgcgtccaccacggtggagtagaactgctgggtgcgctgcggggagagcgcgccggccacggtgacaccggcggcgcgaatctcgcgcagacgctgcgcgatgagctccggcttgaccggctcggcatagatctgctggatacgctcggtggcctgatcggccggcagcccggcgatttcgtccaacagcggggtcgggtcctcgtaacgggtccacagaccttccaaatcgagcacgccgagcgcgcccatcttgcccatggcgatggcggtggccgggctggtcaccgaatccatgggggcgccgatcaccggcacatcgaactcataggcgtcgatctgccaagaggtggagacgtcctcggggtcgcgggtgcgacgggaggggacgatcgccacatcgtcgagtgcgtagccgagacggccctttttgcccaaaccgatttcaatttcctgagacatggttgtaagcctattgcccgggtgggacgccaacaaggtcgtttcccacggaccggacgattgcttcaagtcgttacaaacatgcgctatgactaaatcatcttcacaccatctatcaggaggaagcatggccaaaatcaaggtcgaaggcactgtcgtcgaactcgacggcgacgagatgacccgcgtgatctggaaggacatcaaggatcgcctgatcctgccgtacctcgacgtgaacctcgactactacgatctgggcatcgagcaccgcgacgagaccgatgaccaggtgaccatcgacgccgcccacgccatccagaagcaccatgtcggcgtcaagtgcgccaccatcacccccgatgaggcccgagtcaaggaattcggtctcaagaagatgtggaagtcccccaacggcaccattcgcaacatcctgggcggcacgatcttccgcgagcctatcgtgatgagcaacgtgcctcgtctggtgcccggctggaccaagccgatcgtcgtggcccgtcacgcattcggcgaccagtacaaggccaccgatttcaaggttccgggcgccggccagctgaccgtcaccttcactccggacgatggctccgagccgattcagcacgtggtctacaactacggcgaagacggcggcgtggcccaggtgcagtacaacgtcaacgattcgatccgcggtttcgctcgtgcctgcttcaactacggcctgatgcgtcattacccggtgtacctgtccaccaagaacacgattttgaaggcctacgacggccaattcaaggacatcttcgctgaggtgttcgagaccgaatacaaggacaagtacgccgaggccggcctgacttacgagcaccgcctgatcgacgacatggtggccagctccctgaagtggcacggcggttacatctgggcctgcaagaactacgatggcgatgtgcagtccgactccgtggcccagggcttcggttcgctgggcctcatgacctccgtgctcatgaccccggacggccagaccgtcgaggccgaagcggcgcacggcaccgtgacccgtcactaccgccgctggaagaagggcgagaagacctccaccaacccgatcgcctccatcttcgcgtggaccggcggcctcaagcaccgcgccgatctggacggcacgcccgaagtccgtcacttcgccgagacgctggaaaaggtcatcgtcgacaccgttgaaggtggtcagatgaccaaggatctggccatgctcatcggcccggacgaaccgtggctcgacaccgacggcttcatgaacgcgctggacgagaacctggccaaggctctggccgagtaaatcatcgaacacatcgtgcggacctacatgggtcatgtcatgtcgccaactgtcatgattgtcgtgcttcatctggaatgttcctcagcacgacaatcatgacagttgttcgatacacgcgcgaaatacccctaattgttcccggatatgtggcgatttgtccactggtccgggactttttcgtatacggcctactagaatcgtgattcagtttgttttcacgcccgcttgaggaggtttcgccgcttatggtgttcgcacgccgctcaaccaccctgctcgccgccattgtcgcatcctgcgcgatggtgctgtcactgaccgcgtgcacctcagacaataagaccgttgtagatggtcaaaccacggtgacgtccaattctgccggcggcgtggccgtgttcacgccttcggacggcattacgctgaatcagcagacgccactgaacaaatgggcgaagctggtgcccgacctaaccaaggccctggtcgacgccggtttcaagaaaggcgatatcgatcatacgacgtccgactcgttggacaagcaaagccgcgccatccaagactttgtggtcgatcatctttcgaataacaccacggacgattccggcattgccatcgcgcccgacaacatgacattgctcgtggctccagtagtcgaggccgacgcttccactcgccaatacggcgattacgtcagccagaacctgagcaccaacgatgccacggatgagggagctacttctgacggtgattcttccgaagacagctcttccaaagatgactcgtccaacactgagagcgacggcactgcatcggacgagcaggcgcaggccgtggaccggctggtctcatcgctcaagctggccaaggaatccggcatgcatgtggtattgctcggcaacagcatcgaggggtataggccggacgccttcgtcaagttctcggacgcccagaccatcggcaagctacaggcggaaaagatggtgtccaaactcaagttggataaggccagtaaagacaaccccaaatacattgaggtgctgctgccatacaccgccgtggacgaaaaaggcaacgccaacgattccacgttcgcccaagaggcgttccgtggtatctggcaggtactgggctcctactatcagaagggcgttgtggaaagcccttcaggcaccttggacggcaaatccacggaaaacgattggcaagccgtggcctacgatgccgccaaggaaggctccactgcgaaagtgcttgacaagcgtctggcaaaaaccgacgggcagtccacactcacccgtattgacggtatcatcacgatgaacgactatatcgcctccgaggtcgtcaaggaattggacgatctgagatacaccggctctgccgccgatatcaatccgcagatcaccatctcgggcattgtcggcaatatcaccggcaagagggatctcagccgcgacgcagtgccggacccgatcaaatcccctgaaaacgacaacgcaaacgactcatccagttccgatgacgatgcggataaggacacctccgcttccgacaaggaccgtgactcgcaatggcctctggtgaccggatacggcgcgtacgtctcgaacatcccatccatcgtcaatggcaagcaatggatgaccggcatggaagacagacagaccatcgccacggatatcgctcaggcctgcgccaagctcaacaagaacgaagcgctgaattccatgccttcaatcaggaactccgaggtaggcggcgtgaagaagatcccgaccatcaacgaaccgttgctggctgtcagcgccagcaatctcaagtccgcgctgatcgcccccggatatatctccttggccgatgccggtctgtgattcatactcgtcacgccgctagccgcctgcgatgcctcttccgtacggccctgttccggccgacaaacattgctgaatcatgacggcttcagtacgatttttcgactccccgcatattgctgtgggtcaagatagtcggccgttcctcgcttgaggccccaatgcaggcaacggtcttcgcaatggtccgagttgccctcaacgatgcctacgggctgtctgcgggagatcgtatcccccaccgagagctcggtaacagccggttcgaatgtcgacgtgacacctccacgatgccgtacactcaccgcatctttgccagctactttgccagcaaaactcacggtccctgcctgtggtgacagaatcacggtaccttgctccgcagcaagatccacgccacgatgacctggtgcccacgggttgatcggccgctcgaactgttgttcgacctgtggatcgtcgaccggccagtcgaaccgggattcgcactgattgccattgcgccacgccagatcagacatatcggtgaaatcctccaccgtgtatgccgcatctccggtcaccgcagtatccgcatgcgcaacatgctgaggcgtggatgccagtcccactcccaaggcaagcagcaggccgataacggtggccaacgcgattatggcatccatacgccgttgccgttcctgagcccgctgacgcgcctgctgacgccgcctgctggcacgtcgggcttcgtcgcgacgccaatcaaacaacagtggtgcattcatgagattcctccccatagtgtgagtgtgatgcgattccggcttctttgccggtgatacccaccttgaggggtccgaaacaggatgtccagccagaacgacctatgtggttccagcttccgaagttatccacaatgaaatttcgcgtgacagtatcgccgcatcgtcatcatgttgtatgagtgggtattcgatgagtctgattctgcggaattcagcgcgacatgccatacacgcatgtaatttgctttttcgtggcaagcatgtaagatgtgtgacttgtgcgcgagagaaatctcaaacacagcagacattcctgcgtagctcagttggcagagcatccgactgttaatcggacggtcactggttcaagcccagtc

SEQ ID NO: 824 - DNA, 14409 bp, Unknown
  R14_18m  MAG No. k141_7155
gccaccggtatggtcggtcagcgttttatcacgctgcttgagaatcacccgtggttcgaggtggtcacccttgccgcttccgcgcacagcgccggcaagacgtatgccgaggcggtcggagaccgttggaagatggaaaccccgatgcccgaatacgtcaagaacatggtggtcgtcgatggcgacgatgccgagtccgtggcctctggcgttgatttcatgttctctgcggtaaacatgccgaaggaccagattcgcgccattgaagagcgttatgccaagaccgagaccccggtggtctccaacaacagcgctcaccgttggaccccggacgtgccgatggtggtgccggagatcaacccggagcacttcgaggtgatcgagcaccagcgcaagcgcctgggcaccactcgtggtttcatcgccgtcaagccgaactgctcgattcaggcctacacgccggcactggccgcatggaaggaattcgagccgcgtgaggtggttgtgagcacctatcaggcgatttccggcgcaggcaagaccttcaaggattggcctgagatggtgggcaacatcatcccgttcatctctggtgaagaagcgaagtccgagaaggaaccgctcaaggtgttcggccatgtggacgccgaaaagggcgagatcgtgccgttcgacggcgacctcaagatcacttcgcaatgcatccgcgtgcccgtgctcaacggtcacaccgccaccgtgttcctgaacttcggcaagaaggccaccaaggaagagcttatcgaccgtctggtgaactacacgtccaaggcttccgagctggagctgccgcacgcgccgaagcacttcatccagtacctcaccgaggatgaccgcccgcaggtcaagctcgacgtggactacgagggtggcatgggcgtttccatcggccgtctgcgtgaggattccatcttcgattggaagttcgtgggtctggcccacaacaccctgcgtggtgcagccggcggcgccctcgaatgcgccgaaatgctcaaggctctaggctacatcactaagaagtagttgaatctcgttaaaatcgcaaaagccctccgcaaggagggctttcatcgtattaggcgcggaattcgcggctcagcggccagtaccgccgtacaccacggcttcgatctgatcggcatcgagaccgtaggcagtgtgcagcgccttgacggcgtcgttgagctggtcgagcggcacgagtgcggcgatacggatctcggaagtggagatcatcagcacgttgatgccctcatcgctcagggcctggaagaacttggcagccagaccggcgtgggtcttcatgccaacacccaccacggctaccttgccgacgttggtgttcacatcaaaggagtggtaacccagcacttcctgcttgtcgagcagcgtgttctgcacctgcttgacggccgattcgggcacggtgaaggagatgtctgcagtgccaacggatgcgccggcctgcacgatcatgtccacgttcacgtcggcggtggccagctcggtgaacaccttggctgccatacccggctcgttcggcacgccacgcacggtggccagcgcctcggaacgatcgtgggcaatgccggaaatcaccggtgcctcggggcccaggtcagggaacaggtcgcccatggatttcgcttcttcttcagtcatgtcttgccttgtcttggttgaaattacttacgattattgttcgctgtagccgcgctcagtcgaggttcggcagcgtgcgcgggtcaatgccgtcaggcacaaccagcgtgccggggcgacgggagaacgaagagcgcacgtgcaacggcatgttgaaacgctgagcgtactctacgcagcgcagtgccagcaccttggagccgcaggaggccatttccagaatggcttcgtagccgatggaaggaatacggcgggcggaaggcacgatgcgcggatcggcggtaaagatgccgtccacgtcggtgtaaatctcgcagatgtcggcaccaagggccacagcgagtgccacggcggacgtgtccgaaccaccgcggccgagcgtggtggcgtcacccttggcgttgatgccctggaagccggcaacgatggcgatgtctcccaatgagagcgcgttcttcacgcggtccggtctcacggccttgatgtgggccgcgccgtaacgggtgtcggtgaagaagccggcctgctgaccggtgaaggagtgggcgcggctgccttcggcgtgaatggccatggccagcaggctcatggaaattcgctcgcctgcagtcatcagcatatccatctcgcgctcgggcgggttggagtcgatgctcagcgcctgatcgataaggtcatcggtggtatcgcccatggcggagaccaccacggccaccttattgcccttcttctccgtctccacaacgcgcttggccacacgtttgatcgaatcggtatcggcgaccgacgagccgccgtacttctgcacgatgagagccactgctgtcctttgttcttctcttagggatttgtttggtcgatattctacgcaaacgcaacgattataagggctgtcgcgttcaccccgcgaccccgcgccggcatgcggacacgggtatggcctacgttgttcagcaaatattcaagttttcaccggtggttctttgagacagccgcatccatcctttgagattcgagcggttaactatcaattaccggcaaacgaaagcaaaccggcgaggtttccgcagaaccccataactgaataccttgtcatgggcgaaactttgggctacaaagtggaccgcatttcggtgattttgccggatgacacgtcgaagctcaagattgtgccgggtgaggaccgtgtcaccttgatgacctgtacgccatacggcgtgaacacgcatcgactgcttatctccgggcaccgcgtggcaattccgatgccggcccccgagccgaatgacgtgcttgacgcgcgcaatatcgcccttggtgttggtctgggcatactggcggcaggactgttcattatctggttggcacgacggcacaaggccgcgcgcatcatccgccacggcgcattctggccgtggatgcgccgcaagggcgaaagcgccaatgatacgctggcctaggcctcacgccgaccggccagcgccctgcccagcgtgatttcgtcggcgtactccaagtcggagcccaccggcaggccgctggcaagtcgggtgaccttgacacctacgggtcgcaatagctgggtcaagtagctggtggtggcctcgccttcaatattcgggtcgagcgccataatgacttccttgacctcatcgccttctaagcgtttgagcagactgggaatacgcaggtcggcagggccaacgttggccattgggttgattgcgccgccgagcacatggtataggccgcggtattcgcgcgtgcgctcgatgctcatcacgtccttgggctcttcaaccacgcagatcaccgaacggtcgcgtctcgggtcggcgcataccgggcaggggctggattcgcacacgttgccgcaaatatcacagaagcggatcttggccttgacctcctcgatggcctcggccaaatcgcgcgcttcatcttcgggcgcggacagcatgtagaaggcgatacgctgcgcgcccttcggcccgatgccgggcagccgcccgaaagcgtcgatcagtcgctgtattgcgccgtcataagcaagtgccatgggtattcctcgttattcgtcctcattattcatccgagtgcttcttggcaggctggatgttcttggggttcttcggatcatctgccgcgaattgctcgacttttttgacctcgaatagctttttcagatcgtcaagattcatggccgtcgcctcgccgagcgactggtcgttcatcgagtattcgtcgtcctcggccgcgacttgcggttgcggctgcggctggctattccacgggtcggcattcggcgtcggctgtgcgggctgcggttgattccacgggtcatcgccggcagccggctgcggaaccgattggggctggttccacgggtcatcgcccgacatattgcccgacactgtctgaggaaccgaagaagccggagtctgggactgcggctgattccacgggtcgtctcctggctgcggagccgcctgagcatggttcccctgcggctgattccacggatcatcgtgaggagactgctgatatggctggttccacgggtcggtttcgaccggttgcagtgccagcgaggccgtagcctgagattgcggctgattccatggatcatcgcttgcgccggcaactgccgtagcgggagctgcggtggctggctgccccgtggactgtccagtgggtccagcggacgcaacggacgcagcgggtgcaacaggagcagccggagcggcccacggatcaacaccatcactgatgtccggaaccgcaacatgcttcttgtgatgctcttcgggcgcaggcgcagcagcgggctcgttaggtgcgaacccgtctgcagattgcggtgaagcgttgcttacggccggcttggcccaagggtcatcgtcactccaactcttcgccgccgtggatgcactggattggccggctcgatggctgtcgtccgtatcctcggcttggcctgttgcagtcggcttcggagctttcggctcgctccccatatgaatgcccagacccgcgcccaaactcgacgcggccaatccggccttggccatggcaatctgctgcttgaccttggccaattgctccgggctcatacgtttgacggattcgactcgctcgccattcgccgcgaccgcagaaggtgcaataaccgcattggcaccgaactcgttgcgcacggcatccaacaccacggacgccgccttcttaccgctgttgtccacggccaaggcgaaagcgtgctggctcagcgacttgtcgaacgtcatcgacaggcaaggcagactcttacggttgggaccgaattttacggtcggcaccttgtctcgtgacacatattcacgaatggtttccggcaaagcggcgacggctgcatcccacttctcgtcgatggaccgattatccgatgccgcaggcgaggtcaccggttgggccgggacggccggcgacgtggcgggatcaccccaggcattggcagcagcagttgctgcggcaggttgcgcagacggagagcccgcgggccggtcgctgactgggctgctgacagggccattgtctcccacagcggattcatgggaagcggtgctctgaggcgcggctgcttgctggttgcgtgcagcaccggagaatccaccatgtgagactccggcaaacccgcctcgcgatgcgccggcaaaaccactggcacccgtaccggaagcggctgacgtagtcgaagtcgaagaagcagccgcaggcggcatgccagaagaagctggcgcgggagcggctgttgcaaagcctgattcactgccggccaacaatcgtgcggccagcagttccaagcgcatacgcggagaaatggctccggtcatggcacccaacgtagtgttgatgatgtctgccatggcggtcagtgcgcccagtcccagcgccttggcttggcggtgcagatcgtccatatcctcggcctcagccgtgtcggacagcacggattccgcacggtccccggccaacgtaagcaccagcagatcacgcacacgagccagcaggtcttcgacgaatcgtctcggatcgaatccgccgaccacgactttctggataacgccgtacagggcttcgccgttgtgattgattaccgcatccactgcctcaccgatcagcgcctccggcgtgaagccgagcagggctacagcggcatcatgggtgataacgccttcgaccgaaccaaccatcagctggtcaagcacagacagggtatctcgcatggagccgccaccggcgcgcatcgccagtttcagcacaccgggctcgggcttgatgccttccttgtcgcagatcgtctccaggtagggacccatgacttcctgcggcaccagacggaacggatagtggtgggtgcgcgaacggatggtgccgatcaccttgtctggttcggtggtggcgaagatgaacatcacatgttcaggcggctcttcaacgattttaagcagcgcattgaagccctgctgcgtgaccatatgggcctcatcgagaatgaaaatcttatagcggtcgcgtgcaggggcgaaaccagcgcgttctcgcaattctcgagcatcatccacaccgttgtgcgaggccgcatcgatttcgaccacgtcgatggaacccggaccgccggtggccaggtccttgcagctttcgcattcgccgcaggggtgggaagtcggccctttggcacagttgacgcaacgggccaggatacgcgcggagctggttttaccgcatcctcgcggccctgagaacagataggcatgcgtaagcttgccttcgtccaaggcgcgcatcagcgggaccgtgacttggtcctggccgatgaccccttcgaaggtgtccggacgatagcgacgatacagtgcaagtgccatagctactaacctacctttgccctcagaattaaccgataaaaagtcaagataaaccgggctcatagctgccgaatcgggaaaactctttatattccaacgacattcatctgacaacggttaccgcatttttattgttattaaccgctttctttgtattaacatagtgtcaataacggttgtagtcaggaggtacccatgagcgatatcctcgacaagaaacgccccacccgtggcgatgcccggcgcgacgccatcgtgcaagccgcgcgcaaggtgtgtctggaaaaaggcttctccaaaatcaccgtttccgacatcgcaagcgaagtcggtatgacgcgttcgctgttctaccactacttcgaagacaaggaagccgtagccgacgcagtactcgatgacgtcatcgacgaaatcctcaccacgttgaagcagtggaaccaagcgcgcgaaacaggcaacgtgaacaaggcattagacgacatcgtgcatgtgctccgttccctaatcgccgacgagagccccttctcaaaccgtatgatccaagatggcaacgccgaactgtatatcaagttcattgaccgcgcggcggaccgtattgccgactacattgcccagaccaccgtacgtgatttcgagcagatgcatggtctgccaatcaccaacgtccatgagacattcttcacgctaatcgtggggcttatctcgctggttcgctcgcatccgaacatcagcgaccgaaccatcaaagaggtcatggcgcagacgctgcatatcgaaagctatgtcgtctgaggtctgacggccattggctctggtaccgctctcccgcactcccctcagtccgcttcgcggccagctcgtccgcaatcgcggacagcctacggctgactttctcctggttcgactatcgtcgaaccctcgcctacaaacatcccactgggctgtttgctttacggctcagcctaatgaggggagccaatataatcaggtcaggcgaactggccggttacggggtcgcgaccgtctcgggcgatggcgtcgagcacttcctgtcgggagtccacctcacgggcggctacggccggcggtaccagcacgcgtagcgcgcagtcctcggccactaccctgaatggcagatgcccgatgtattcgccgtccgccatcagcaccggtggctcgtcgccttctgcggctcgcgtgacttcgatctcgcgtatgcgcttccacccgaacacctttgaggcgagcagcttgccgttataggcgttcgagatggccaccgcacattcgccgaagttcggcacatgattcatccacaccaggtccaacagcccgtcggagaagcaggagtacggtgagacctcgatgccgccaccgatatgacgcgaattcgcaatcgtcagcaacggcgtgatgatgtctcgttcatccgtggtaccgtccgccagcgtggccttgacgtggtacccataacgcttcatatgcgtcagctccaccagcaccgccgcaaagtagcgcatggtgccggtcggcagatgcgaatgattcgcacggtcgttgatacttgcgtcaagaccacaagacagcatgcccgcatagtaccggtcaatcgggtgctcggcagacttgttctcccggtactcgtattccccgccggtggatgggttcacggcatagccaccatccaaagaggtcacgcgtcccatgtccacatcaatgtgtgatccgcgcacgatagcgccgacgataccttccactgcggtttcgatgcgattgaccggcagcttaagtccccgagcgaaatcgttgcccgagcccatggccacgatgcccagcggcttaccgccgcaacccacggcattggcaccgagtgcgatcatgccgtcgccgccgaccaccaccagatagtcgtactcgtgcgcgcgttcacgcgcctggttcagggaatcgtcgaaacttacgccggtgatgtcgatgacgtcgaagttatgggcacggccggcgtcctccagcagtcccaatactcgcgcatccaccttggcaccacggcccttatcggaagtgggattgcccaccatggccaccacgcgacggcgttctgtgcgttcactctcgctcatgctctcaccttaaccaaaggtccagaagcccgccagagcatcagtgcttacggtccattattgtgataattgtctccttccgtacaattcaccggtccggcccgagccatccgctccacggatgatgccaccggaaccatggtttccaccttgatggttaccaacacgtcttcatcccgcacggagcaggagcccagcgtgacgccattcgcttcagccatgtttgcagcaagcgcgcatggatcaccgatatccacatgccacagcgcatacgcggcgtcaaaggcgatgagatcggcgagggaacgcgctcgattctggcagatcatgaggttgcccacacttgccgccaccgcgagcgcaatgcccaccgccataaccagcatggctccggccatcgtgcccgatccctcctcataacgcattccctgcaccgcagttcctttctattgcggccgcccagccagcagccgaccagttattggcttatcgccgtagcgttgccggtgacccgcgttggagtgacatccagtgggccgggcagtaccgaacattcgaccatcacgctcgtcgattggccgttgtgggcaatgctgacgcggggatctccccctgcaacgtccgcagctatgctgcgcgcggatgattcgtcaccggtaaccacaaactcgcgtgcggccgccgtcgcggcaccttggcagtccatggaaacgatgaccacacgtcccattgccagtatcagcccggcgatggcgataacgctgggcaatacgatcgcgaattcggcggtggccgatcccgtgcataggtctggcggcagtctggcgagcctccaccggcatctcatggtcttcatggctgtcacccgactttcagagcctgtttgatgatgttggtcagcaacgtcttgatggcatccgacttcaggatggcgaccagcaccgccgcaaagcctgtagccgcaacgagtacgactgcgtattccgcagtggctgcgccttcttcgggctcagccatgagggcgcggatgcgtgcgtccatgaggcatagccgttctttcgccttggcgttcagcgtggccacacgagccttgctgtgcgcaaagatgccggcctgcccgtcgacgatgacggggataggggtattcattggcgttcctttcggtaaggaggggaagctgcgcagtggcttcgcaccttccccatgcgtgtgtgagtggttggcccccgcgccgggttgacgcggggtgcataccactgtggactatcaacgcttcatgcaccaggaaaaacggggtatgtggttctagcttgccgagttatccacacctcgacgtgtcgtccaccacaaatgtggataaccaaacgcagccaagtacaataccgagcaatacaacaagattcagcctaagcgcactcagttcacgcctatattcacatcgtgaaggacgcaatcgccggaatgactcctaccagcacgaatgccggcagaaaacatagccctgtaggcgtcagtagctttaccgacagcttcgcggcattccgttcgatagcagcacgctcgtcacggtccagctgttcaatggcggattcgaggcgcacaccaggcatatcgccatgcgtccatgacgattccaaagccgattgcagcaggccaagatctcgttgcgtggtattcgtatttcccttggatggactatcagctggcgcaccctcatgctgaacagccatagcggcatgccacgcatcagcccagggaacccctctggtcagggagttcccgacctcgctcatgcgagcgccgcagtcgccgccgacggctttgcccaccatgtcaagcgcccggggaatcgaggagccctgacgcaaggacacctgcaacatacgcaatatgagtatggtccatgacgacccgcaatcatgcgctacggccggctcctcgcccggcaagcggctgtcatgacgagacagagccttatacagccaaccagcaatcgccgcacagcctgccgcggcgtgtacccacaccgtactcataatccgctgcctttcaacaatgcccgcatccatgccaagccggcagcataacaacatcctcccaatgtcaagcagaccacaccgcgtggcgatccaagcaagaacgccaatggtctagctcccagaagctcgcccaatgccacagtgacggccggaagcgcgctcagcagccccacagtggctttaggaacggcacatgcttgcgatcgcaagttctgcatcagcctcatctgccggtaagcagtcaataccgcttccagacatggcaccgcttggcaaccgagctcatcgctcaaaaccgctgcggcggcgaccccgcgtgcagcttcaagtacctgcgctggtgattcgtcgggcagacgccgctgttcgaacaccgttatgagccgttccacagtaatgcgatgagtggcgaagcgtctgctggattgttcctcgaatgcttcaaccaatgtgccgccacctcgcaatcgcgcgatggcggacgtaatcacctgcgcaacgcccacgcgaggtgagtcggcatatcgaggttcgtttatggctgcggaatcgaccgcgcgcccgcggtaagccagccggtacagcctcccggacttgttccccggccatatcagcacggcgagcgccaccagaacagcacaccacatcatcacccaccaccactcggcctgggaacgatgccccatcgttcaatgaagtgcccccattcggcggcataccgaggaggatggcagccattccataccgccagcggtgttcctgccagttcaccatgtgctacgcgcagttcgccgatctgcgtgatacgccgctgtccgttcactcgctccaaatgcaccaccgcgtcgaaagcgcctgccgccagcatggtcaacgcctgtggactgactccggcgagtaatccaagcgaaatcagcctggacggtactcggttcacgccgtccgcatgcacggtggtcatgccaccgtgatgaccagaattgaacgcgcgcaataggtcgacgatttccgcgccacggcattcgcccagcaccacgcggtcggggcgcattcgcaacgtcgctttgaccaagtccgccaggcttatggctccgacgccctccacattcgcctcgcgtgttaccaacgagacatgatcgtcgcgtcccagttcccccagttcacgaacttcctctacggtgacgatgcgctcgttcacgtcgcattgcgccagcagcgccttgagcaaggtggtcttgcccacgcctgttccgccggtaatcagcactgtggcatgtttgcgcaccaatcccacgaacgtcggcagccaagcagccgggaatacgcctaatttgctcaggtgctgtagcgatgccatggttcggtcagggaatcgtatggaaatcgcggcaccttgtggcaccaatggggcaatcaccgcatgcacgcggatgccatccggactggcggcatccgctatcgggcaggcatcatccagtctgcgcccgagctgcgcgcacagttggacggcgtattctcgaactacttgcggcgagcggaacggcacatgcaatactgtttcgcgcatgccattgccgcggtccgcccaaacgcggccatcacaggtcaccgccaaatcggtaacctgcgggtcagatgccacgtcatccagcagaccgaagaatatggttctgagcgctgtgccagcctcattggctcgcgtgctgacggcagccatagcatcactggtccttgtgagaagctcccgaaaccgggcgaatggcctgttctacgagatcggcaagcaagttcatggctttgcgactgcctttggtcaccgatctgatgccgaggccttccagtacgtctccgcacagattgacacttggcttgatgggccccaataccgtggcagtcaaatagtcctgcgcctcgccaatacccacgtggcctctcccacgtggagcgccacgtggttccacacctacgatatgtggcgcttcacagccccatgaatccaatctggaccggtgcgacttggctctggccagccccattaccgacaattccgcggcaatcacctgcaggccactgcgcagatcgggtacggtctcaatgagtccaccctgaccggcatctacgatgacaacgtcgttcgtttccgccaaagcccgaatggccgcttgaacttcccaccagtcaggctggcgcgcgctccaagggtcatagggaagtactcgcacaccctcccacatcatcagctcatggttcatcgcctcaccctcgatacggccgaggggcgcgtcgacttggctgaaccgcaagcccggctctcgttctacaccaagcagcaggtcaaggcatccggccacgaaatcagcgtctatgagaacgcagctgtgttcacgtctcgccaatgtccatgcaagcatggaagccatgacgctcaaccccacgcctccatgacctgacgtcatcgttacaatgttatggaagctggtgtctgtagttagggcgagtgccggagcctcgcccgatctctgccgttcgcatgaggccaacggcctgggcggcggagtgtagtagcgatacgctggaattggcgcatcgtccgtgggcagcggaatgcccggaggtgctaccgctggcgaggtgatcctacgcgccacgcggggtgtggtgttgctattcataagccgattgaaacgtgtccgagttcaatgctcaacacgaatcgaccattgtggttctagcttgctgagttatccacaccccggcatgtcgtccacgacaaatgtggataaccacgctgctgtttcacgcccatctcatgcagaaaaggccctgacctcacatgcacagtcagggccttcattttcacgacgattccttatgcggtaatctacatttcttgcttacttatcgaggttcttaatgccgtcttccatagcatccaactgagcatcggtcaccttggccggcttcttcttgccgaacttggccttgagcagaccgatgatggtcggggcgagcgagaccagcagaatcagcacgatcaccagctcgaagtggtcctgtactgccggaatgttaccgaagaagtagcccagcagcgtgaacaacgtggaccagcacaggccgccgagcactgagaacggcgtgaaacggctccaacgcataccggaaataccggagatgaacggcatgaacgtacgaatgaacgggaagaaacggcccaggaacacggccagcgggccccacttctcaatcatgtgctcggttttggccaaacgctccggggtcaaggccttcaccttgccggactggatgatgcgacggccgaagaaatgaccaatgaagtaattgcactggtcgccgataatcggggcgcaccagaccaccggcagcagccagaacagcggcagcgcggccttgccggtcgcggcatcgggagcggcgaacacaccggcggcgaacagcagggagtcgcccggcaggaatgggaagaacaccacacccgtttcgataaatacgatgaggaagatgaagccgagggtcggcgccacgcccatggcaatccaaccggcaatcgcggcacgcggatccttcagcagttcgaggatgaaattaacgaagcccatgtgtttcctatgagtccta

SEQ ID NO: 825 - DNA, 14145 bp, Unknown
  R14_18m  MAG No. k141_7310
ccccgaagacacgatgagcgtggcccgattccagcagcttgcgcgcgagaccatcgccgacctgcaatcacgtggcatccggccgattctcgtcggcggctccggcttgtacgccagagcggccatcgatgacatcaccttccccggcaccgatcccgacgtgcgcacacgtcttgaggaacgcgagaaaaccgagggtgccggtgctttgtttgacgagctgcgggccaaagaccccgaggccgccgcgcgcatggacccacgcaacccacgccgcaccatccgtgcgctggaagtcatcgagcttaccggcaaaccgtattcggccagcctgccgcgctaccggtacgtgattccgtccgtacagatcggactcgacctggaccgcccggatttggaccatcgcatcgacctgcgcaccaagcagatgtatgacgatgggttcatcgaagaagtcgaacggctgcgcccgcatctgggtgccaccgccgtacgcgcgctcggctatcagcagatcatcgacctgctggacggtatctgggatgtgaacgacgccttcacggacatcgcacagaaaaccaagcgactcgcccgcaaacagatgggatggttcggccgtgacccgcgcatccactggctgcaggccctgaacccgaaactggtcgacaacgcgatggccattatcgcgcacgccgacgccggcgactacgacccgatcgacgcccgagccgacgaatacacccagcatcatctgggcgatatcacggcgtaggaatcagccaaaggccggtgcaatcacccgcaatcagtgtgcaggcccctgattccagccggcgatcaagaacacgcgcgtcggattcgccgggcgtagtatcgcgtcgaacatcgtctccagtgcagacgtgtcgccccgatatgccgagtgcttggcggagcgatactcctcgcgcgtcactgagccccagtcgagatcccagccggcgtcatgcgccaagcgtgaaccgaatatacgcagcaccatcgcattgccgccacggaacggatgcagataaccgagctcatcataaataggagcgaacgcgtgaacgaacacgtcgcgatccaacgcatgcaggttgcgcttgtccgccaactccatcgcgatgttgtgcgcgccggtctcaatgagcccagccgggaagaacgcctccggattcgcggcccgagcccggtcgttcgtcacctcgcgtgtggtgtttgaggtacgcaacttgcccgcatcctcgaacacgccttcgaacagccccttatgaatggcggtcaactcgtccaagtcgccagacggattccaccgacgttccgccaacaatacggtacgtgcgaacaccgcatccgcgcgatccgtggcatgatcatccagactgccggcagccagacgatcctttccggcagggtcggcggcggcgcgcagacgcatggcggtctgctcgtccgccacgtcgatgagatgggtcacgggctccaagccacgttcgtaggcaaccgcggcgcgcatcgttgcctcgcccggcgtcatcgcttccagtgcgcagttcttgagtgcaaatgcgactgcgctcgcacgctctgcgggtgtcatgcaacccatgataaggcatattcgcgctccagcggggaatcgactcggacgaacctcgacgaaccgcggcgaatcggctgtcgggattcgtcaatcgaccatatcgtcacggtgtcgtcaccaaccatgcacccccgtactagtagaatcagacccgatatggcacgaacagcatcctccaacagcaccaaaccccgtaaatccaaagacaacgggtctacccatgatggcgaaaccaaggtccagcccgagcttgacctcgaacctgagccgttgtggaagaagatcctgctcgcgattccgcgcgcgttcggctccggcgtacgcgccgtcaccggcgtcggcgaatacgacccagcctaccgtcgtgacggtttgtgtttcctgctgctcgtgctcgccgtactgttctgcgcgtccgaatggttccgtgtcagcggtccattcggccagctgcttcacgccatcgcggccggtgtgcttggtctgatgagcgtcgtgctgccggtgttgctcgccgccgtggccttccgactcatgcgcaattccggtaaagggtccaataacccgcgtgtggtcaccggttgggtgctgctcatgtggtcgatttgttcgatcatcgacgtggcgatcgccgccgaccacaccggattcgacatcacgattctgcaatccgccggcggcctgttcggcttcttcctcggctcaccgctcgcctggggcctttccaacgtgttcgccatcatcattttcgtggtcgtcggcctgttctccttgctgatgattaccggcacccacgtcaccgatttgccggaggatgcgcgcaaaatcgcagctaaaatccaacgcaaaccgtatgtgccgatgggccaggaggccgacggaagcgccagccagttccccaacgaggtccgtgtgggagataccacactcgcctttgccgacggtgttccctcgcatgacggcaacgacgacggcaacgacaacgatcaggccggcgatgcacggcccagcctgttcgcacgactgttcggccgcaaatccaagaccgaagacgacaaaacccttgacaagtatgctgccgacgatccgttcgaccgtgccgccagccagcatggtgccaccgccgaaaccccggtggtcgatccgatgaccggcgagattaccggtgcgcgaaccattgcatcgtcttcgtacgacggtcgtccgcacctatccagccctgcgcctgctgccgatgcggatgatggcgacgcttcccgaacccgcgtcatcaccagtggccagaccatcgccatgcccggtgggggagcggtagacgatccgtgggcacccagtgccgcccaggccggtactgtcgcgctcgcaggggcagccggggcgatgggagcggccggggccgccggtgccgcggccgcggcagccgcgaccggagcctacgcaggcgccgatgcggatggcagcggagtcggccagggcgtgcccaatacggacggacagccgaatgccgccgccggcaacggtacagacgacgacgccaataggccgtatcagttgcccgacctgaacctgctgaccaaaggtcagccccatgcgatgcgcaccccggccaacgatcgcgtgatccgggcactgacttccaccttcgaacagttcaacgtggacgccaaagtcgtcggcttcctgcgtggcccttcggtcacccaatatgaggtcgagcttggccccggcgtcaaggtggagaaagtcaccaacctgcagcgcaacatcgcctacgcggtggccagttcggatgtgcgcatcctttcaccgattcccggcaagtccgctatcggcatcgaaatcccgaacgaggatcgcgaaatcgtgcacttgggcgacgtattgcgctccgacaaggccgtgggcgacccgaacccgatgctctccggcatcggcaaggacgtcgaaggccacttcgtgaccgctgacctgaccaagatgccgcacctgctggtggcaggtgccaccggttccggtaagtcgagttttatcaactcgatgctcacttcgatcatcatgcgtgccacgcccgaacaggtgcgtctgatcatggtggatcccaagcgcgtggaactgtccgcctacgcaggcatcccgcacctgctgaccccgatcatcaccgatccgaagaaggccgcacaggccctcgaatgggtggtcaaggagatggatgcacgctactccgacctcgaattcttcggattccgccacgtcaaggacttcaacgaggccgtgcgcgccggcaaggtacatgcgcccgccggctcccagcgcaaggtggccccctatccgtacatcctcgtggtggtcgacgagatggccgaccttatgatggtggccaagaacgatgtggaaagctccatccagcgcatcacccagctggcacgagccgccggtgtgcatctggtgctcgccacccagcgtccgtccgtggacgtggtcaccggtctgatcaaggccaacattccatcccgactggcgttcgccacctcgtccgccaccgattcgcgagtcattctcgacacggtcggtgccgagaccctgattggtcagggcgatgcgctgttcctgccgatgggttccgccaagccgattcgtgtgcagggctcgtgggtgtccgaatccgagattcgcaaggccgtggagttcgtacgcacccagcgcaagccgaagtaccgcgaagacatcgaacagatggccaaggaagctgagaagaaagacagtatggagcctgacgaggagatcggcgacgacatggacgtgctgctgcaggccgccgaactcgtggtcactagccagttcggttccacctccatgctgcagcgcaagctcagggtcggcttcgccaaggccggccgactcatggacttgctcgaatcgcgcggcgtggtcgggccgtccgaaggctcgaaggcccgcgaggtgcttgttcagccgcaggacctgccgcaggtgctcgccttcatccgaggcgaaaccagctcgctcgaagccagcgccccgcaacaacccgaactcggcgaataattcacccatcgacctccctctgatgagggaggtgcccgaaggggcggagggagagaagcgcggacagcatcagcacgaaacctgattcccgaataatagcagtcaatatccagccaccactcactcaaggtaggagtatgggggtaacgtgaacactatggatgagaacacaatggacaagcagtcatcgcccaaatcatcgctgttcgacggatggaacgcgccgccgaacctggtcacctactcgcgcatcgtactcgtggtgattttcctgacactcgacattctcgccggttcctggggtgaggacaacctgatcatgcgttgggtcgccgcggtactgttcatcatcgccgcgtccaccgataaaatcgacggttggatggcccgcaaatacaatcaggtcaccgaaatgggcaagctcatggatccgatcgcggacaagctgctcacttgcggcgcaatgattgtatgctccgcgttcggcgagctcggctggtgggtgaccatcctgttcctgattcgcgaaatcggcatcaccgttatgcgcttcttcgtcatggagcgtccgggcggcaaggtcatcgccgccgcatggcccggcaagctcaagaccgtattccagtgcgtgggtctgtccatgctgctgctgccgttctggtcattgggtaacggacaggccacgccgttctggatgaccgcttactacttcctgacctacgccatcatctacgtggcattggtcctgtgcctctactcgggtgccgtgtacctgtacaacacgttcgtcgccccgaagcggaagtgacggatattccaatgcaggaattgtgcgacagtctcgcggccggcatcctcaagatctgcgaggcgaacaatacgaaaatctcctgcgctgaatccctgaccggtggcctgctcgccgatgcgttcgtgcgtattcccggtgcctccaacgtgttgctgggctccgctgtcacctacgacatcaatgccaaggcctcgatcctacacgtggacaaggccctattggatcgagaaggcgccgtacaccccgaagtcgcccggcagatggccatcggtgccgctcgcctatacagccagccggaatacggcgaccgaatcatcggcctttccaccaccggcgtggccggccccggtccggacggtgataagccggccggactggtgtatgtgggcctgcgcatccccgcaagcctcaccgcggaccatgccgaagtgctcaaagccgtcgaactccatcttgatggcatgcgcgaagaggttcgtcgcctcaccgtattccacgttctgcaaaacttgagtctattcacagcaagttttaaggaataaaaccgcgggaccgtcgtgttgtacatagtggaaacactgaaccgaccttggaaggggcgatggcgatggaaacgatgacccgagtgaacgaacagatggatgtggccgccaagaagccgatggctgtgcagccgggtgtcgcccgtatgcgtgaactgactccggcccagcgccgtgcggtgatgttcgcccagcagcaggtgctcaaggcgcaggctgccaagaaggccaaggatcagcgtcaagccgttcgtgaacgtatgtgggatgaggattcgccgtcgtacaagccgactgccgccgccgagcccgtggtggttgaggaggagcctcgcgaggtttcgctgcgtggtgctatcggctacgtgctgcgcgaactgcgtacgcgcgatcgccgcacgttgcgtgaggtctccgagaaggcgggcgtttcgctgggctatctttccgaagtcgaacgtgggcagaaggaagccagctccgaactgctgagctccatcgccgatgcgctcggagtctccacttcgcgcatgctgcgcatggtggccgattatctcgacacagtcgagggctgatcggttggcggtgtgaagccgcatcccgtaatctatgtctagctgtgaacccgtatcgcttgtggcgatgcgggtttttgctgtcctgcgggtggtggcacactggcgtgtatgcgtgaacgggaattctgggaattacttgaagaggtgttcggtcggacctacggtcgttcgttgtcgcgtgatcaacggatgtccaaattggcgaatatgaccgtggtcgaggcgctggacgcgggggaggagccacgcgtggtctggaatgtgctctgtgaccaaatggaggttccggactccaagcgttggggccacgatcataacgcgccgcccatgcccgccgtctgacactgcgggattacggagtcgctgaatcgtgaaattggcgatttcggcgtgttgcacgccaaattcgaacaaatgttcgtgtgtgtggttatagttattcacagtgacaagaagccgcatacgtgtgcacagggtgcttgtcatccgccataagccttaccgcagtaggtcttagggaggtcagatggccgagctcgggcaagctggaaccacaatggttggtttggattgcctcacatggcatgtccgtcatacggtggaggcatccgattcgcgcacgacttcgacaaggagaagatcatggcacttgagaccaagccggccaaggacccggcagccgaggacaagcacgagctcgatcccaagcgcaaggcggcgctggacaccgcgctggcgcaggttgagaagagcttcggcaaaggttccgcaatgcgactgggcgaccagcccgagcagaacgtcgaggtgattcccaccggttcgttggccctcgatatggcgctcggcatcggcggcctgcccaagggccgcatcgtggagatctacggccccgaatcatccggtaagaccacgctcgcattgcatgtggtggccaatgcccagaagaagggcggcgtggcggcctacatcgatgccgaacacgcactcgacccggcctacgcccgcaagctcggcgtggacaccgactcactcatcgtctcccagccggataacggcgagcaggccctcgaaatcgccgacatgctgattcgctccggtgcacttgacgtcatcgtcatcgactcggtcgccgccctagtgccgaaggccgaaatcgaaggcgaaatgggagacagccatgttggtttgcaggcccgactcatgagccaggcgctgcgcaagatgaccggcgcgttggctcaggccggcaccaccgccatcttcatcaaccagctgcgtgaaaagatcggcgtgttcttcggcaatcccgaaaccaccaccggcggcaaggccctgaagttctatgcctccgtgcgtctcgacattcgtcgtattcaaaccctgaagaatggcgacgaagcggtgggcaaccgcacgcgcgtcaaggtggtcaagaacaagatggccccgcctttcaagtccgccgaattcgacatgctctacggtgaaggcatttcccgtgagggctcggtaatcgacatggctcagcaggttggcgtggtcaagaagtccggttcgtggttcacctatgagggtgatcagctcggtcagggacgcgagaaggttcgtcagttccttaaggacaacccggccatcaccgaggagattgagaataaggtcaaggccgagttcggtctgatcggttccgccgaccagttcgcggaagatggcgaagccgcagcagcggccgctgtcagcgaggccgccgctgccgacgtggccaaggacagcaaggccgcagcggcgcctgctgccaaaacgacccgtgccaaggccggcgcagctaaggcctgaacatgattagtgccgaagcattcttgcggcgcaatcctgttgcgtcgcaagacatgcccattgccgagcagcgtgttcagtcgaaaccgccgggacgtttttctcgacgggggagagacgctgccgttgtcgaagatcccaatgatttggacgcttgccgcgaggctgcattgcgtttgctggacgcggccccacgtgcatccggcgcgttgcgcgaacgattgctcagcaaaggctatggcgaggcgattgtggacgaggtcatcgaacggctgattcgcgtgcaactgattgacgaccgcgcttatgccgaatcggccgtacgctattgtgccggtcgcatgatgggtcgtcgtggtgcggtcctggaacttgctcgcaaaggcgtggaccgcaaactggctgaacaggtgtgtggcgaagctgagcaaaatggcatctttgaagatgccgcatgggaattgggccgccaaatagcccgcaaaacccatggcctcgatcgtcaggtccgtcagcgtcggttttggtccgcaggcggccgcaaaggacacagccccgaaaccctccgccgagtcgccgccgaattgttggtgtagccaagaaaaaaatgagacctcttataccccgggttctgtcgtgccgtgcacgaacgcacggcacggatggccatccatctcgacctgacgttgccgccaggctctagcagcctacccgatgacacgggcgagcagcccttaccgccatctgcttggccttgctcccgatgaggcttgccatgcgacctactgttaccagaggcccggtggtctcttacaccgccgtttcacccttacccgtcgaggacgggcggtctgttctctgttgcgctatctctcaggtcaccctgggcggacgttatccgccatcgtgctctatggagcccggaagttcctcagccgatcccaatgaagatcacggccgcggccatcaagaggtctcaagcctgcaattatacataaggtgcggaaaaggcggcatcccgccctgcggtgaggccatgacgttgcccagttatcctgttttctccatagttgggcatagttgggcgattcgtgaacgacgcgccgaatatcggatggggcgtgtcgggcgtgttgtggcgtgtcgtatggagacgaatcaaatctgtaagagcttggtatgtgcgagaaagagcaagaaaacgttgcctatccattgcagtatttgccatgacgaacaaacgagccagcctgataaaccggtatcaaatcttcttataggagactgctgccaaaaccccagtatatacatcgtttcattgcagagaaaagcccgggaataaacatatattctctgggcgagtttccggccgttcacccattgttcgtctacaatgaaacatacccggtcggtgatgatgccgttcggaacacatatagcgggttacaccgcttgagttagaggaggtcaacatggaaatcgtcgttaccggacgccacacgcaggtcaagcaaaggttccgtgatgtggtcgagaccaagatgaatcgtgtgaccgctatcgccccggatgctcagcgcgcgcagatcgtgctgacccatgagggcaacccgcgtcaggccgataccgccaagcgcgtggaaatcaccgttatcgccggacgtaccgtggtgcgtgcggaggcttccagcaccgatgaattcagcgcgctggacatggcgctggataagttgacgctgcgtctgcgtcgtactcgtgaccgtcgcaaggatcaccgtcgtggttacgcaaacccggtcccggtggatctgggtgttatcgccccggagcccgagccggaggtgtcggaggaagagccgaacaacagcccgcaggctgcggtcgcctccgatcttggccctggcgaatccgtggaggtccaggttggggatacgccgattgtcatccgtcgcaagttgcacatcgccgagcctatgagcatcgacgaggcgctgtacgagatggaactgatcggacacgatttcttcctgttcgtgaacaaggagaccggacgcccgtccgtcgtctatcaccgtcacggttggagctacggcgtgttcgaaatcgacactccggagaatgtcaagaaagcctgagggtaagggctgctgacatgatcagctgataccgcatggaccgcttccaatatggaagcggtccattttttcgtaaaaaggtcgaaaaattcgattgctgacggtgcgaggcgctattctggtacgcggacaccaccacttatcagtcaagggagaacccagtggtcgatattgttgacaaagccctgcgaatgggtgaaggccaccagctcaagaagctggagaacgtggccaaggccgtgaacgccctggaggacgagatttccgccctctccgacgaggacctgaaggcccaaaccccgaagttcaagcaggaaatcgaaaacggcaagagtctggacgagatcatgcccgaggcgttcgccaccgtgcgcgaggtctccaagcgcaccctcggccagcgtcacttcgacgtgcagctcatgggcggtgccgccctgcactggggcaacatcgccgaaatgaagaccggtgaaggcaagaccctggtcgccaccctgcctacctacctgaacgctctcgaaggcaagggcgtgcacgtggtcaccgtcaacgactacctcgccagctaccagagcgagctgatgggccgtatctaccgcttcctcggcatgaacgtcggctgcatcatcaccgagcagaagccgccggagcgccgcaagcagtacaacgccgacatcacctacggcaccaacaacgagttcggcttcgactacctgcgtgacaacatggcctgggagaaggccgacctcgtgcaacgcggccaccactacgccatcgtcgatgaggtcgactccatcctcatcgatgaggcccgtaccccgcttatcatctccggcccggccgaaggcgacgtgacccgctggtaccgtcagttcgccaagctggtgctgaagctcacccgcgacgaggactacgacgtcgacgagaagaagaaggtcgtcggcatcctcgacccgggcatcaccaaggtcgaggacttcctcggcatcgacaacctgtacgagccggccaacaccgccctgatcggctacctcaacaacgccatcaaggccaaggaactgttcctgcgtgacaaggactacgtcgtcacccagggcgaggtgctcatcgtcgacgagcacaccggccgtatcctgccgggccgccggtacaacgagggtctgcaccaggccatcgaagccaaggaaggcgtggaggtcaaggccgagaaccagaccttcgccaccatcaccttgcaaaactacttccgtatgtacgacaagctcgcgggcatgaccggtacggccgaaaccgaagccgccgaattcatgaacacctacaagctgggcgtgctgccgatcaagaccaacaagccgatgatccgcaaggaccaggacgacctcatctaccgcaccaagaaggagaagctggccgccatcgtcaaggacgtggccaagcgacacgccgagggccagccggtgctgctcggcaccgcctccgtggaaagctccgaagtggtctccgccctgctcgacgtggcgaagatcccgcaccaggtcctgaacgccaagcagcacgagaaggaagccgccgtggtcgccgtcgccggccgcaagggcgccgtcaccgtggccaccaacatggccggccgtggtaccgacatcatgctcggcggcaacgtcgagttccttgccgacgccaaactgaagtccgaaggttactctccggaggacaccccggaagagtatgagaagcgttggccgggcaccctgaacgagatcaaggcccaggtcaaggacgagcatgaggaggtcaaggagctgggcggcctgtatgtgctcggcaccgaacgccacgagtcccgtcgaatcgacaaccagttgcgcggtcgttccggccgccagggcgacccgggtgaatcccgcttctacctgtcgctggaagatgacctgatgcgtctgttcaacacccagctggtggctcaggtcatggccaagggcatggaggaaggccagccgatcgaggccaagtccgtcaccaagggcgtgcgcaccgcgcagaaggccgtcgaatcccgtaactatgagattcgcaagaacgtgttgaagtacgatgacgtgatgaacaagcagcgcaccgtcatctactccgagcgtcaggccgtgctcaagggcgaagacatccacaaggacatcctgcgtttcatttccgacaccgtcgagtcctacatcaagggtgccaacaagggatccgagaaaccgaaggactgggattgggagggcctgttcaaggcgctcaacaccgtgatccccaccaaggtcgacgaagacgaggtcaggaagatcgtcggcggcctcaagggtgcgaaggccgtcgaggccgtgcgcgacctgatcgtcgaggacgccaggcagcagtacggcgaaatggaggagaccatcggcgagaccggcttgcgcgatctcgaacgccgcgtggtgctcgccgtgctcgaccgcaagtggcgcgagcacctttacgagatggattacctcaaggacggcatcggcctgcgtggcatgggccagcgcgacccgctggtcgaataccagcgcgaaggctaccagatgtacaactccatgatcgaggccattaaggaggagaccgtccagctgctgttccacatcgacatcaagcaggtcgccaccaccgacgaggccgttgacgaggtcgaggagaccgccgaaagcgccgacaccatcgccgtggcctccggccctgacgagaacggcgaatccgtggtcgaggccgccgagggcgaagtcgaggaagaggacgaggatacggacgccaagcaggcgatcgccgaatccgcagccgtctccggggccggcgagtccacgctgcctgttgccggaccggctccgatcagccacgccgaaggcaaggtcccggtttccaagcgtccgaagagcgaagagctcaagacgccgtgggccgacggccgcaccttccctggcaccggcaagaacgccccgtgcccgtgcggttccggccgcaagtacaagatgtgccacggccagaacgagaagtgacgcatcgctagttagtaactagctcatggctccccacacggggagccattttttgtgcggttcatcagcatatattcgtgcggtgccgtacgcgcgggacggcacgcgattttcgcggattttgacgtcgtatcccacactgttgcgggatggcacgagtgtcaatcgattgactagcgtggcgtcccgcagtacgaattacggaatcgttgaaattccgccattctcggtgttatggtgtcacggtccacaaagggtgatgtgggacggcacggctaaaacggcgaaaatgagctgccgtcccgcagttttacgggatagcacaaaaaagaggcttctgctgttttcgtgggttgggttcttggttgtggtgggcgtatgtcgagtccgccgcggcggagcatgacgagggcgatgggattgttcgcgtggtggaagccgtaggccatgcggatggtgaccttgatcctgttgtcggacgcctcgagcctggcgtttga

SEQ ID NO: 826 - DNA, 35478 bp, Unknown
  R14_18m  MAG No. k141_7563
cgaacctcacctacgtcaagaagaagctacgcaccccggtcaaccgcatcgtcggccaaaaagccaagctcgacctccacgtcaaggtagccaaaggctggcagtccgaccccaagcaactagaacgcctcggcttctaggaatcggccttcggccggttataacaaagggagattccaatggaatctcccttttgctgtactcgagtcctccttacttcttcttggtgtacatctgggtgttgaggagggtggagtagcgcttgatgaccttggggcgaatcaccttcatggaggcggtcatcagaccgttctcctgggtgaactcctcgggcaggatgatgaacttgcgtacggattcggcgcgggagactccctcgttggcccgatcgacccactgctgcacttcggcgcgcacggcggcgttccttgccgcgtcctcgagggacatgttctcgtcaagccccttggcggcgagccacgggcgcaacgacttctcgtccaacgtcaccagggcggagataaacgggcgtttgtcgcccagcaccaacgcctgggagacgatctcgcaacgctggatgacctcctcgatcgggccgggggagacgttcttgccgccggcggtgatgatcaggtccttcttgcgcccggtgatgtacaggaacccgtcgttgtcgatgcggcccagatcgccggtggcataccagccatcttcggtgaacgacagctcagtggcctcgtcgttcttgtgatagcgcgggaacacagcacgacccttgacctgaatttcgccgtcctcggcgatgcgcagggagaatccggggaatgcgatgcccacggaaccagcgtggaacggcgtacccagcgggttgaacgcgcacggtgcggtggtctcggttagaccatagccctcgtatacaggcacacccgcgccacggaagaaagccagcagttccgggtcaagcggggcaccgccggccacaatccacttggcgcgaccgccgagcacttcgcgcagcgaagagtagacaatcggatcgaaggcagcgcggcgagtgcgggtcagtgcacctgccttgccgttggcggagacttccttcatatagttctgcgcagccaccacggcggaggcgaacaccacgcccttggggccgtggccggccttctgggacgcggcgttgtacaccttctccagcacgcgcggcaccacgatcatgagagtgggcttggccacctgcagatcgctgatcagcgtcttgatgccggtggcgatgtagatgcggacgttcgaggagacgacgatgtagttgatggcgcgggcgaaggaatgggcctgcggcaggaacagcaggatggtgtttttcttgtcgtgcagcagatcgggcatgtaggccggcagattcagcgcggtctggcagtagtgctcatgggtcatttccacgcctttcggcgcggccgtggaaccggaggtgtacacgatggagcacaggtcggtcttcttgaccgaatcgatgcgctcgtccagctcctcgtccgagaccgtggtgccgtaggccttgatttcgtccaagccaccggtctcgatggtgatgatgtgctccagggacgggcactcttcgacggacccatccgccttcttacgcatgtccgtgtcctgcacgatcagcagtcgggcatcggagttgttgacgatattgcgaatctgctcggcggaatcggtgtcgtagatggtggcgagcacgccgccgcacgccatgatcgccgcgtcggtcaggtcccagtcgtaggaagttcggcacatgaatgccacggcatcgcccttcttcaggccgtaatgaatcaggcccttggccacggcacgcacgtcagccaggaactcgttggcggtgacggtcacccaatcgttgccggacttgtaggtgtacagcggctcatcgcccatacgttcggcgcggtccgcatacaggtcgtagatggacgtaccttcgtccagcggcggattgccttcggtggaggtggtgagcaggccggtgatggggtcgatgtcggtgacggtcaggtggccgtcgtcccaatcgtcgctgtgaggcaaagcgatattggtctcgaccggcacgtcggcattggacaggtaatcgggctcgtccggggtgtcgtcgtggaccgggtggacgaagtcggatcccaacctgagcgccttacgggtgagattgatagtgtgctgcgtgaaggaattgataaccgacaagtcttgctcctgtaaacctttcagtgtcgtccagccatgaggcgaacgcttctcaaagttcaaattgtaatcgcccaaaccgaactcgtcaccttacgcaaccgtaggattctggcgggttaggggagtgcgtggcaaaatattgcacaggtcccgatattgttgagtaaccgtgagctacgaaacggtgattgtcgatagttattgagcggttggttgctgatcgatgccaggtgattgttggacgacttccgagcaattcatccgcaatgcacatggacacattcgtatttctcactaatttcgggttcgtttctgtttcgattggcggaatctcaagtcatggtctttgccttccgactacactttctatgcggataaccatgtccattctgaagtagaacaagaaagggctctcatggcgcaaaacccagaagccaccgtggtgttcggcgttttgaacgaaacgtccgaaacggaatcccgcgtcgcgctgacgccggatatcgtcacccggctgaagaggagcggagtctcctcgattattgaggccggtgccggcattgccgccgaatacaccgatgaggattacgaaaaggccggtgcgaaggtgaccagccgtgacgaggtgctcgccgaagccgacgcgctcggttttgtggaccgaccgtccgccgagaccgtggccaagctcagggccggccagtgggtcattggcatgctcgggtccttcaccgatgccgattacgtggccgcgctcgagaaggccggtctggtgggcatcgccatcgaaaagctaccccgtaagctttccagcgcccagtccatggatgagatgacctctcagaactccgtgatgggctacaaggcagccatcaccgccgccgatgcttacggctccttcctgccgatgatgaccaccgccgccggcacgattcgcccggccaaggcgctggtgctcggtgccggcatcgccggcctgcaggccattggtacgctgaagcgtctaggcgcggtcgtcaccgcgtacgacgtgcgtcccgcctcccagggcgaggtcgagtccctcggcgcgaagttccttgatctgggacttgacttctccaagggccagggcgagggcggttatgcccgtgcgctgagcgccgaagagcaggctcagcagcaggctgccgtcgatgagaaggccgccggctttgacatcatcatcaccaccgccaaggtcccgggccgtaagcccccggtgctgctcaccgcagccggcgtcaagggtctcaagcgtggtgccgtgatcgtggactgcgcagcatccgacctcggcggcaacgtcgagggttccgccgtcggcgagcaggtcaccgagggcggtgtcaagctgattggcgctccctacctggcctccggcgtcgccaccaccgcatccaacctgctttcgcgcaatgtggccgacatcctcgtgcacttcgtgcgtgacggcaagctcggccaggatctcaccgaagaacttgacgacgcgctggtggttgccggccgcgccgccgccccggcagctgctgccgatgccgagaagtccgagaagtaaggaagaaggaataccatgcctactctcgtcgtttccattaccctgttcgtcctcgcgctgctcatcggtatcgaggtcatcggcaaggtgcccgccaccctgcacacgccgcttatgtccggcgcgaactccatccacggcatcgtcatcgtcggcgttgtgatcgtggcagccgaagccaatagcccactggcctacgtgttcatcttcctggccgccgtgctgggcaccatgaacgtcgtcggcggttatgtggtcaccgaccgcatgctcgagatgttcaagtccagcaagaacgagaagaagggggagtcgaagtaatgacctccgcaaccgttggcgccatcgacatcgtcgcatggttcgtctacctgttctctgccgtcctgtttgtggtcggtctgcatttcatgaattcgccgaagaccgcccgcaagggtaaccagatctccgcgttcggcatggtcgtggccgtgctcatggcgttcatcgtgcttttcgccaagggcttcgtgaacattgtcgccgtggtggtgctggtcgtcggcatcctgatcggtgccgtggccggtgtcgtctccgccaagaaggtgaagatgaccgacatgccgcagctggtttccgtgttcaacaccgtgggtggtggcgctgccgcactcgtggccctgaacgacatcctgaccaaggaaggcaccccggacatcgtggtgctcatcaccgctggtctcggtatcctcatcggttctgtgaccttcaccggttcgctcatcgccgccggcaagctgcagggtatcaagtgggtcaagaagctgaacctgccgggcaagggcgtatggaacattctgttcgccgtgctgtctgtcgcctcgctggtcatgctgtgcgtccagcccgaacagcgtctgctgtggtcgattctgaccaccgtgttcgccctgtgctacggcttggtcttcgtgattccaatcggcggcgccgatatgcccgtcgtcatctctgtgctcaacgcctgcaccggtacggctgtggctatgtccggtctggcgattgacaacgttgccctgatcgtggccggcgcactcgtcggttccgcaggtgtgaccctgtccatcctcatggctcaggccatgaaccgtccgctgctctccgtcttggccggtggcttcggcggtggtgctgacgccgccgctgctggcgacggtccggaaggcaccatgaaggagaccacgccggacgatctggccgttcagctcgtctacgcgcagaaggtcatcttcgtgcccggcttcggtctggctcaggctcaggcccagcgcgagctcgctgaccttggcgaactgctcaagggccatggcgtggaagtctcctacgccattcacccggtcgcaggccgtatgcctggtcacatgaacgtgctgctggccgaggccaacgtgccctacgaggagctcgtggatctcgatgagatcaacccgcagttcccgcaggccaacgtggctctggtcgtcggcgccaacgatgtgaccaacccggctgctcgccgtcctggcaccccggtttccggtatgccgattctcgacgtcgacaagtcccagaacgtcgtggtcatgaagcgtggccgcggcatgggctacgccggtatccagaacgaactctacttcgaggacaacacccagatgctgttcggtgacgcgaagaagagtctgcagtccgtcatcgccgccgtcaaggaactgctcgcgtaaccattcttggctcccctcacagaggggagccaagcttctatatctactacagcccaaacacccgcttaacaaagccgttaacgcgacgccaatagtggtccggatcggtgctggcgctcatcgtgtggtcggcgccgggaatcagcagcttctcgcggtcgatgctggcgcaggcgttgtaattgatgtccagatacttcgggttgacaaaagtatccgctccgccatgaatgaacatcatcggaatagtcgcgtgccgtaatgccttcacacaggaggcgtcctcaaaccggtatccagccttgcgtttagacacatgactggccactttgaccagcagcacggccaacgagtgcggcaaacggaacatcgcctcggcattatccgtaaactgcgagaccacggaactgtatccgcaatcggaaatcgcggcgacgacgttgcgggggagtcgcgcatcgccggccgccatcatcaccgtggcggcgcccatcgaattgccatgcaacagaatgcgtgcatccggatcagctgcggtgatcagcgaaacccagcccaacagatcgtcgctttccagcaatcccatacccacgtaacgcccttcgctcaattcatgggcgcgctgcgcgggtagcaggaccgtaaaaccgagttgcgcatagcgatgcgcccatttggccatttccgcgggctctccggtatagccatggcagcagatcgcgtatagatgcggctgtgggtcggaacaatccgggtccaacagccagccgtggagtttccatccatcatggctgcgcagcgtgaccgattgcttggcctcctcgaaccaccgggtggcctcaagctgctcggacatgtcgaattcgatgcctttcggcgtctcctcgtgcggcatgttgaacatcgaacgtttggccttggtgtccagcgcgaacatgaacatgacgttggcggccgcggctgtgacgccggctccggtggcggctatcgcggcaagtgccgcagccatacccctgacaacgcgagtgtgtgcggcgatgacgtcatggccatcctcattgatgacgtcgtccgaacgagtcatatcaacctcccgatacggtactcaccatcgtacgttatttttcgaaatcatccccaacttcgtgaaagaccgtacactgagtgtcgctgagcgtacggttttcacgaaatggcgaacgatttcgtgaaaaccgtatgatgagaacgggtaagcgtacgttcttcacaaagttagggattatttcgcggaaaccgtacgttgacgtagctgggacggcctatatgcagtgtcatcgaagcatcattacgcaaagtccggggttggcgtatacttgacaattgttgctttggcgagggaagtgtgcatgctgacacatgacacagattccgttatcgactcggcgtatttcactccttgtagggtgtctttcggcgcgtcgtggcgtctgagcgagacagtacgaaacgaagatacaaggagtatccattatggctaccaccattaagcttgagggcgaggcccgttccgagttcggcaagggcgttgctcgtcgtctgcgcgttgccaacaagattccggccaccatctacgccggcggcgaagagcccgccttcgtgaccttgccgatgcgcgagaccaccctggccctgcgtcacaccaacgccctgttcaccatcgccttcgacggcaacaccaagatggccgtcgtcaaggacgtgcagaagaacccggtcaagcgcatcatcgagcacatcgacttcctcgaggtcaaggccggcgagaagatcgacgtcgaggtgccggtgttcgtggaaggcaccccgaagggtgctgccgtggcgttcgtcgacattcaggagctcaaggtccgcgccgacgtcaccaacctgcccgagaagatcgtggtcagcgtcgaaggcctgaccgacggcaccaaggtgttcgccaaggatgtcgtcctgcctgagggcgtcgagctggacgtcgaggatccggaagagtccgtcgtcaccgtcgaggtgccggaggatgccaccgagtccaccaccgctccggaagctgctgccgccccggctgacgccgccgctgctccggctgccgacgccaagtgagtcggtcgcttcgatagcgaacaattcagaacataactgaaacgtggaagcccgcagccgttgagaacggtgtgggcttcttcgttttttcaccatgtgaactctgccacacgagtaacacatgggtgtgcaaaagtatgcaacagagttcgcgccacaagcgcacagcacacaccccatatggtggctttcgggccgccaaagtcaagaagaagtagctagtgatgactgaaaacacgcaccacgatccggcagcactcgacaagctcaccgaaccgttcaccgtactgccgaacgacaaccccgcatccgatgagaagcgccagtccctcatcgacaagccggctttcggccaggtgttctccgacaacatgacccacatgacttggaccaagggcgaaggctggtccgaccgccgcgtcgaaccgtacgcaccgctcaagatggacccgggtgcttccgtgctgcactacgcacaggagtgcttcgagggcctcaaggcttaccgtcatgccgacggctccacctggctgttccgcccggatgcgaacgccgagcgtttccagaactccgccaagcgtctgtacctgcctgagctgccgattgacgacttcctcggttccgtggccgcgctggtcaagcgcgacgccaactgggtgccgtcccgccgcgagtacacgctgtacatgcgtccgttcatgttcgcttccgagccgttcctcggcgtgcgcgccccgcaggaggtcgactactgcgtgatcgcctctccgtccggcccgtacttcccgggcggcgtcaagccggtgagcatctgggttgaagacaagtggttccgcaccggccctggcggcactggtttcgccaagtgcggcggcaactacgccgcctccctgctcggcgagtacaagggtgttgagaatggctgcgagcaggtgtgctttgtggacgccgccaccaagacctaccttgaagagctcggtggcatgaacatgatggccgtgcacaaggatggccacgtggagaccccgtccctgaccggcaacattctgccgggcgtgacccgtcgctctctgattcagctgctgcaggacaagggccacgacgtggtcgagaccatgatcgccctcgaccagctgctcgaggacatcaagtccggtgaagtcaccgaggtgttcgcttgcggtaccgccgccatcatcaccccgatcggtcgcttcaagtccgagaagttcgacgtcaccgtcgccgacggcggctccggcaagctcacctgcgaactgcgcgacgagctgctcggcatccagctcggcgaagtcgaggacccgcacaactggatgtggaaggtgtgctgaactagcaccttttgtttccgactaagaccccttagaatgtcaacaattccaaggggtcttggcgtattggaaatgttcctggctagagaggtacagatggatttagcaacatttcgcaacaaataatatgatttaggtcttctgcacgttgcgagggttggttatggttcatccagatgagaacaggagcaaacctatgagcaagatgagtgacatgacggaatactatgcttcagcctaccgtttgccgtcaggcttcgagcattgctcgaaactgaagccggtggcagaggcagcgacggcgttgcgtcggtggtgagacaagacatgagcttctggcgacgctgggggatgttcaatgtcagtaatggttcaaggtttggactgctgacgtcgctgagacaccttagcgtcgttaacgggtcaggttctggcgatcaaacgacggtaaaaaggggcttagcgtcgttagctgtacataagttggcacggcaacgacactggagcgcgtgatcgtcggtgccgtgccaaactttggccaacctccgacaaatgagaaggactaacgtcggtggctgctcaaagtttggcgcgctggcgacgctgtaagaaaaaaagtgtggagtcgaaccggcaatagcatttattcggtttgttctctagtccaattgcgtcaggcaaggcctgttgtaggctcgggtacgacgggctgtagcgccgaataaggatgaacgggaacagaacgaagacggactgagacgaaccgaagcggtaccagaggggagcggctcatgcaggtggtgttggagaacaacatcgtttttgtggtcatcgagtatttagcaatcctgtgttggggattgtcgggcggacttgccgccattcgcaagggctacgacatcttcaccatcatgctgtgcggatggcttaccgcactcggcggcggtcttgtgcgcgacgtgatgctcggtgccctgccgccggtcggcatcaccgacaaaggctatgtgctcaccacgctgttttccggcattatcgtggtggtggcccacccggagatcaccaaactcaaatggacgatgactgtcatcgatgctctgggcctcggactattcgcagtcagcggcaccgcaaaagctctggcctacggttcctcaggcatgacagccgtattccttggcatgttcacagcactggccggcggcctcattcgtgacatcttcatcggcgatgtgccaatgattattcgagacaaacacctctatgccgtgccctcgttcatcggttgcattctgaccgtgcttgtatggcgtggtgtgcactacggttggttcgacatgtgctcggaaatgctgctcgacgtgctgatcgtcatcatcgtggtggcgctgcgcctgctctcggtcggcttcaacgtcaccttgcccggagccgtcgagcgtcatcgcgtctacctgcccagcgaaagccgatatctcaagcgcccggtcatccatccgcacgccgataccgtcgatcccggcgataccaccaaggacgaagaagacaagcctcaggatgattcaagaccgcctcagggctaactgccttcaaagaggtacatttggccttctgcaaaatgacaactgctttcaaagaggtacctgaagcacgaaacgtcgagtataagcgttgcaatgacggcgtttatacttgggctttctcggattcggtacctttctgaacggagatgtcatttcgcaagaccgccaatgtacctctttgaatggagatataaaaagtcccgcaagccagatgacttgcgggacttgctaaaaccttaagaggcttatgctcacagagcgttgatcgcaacagcgaggccggacttgcggttggcggcctggttcttgtggatcacgccagcgccagcagccttgtcgagcttctgggcggcaaccttgtaggcggcctcggcggcagccttgtcaccggcggcgatggcttcgcgggtggcgcggatggcggtcttcaggccggacttcacagccacgttgcgaaggtgcgccttctcattggtgagcacgcgcttcttctgcgacttaatgtttgccacgtttactccaaacgatgtgtgttataaggacatacaaaaggtagaggatagcatgagccccggaaaaacccgcgcaatgccacgccgaatacagtccctcggctacactaggtgaagtttgagtatatgccaagaggaggaatgcgttggtcgtccaacacaatcagccgggttccacggatcagtcggtgattcgcaacttctgtatcatcgcgcacatcgaccacggcaagtcgaccgtggccgaccgcatcctgcagttaagcggcattgtgcccgagcgcgagatgcgcgatcgcttcctcgaccgtatggatatcgagcaggagcgcggcatcaccatcaaatcccaggccgtgcgcgtgccatggacctttgacggcaccgaatacacgctcggtatgatcgacacccccggccacgtggacttcacctatgaggtgtcccgcgcactggccgcctgcgaaggcgcggtgctgctcgtcgacgctacccagggcatcgaggcgcagaccctgtctaacctgtacatggccatcgaccatgatctggccatcattcccgtgctcaacaagatcgacctgccgtccgccgagccggacaagcatgccgaggagatcgcaggtctgatcggctgcgagccgagcgacgtgctgcgcgtctccggcaaaaccggcgaaggcgtggccgacctgctcgaccagatcgtcatggacgtgcccgccccgcacggcgaccccgaggcccctgcccgcgcgctgatcttcgactccgtctacgatccctaccgcggcatcgtcacctacatccgtatggaggacggcgaactgcacgaccgcgaaaaggtccacatgatgggcattggcatgacccacgatcccatcgagatcggtgtgatcagccccgatatgacccgtaccaaggcactcggtgccggtgaggtcggctacatcatcaccggtgcgaaagatgtgagtcagtccaaggtgggcgacaccctgacctcggccgtccgcccggccaccgagccgctgcccggctaccgcgaccccaagccgatggtctacgccggtttgttcccgatcgacaacgcgcaattccccgaactgcgtgatgcactcgacaagctcaagctcaacgacgccgccctgatctacacgccggaaacctccgtggccttgggattcggcttccgctgcggcttcctgggtctgctgcacatggagatcgtcaacgagcgactctcccgcgagttcggcctcgacctgatccagaccgccccgaacgtcacctacgacgtgaccgccgaggatggcagtcagcatcatgtgaccaacccgagcgaattcccggacggcaagatcaagaagatcgtcgagccgatggttgccgccgacatcatcacacccaaggaatttatcggtgcggtgatggatctgtgccaggaccaccgcggcattatgggcacgatggagtacatctccaccgatcgtgtcgagatgcactaccgcattccactggccgaaatcgtgttcgacttcttcgaccagctcaagtcccgcaccaagggctacgcttccctcgattaccatgaggatggcgagcagtccgccgatttggtcaaggtggacatccttattcagggcgagaaggtcgatgcgttcagtgccatcgttcaccgcgataaggcgtattcgtacggtgtgatgatgaccaagaaattgcgtagtctgattcctcgccaacagtttgagattccgattcaggccgcaatcggttcgcgtatcatcgcgcgtgagaacattcgtgcgttgcgcaaggacgtgctcgccaagtgctatggcggcgacatcacccgtaagcgtaagctgctcgaaaagcagaaggccggcaagaagcgtatgaagatgctcggccatgtggaggtaccgcaggaggcgttcatcgccgccctgtccaccggcgaggactccaacgaccgcgacaccaaagacaagatccgcgccgctcagaagaccgagggctagtgttcgaggtctacatccacgtcccgttctgcttgcggcgctgcggttactgcgacttcaacacctacacggctacggatcttggtgcgggggcctcgcgcggcaactatgccaatatggtcattcgtgaaatggccctgaccaagcagtggcagctcgaccacggcatcgaggagccaccggtctccaccgtgttcttcgggggtggtacacccacgattctcgccgcccgcgatctggtcgccatgctcgatgccatccgcaagatctggagcatcgcgcccgacgccgaaatcaccaccgaagccaacccggacacggtcaacgaatattacatcaatgagctcgctgccggcggcttcacccgcgtttccttcggcatgcaatctgccgtgccgcacgtgctcaaaaccctcgaccgcacgcatacgccggccaacgtggtcgcaggcgttaatgccgccaataaggccggcctgcgctccagcgtggatctgatttacggcgcaccgggggagagccttgacgattggcgcacctcggtcacgaccgccatcgacctcggcgtgaaccacatctccgcctacgcactgaccgtggaacccaccacgaaaatgggtcgtcaaatcgcggccggcactctgcccaaacccaatgacgatgacgaagcagccaaatacgaaatcgccgacgacctgttcgccgccgccggcctcgaatggtatgaggtctccaactgggcccgccccggatacgagagccagcacaacctcggctattggcgcaacgtcgattgggccggtctagggccaggtgcccactcccactacaacgcggtgaccgaggctgaccacccccagtcggcttcgctgacagcccccgccagcgggggcaagtccgaagccattgcctctgcctcagctgatggacaggccaacgccgaacttggagaaaccaacgccgaactaggtatgatcaacgcgcatgggaacaactcccaagaaattcatgcccccgctggcgggggctgtccggcggatgccggactgggggtggtttctgtctcacacggtctgcgcagctgggacatcgcgcacccgcgtttgtggggcacggccatcaacgagaaccgtgtgccgtgggccgatagcgagacgatcactcccgaggaaaacctcgaagagctcatcatgctcgggctgcgcctgcacgagggccttggcctcgaccgcatcaaccgcgccatcaacgatgcaggtatgagcagcacgccccagactctccgaaccgtttcggttgaccaactcgcccccatgatcagcgaaggcctgattaccgtatccgataatcatcgagtggtgcccactcgtcgtggccggttgctcaatgactcggtaatcgaacagttcttcgattacgtcggtgtatgagtcggtggtatggtgcgcggcagtcgccattacccgttcgctagttgtggttacaccgtcagagggagcttttttgttttaccggcgggggagggaaccgcgtaggactacgtccagggcgctttgcacgtagatcaggcggttggcagtgccgccggtggcctccgcgtcatcgcggttggacaggatgctgtccacggcggcctggcccatttcggccagcggcaggtgcacggtggtcagtggtgggaacacgtcggcggagtaggggatgtcgccgaaaccggtgacgccgatttcctgacccggctcgatgccgttggtgcgcaacgcggtcatcgcaccgatggccatcacgtcgttgagcgcgatgattgaatcgatgcctttgccgtcgtacagtgcgccttcgcccggcttcagcagtccggatcgggccatttgcatgacggccgcatagccgtcggtgcggctgaacttaccgtttgccacggctttcgggtccacggtgatgcctgcctcgtccaacacttccatcacaccggccagtcgttctttggaggagcggtgtgcgtcatcgcccttgagaatcgcagggcgcgtatacccggaatcgacgataagctttgcgatggcacgcgcgccgacgtcgttcgccacgtccacggccgggaagggcaggttgcggttgagtacgaacacggcatgtccgccggacgattcgtactggatgagttccgtctgcaacgcctggcgttccggcgcgtcggtgtattcgctttcggagatgatgatgccgcgcggcctggtggatacggacttacgcaccgcctccaactcctcgtgcggggtggctgccacgccgatggtcacggagatgccgcgttcggccgccgccttgaccacgccttgcgacacggatgcgaagtagggatcggagatatcggagaccagcagcacgatgttcggtgcagtgcctttggccactgcctgagcataggcgttgggacgatagttgagcttggtggctgcttccatcaccttgacatacgattggttgcgtgccttgcgggtgctgccgttgagcacacgggatgcggtggcgatggagacctgggcttctttggcgacgtccatcaatgtcgctggcgattgcgccttatcgttctgtacggccacgatcgaatcggtccttttcttccctgaaacggaaaacatgtctaaacgcttaccgcaatgatatcgcagttttgcttgcaatggtagcattgtggattggaaagcctgaattttgaacaaaaaataatcacgcgaattacggaaagcgattaccgttccgcgtatcgtgcggtatgctcgaagcatgacgcgatacttatgtgcccctgactccttcaaagagagcctgaccgccatggaggcggcccgggcgatggctcaggggattgagaatgccgaccacgatgccgaggtccgttgcctccccatggccgacggcggtgaaggcaccgcacgtgcgcttgtcgacgccactggcggatcgatgcacgccgtgccggtccacgacccgctcggccgacctgtcgaaggccacttcggcctgctcgccgacggcacgaccgccgtggtcgagacagccgaagccagcggcctcgcactgcttgaagccaaaaaacgcaacccgttgattgcctcctcctacggcaccggcgaactcatactcgccgctgtccgttccggagccaagcgcatcatcgtcgggctcggcggcagcgccaccaacgacgccggtgccggacttctgcaggccctcggcgttcgtcttctggacgggaacggcaacgaccttaagcacgggggagcggccctcgctgatctggccaccatcgacatcagcacgatggacccggctctcaagaacgtctccatcaccgccgcctgcgacgtgaccaacccgctgaccggtcccaccggcgccagcgccgtgttcggaccgcagaaaggtgcctcccaggccgacgtcgccacactggacgccgcgttggcgcacttcgcgcaggtcatcgaaagccggctcggcgtcgctgtgaacgacgtgccgggcgcgggcgccgccggcggtatcggcgccgcgctgaaaggcttccttgacgccgaattccgtccgggcatcgccatcgtcatcgaacaatccggacttgatgcggccgcgcaatgggctgacgtggtgttcaccggcgaaggctccatcgacttccagaccaagttcggcaaaaccccggccggcgtggccgaaaccgccaagcgccacggcaagcccgtgatcgccgtcgccggacacatcggcacgggcatcgacgaactgcatgaggtcggcatcgacgcggtattcggcatcgcccccggtgccgccagcctcagcgaactgctggccgacgcggccgccaacgtgacccgcaccaccgaacaagtcgtacgaaccctacaactgaagcagcttcacaagctccctctgatgggccgagccgtgaaggaaacgccggaggcgtttccaggcgagggcttgacgacagtcaacccagccgaaggctccataattgcgggacgagctgccgcggcaaagccgtgactgaggggggagacttgtggcgcagccgcaaaaaatggcatcggctttcagccgatacagtcattcgtctgcttctctccctcagtcagctgcgctgacagctccctcgtcagagggagccacacaattcggaaaggaagatatgcgcaccatgctgtacaccaaggtgaccagcatgctgagcaccacgggcatcgccagcgagaaatacgccttcggaatcggcgccttttcgaagagttcgttatccatttccgtcccttggtgttttcgttcttcagtcactgcgcgggatgccgttcggcgtgcatcacaggcattgcagaggcaacagtgtggacaacgggcggggggagtatctcatgatgcggtgagggcgttgatgatgacgcatcgtgtattggtggccgtgtgcatcgtatgtgaacctgtgctggcacggcgtacacacgatgggaaaagaaagaatatatggaccccgttgtcccggttattgttcagttattactgtgttgaattattgcgttattcaattattgtggtgtgccggccgattgcggcctgcgggggattgccttcgtatgtgtcgtgcaatctcatgaatgggatcgttcgctagattcagcgagcgtccttgttggcggcgttgatgatgtcggcgaacatcttggagtcggcgtagccggcgcgggcgatggcgtccataccggagagggtgaaaccgcgaatcatggaatccatgaatgacataatgtgttccttgtcttgacttgcaaagccgtgggctttgcgatgtgttgttgtttacgttatgagacgggccgtgtgtgagcggcgagtcagggaagaggctcagcgagcgttcttatcggtgtcgttgatgatgtcgagaatcatctgggagttggcgtgaccggactgggccagggaagtggcaccgtacatagccagaccgcgaatcatggaatccttgagagacatcatgtttcctttcgttggtcaaaaccttgtggctttgagttttgtttatcggtttctttctgaaaccggtttcagaataacgcagtccgatgacaaacgcaaggggactattccgctctcggcgtttctggcggaatatcgccgttctatagataccgttcggtagttaagaggctgtctagtcgactttctgacggtcttgttctgggcgcatggttttcacgaaatggcctcatgtcgcggaaatcgtacgctgagtcgtcgtaagcgtacggtcttcacgaaatggggtctcatctcgtgaagaacgtacactgagtcgttctgggcgtacggttttcacgaaatggggcctatcttcaccggattttgggcacaccggccttgagcagcttggtctcaagattgatggggcgtagcagatcctcatagaacacatggacgatttcggtgacgccctgttcccggagatgccgatcacgtctgcggtcgtactccattttcgcctggaggcttgcgcgattcttgttgctggtgtcggcgtatttggccatgccgtcgtattctgccacgatgatgcggccgtctgcgagcttccaacagaaatcgacgcgatatggcattgcgggattgtcgggattcatgaactgcacctgcagcaggggaatgccgaaagacaattcggtgatctggccacgcatcaatgattcgccgccgttttcgctcaggggatccgcgtacttcagcagcttggtcacggagacctcgtcgcagacgctttgaatcatcagcgactgcacctcttcgatggtcgtcagggactttctcagagccgaatcgtatatgggcagcgcctgtgggaatgggaatgccgcgcagtcgagcagcgttcgcgccggagtcgtcaagagaatgccattatgcttccgcgtcggaatccgattgatatagatgcggttgagacgcgcctcgtctccgccgccgatgccggacttcgaggcgatgtgcactgtgccgtcgtgcagggaatagttgtgctgcagtccgtatacgcacgccgcactcaaccccgcaaatacccactgagggtggattgcggacagcgcacgtatgacctgcaatgactgttgctctctggtcatggtgttccaaagtattcggtcggcgtacaggttcttatacggtgacaccagctccccggcatgcaggcgacgtttcagggcgcgccgttgcgcatcactggtgccatagcagcagcgacgctcctgcttcgcctgctgcagcagtgcagaaacttccttgtgttctttcatatctcgacgctaagggtgattttgattgttgcacaagctcaaccggcaaatgtgaatactatgtcacgcgaattgttggtgtggataacttgaatcgacgtcgacggctttgccgacggtcttgtcggaggcgatattagcctaggacaccttgctgcgccgccttccataccgagaacagtcatcagtgacaccgagggcatcttcagcgtatgttcttcacgaaatcagctgccatttcgtgaaaaccgtacgctcagaatgactcagtgtacgttcttcacgagatgaggccccatttcgtgaaaaccgtacgttgacgacgattcagtgtacgttcttcacgaaattagggatgatttcgcggaaaccgtacactcaccgcaactcagcgtacggttttcgcgaagttattgatttggatataggttccccgtcatgaactacaatgaatcgcggcgaaaaacggggaaccgaagtcggagcgcggctgaacggatatgggtgtgactggatgactgccatggtgatgccggttctccttgacgtacgcaataacaacaactgacaacaacaggggagacaaggatggcgagaagtgcgggccgcacccgaccggtgatcaaggacgtggccagactggccggagtctcggcaccgaccgtctcccggtatctcaacggcaccgtcaatgtcaccgaagacaagcgtgaacgcatcgccaaggccatcaaggagctgggctatgagccgagcattgtggcgcgcgccctgtcgaaccgggagatggactccgtggtggtgttcgcggccaatccttccgccttctccacgtccgaaacgaaccatggggtcgaggccgccgcccgtaaacgtcggttcctgctcaatatcgtttctttggatgagtccgacatggactccgtcaaggctcgtgtgcgcatgggtttgtcgatcaggccggcgggcgtgatcgtctacgagtacgaccgggccggcatcgccgcactggaatacattcccaaagatatgccgatggtcgtggtgggtggcagcttcggcgacggcgaataccagatcatcaacgccgaaagggatggtggccgttggatgaccatgcatctgctggatctcggccatcgcaccgtgttccatgtggggcgcccggaaggaccgaccgataacacccgcaccaatgggtggcgtgacgcgctcaaggagcgcggcgtcacggtacctgacccaatcatcgtgcccgacgatgatttggaggagtcggtcaaggctgggcgcaccttgggccgtcgtggtgatgtgactgcgattttcgccgacaacgacgagaccgccatcgctgtgatccgaggtctaagggaggttggtcgccgcgtgcctgctgacgtgagcgtcgtaggctttgacgaccgcaacttcggtgccatgtggaatccggcgctgaccagttacacccagaacttcctggacatgggggagcggtccttccggatgctgttcgaacagattcaggccaagcgtgccggcgatgacgcgccgccctcgcaggtcgaagtggtgcaaggcaagccgtgtctgcgtgcctccgaacgcgcgtacggcgacggcgaaatcgcgtagtcgatggggcgtgcgtatcaatcgatagtgactgtagcgcattcatatcgtgacgaggagtctcccatgccgaactgtaagcgcttaccttaaatagttcgtaatgtgatttacgtcatactaatagatgttctaaatcatagtgttatgcaaggattccttgtggaaaatggctatttatcaacagttttcgaaaagtccgcatgatgggcgactgtgagcacgctttatggtaatcgctttccgtagtgttattgttacagtgtgacttttgaacaatcggtaactctgaagactcagccccagacctcgggcactatctcagcggcagacgccgcgatgcaatcggcccgcgacgaacgcatccccggcaaactcatctgcgcgatcgtggccgtcggctcactctcattcttcggcatcctgaccgaaaccgtgatgaatgtgctgttcccgcagctgatgggcgtgctccacatcagcgaggccaccatccaatggctcaccaccggctatctgctggtcgtgtcgattactgtgccgctcagcgcatggctgcgccgtcgcttccgccagcgcagcatcttcctggcggcaacgcgatgttctccacgctgcagcagttcacgggtgcggccggcaccactgtggtgggctaccgtgatctccgtgttccagtccggctcgggcaaggtgggttccgccggctatgccgccgccaccgtgaccggcgcatagattgactacgcgatcatggctgtggtcatcgttatcgttatcgtgttcgtcgccatgctccacgccctgcgtaaccggaagtagatggtaagtcgagtggcaccatgctaccgcgcaatggctgggcatggagttttggctaggaatcgttcgacaggcgttggcgcggccgctgagagcattcgcgtcgaaaggtttgccggagctcgttcggcgtggaatgggccgattcaccggtgattgttggtcaaacagccaatgctgacccttctgccaatggttagcgaggttcctatcataagcatttcggagagcgatctcgaaaaaggcgacatccttcacgaggatttgaccaaggtcaacattccactcgtataaagtaaggctgtaagcgcatcttggtggcaagcgtcaaggtatgtacggaatcgcggggcggaaagccactcctcaatccactgcggattggtaataacggatgattgtaacgcatgaatcacgaggcccccttacctcgtattgcaatgccccggtgacatgaaaaacggcggtcaacacggggcttgtacattaaggatacaggaagggtagttataagttgctgatatgccgtgttttttacgatagtcatcggcctctcccatacggcggaacaggaactgacggatgccgagatgccgtgattcggcgggaggacctgtactggcccagtccttctgctcggtagcggtaccgctacgccgactcttcccgacgctccagtgccgccgatatcagtgaatgcccagcctgatgttggtagagttaaggctattggcttggtctcgacggtgagacttctccaatggccaatatgcactgttgcaaaggagtatgcggtatgcaaccaatcaaagccattcaatacggctgcggcaaaatggcgaagtacacgattcgctatatgcacgagaaaggcattcaaatcgtcggtgccatcgacgtgaatccggaagtcgtgggcatggatgccggtgtgtttgcaggcatcggccccatcaatgtgccgattcgcgccgatgccgaggctgtactcaacgagtgcgacgcggatatcgcggtagtcacgctattcagcttcgagaacgaaatcgccaccatgtgcgagcagtgcttggcccgcggcgtcagcgtgatcaccacctgcgaggaatgcatctacccgtggaccaccgatccggccaccacgaaccgtctcgacatcatcgccaaggaagccggtgccaccatggtcggctccggcatgcaggacatctactgggtgaacatggtctccaccgtcgccgccggatgccacagcatcaagaagatcaccggtgcggtgagctacaacgtcgaggattacggcctggctttggccaaagcgcacggctgcggtctgaccgccgaggagttcgaggccgagcttgcgcatcccgaaaccgtggtgccctcgtatgtatggaattccaatgaagcgctggcccagaagcttgggcttaccatcgcatcgcagacccaggccagtgtgccgtatttcagcgatgtcgacgtgtattccgagacgatggacgagacgattccggtcggcaaatgcatcggcatgtccgccgtggtaaccaccgaaacgaatcagggcatcacgttggaaactgcctgtatcggcaaggtgtacgggccggatgatggcgatatgtgcgattggaagatcgagggtgaaccggacgtggagttccacgtggtcaagccggcgaccgtcgaacatacgtgcgccacaatcgtcaaccgcattccggacgtgctcaacgcgccagccggatatgtgacggtcgatcagctcgatgaaatttcatatctcacgtatcccgccgcgctgtacgtggcatagacccatattttcagggatgaaggccggcactcataagggtgccggccggtatcaggcggccagagtcgacgtgcgtggcatcacctggaactggatatggtcatgggtgatgtcatcgggccgttcatgccgtaggttcgactcgatcagcgtcaccatgcgatcgataaccgtacgagccattgcggggacgtctatcgccacagtgctaatgggtgggttggcgcagtcggagaaggggatgccgtcgaatcccatgagccgtacgtcgtcgggcacgcggatgccatgttcggtgagttcgcggagcgcgccgatcgctatggtgtcagacatgcacaggatgccacaatcgcccgggacaggcgtcaggaccgcaagcagcatcctgctcggcatcggcggcgacatcgccaacttcaaaagcgcggcccacctggccgcccacgccggcatcgctccggtcaccggccagtccggcaccagcatcaagaggcgagaaaccctccagacggggcaacaaacgcttatagactattgcgccttgtataaatgcgaactgccagtcaaccttaccgttgactggcagttcgcatttatcgctcccgctggcgggagctgtcatgcgaagcatgactgagggtggtccacagccgccaatccgtaacatcacccaacgcagcatttcacgatacggacgtttccgtatcgtattttcgtgtggtcaaatagacatttcgggcgaaaaagttcgaaatacccccataactggccataaaaacaattgcttgagaatcactattgacttttatggcgactcggtatatggacacgcgaaacgaaaatgacatggagcaacggtactgtgtcaacagcaatgaacgaagaggcacgattcccttacgtgcccacaagcaattgaggtgattccggtgacattcaaagccccgctcgatctcacggtccacgctccggacggtatgtatgatcccgccaacgagcatgacgcctgtggtgtgggtatggtcaccactttgaacaagcgtcctgaacgcaaaatcgtcactgacgccattgaggtactggtcaatctcgaccaccgcggtgccgtgggtgccgaggagaacacaggtgacggcgccggcattctgatgagcatgccggatgagttcatgcgtgccaccgtgcccgccgaactgcccgaagccggccactacgccgcaggcatcgccttcctcgaccgcgacatcgaaacctccggtcagcaggaacaggccattgccaagatcgtgcgcgaggagggccttgaagttctcgcatggcgcgtggtgcccaccaacccggacggcctcggcctgcaggcccttgccgccatgccgggattcaagactctcgtggtcgcctctccggacggtgctctggccggcgtggacttggatcgcaagaccttccgcatccgcaagcgcgtcgagcatgaggtaggcgtctacttcgcttccctgtccgcccgtaccatcacgtacaagggcatgctcaccaccatgcagctcacccacttcttcgaggatctgaacgacgagcgcatgaaggccaccatcgccatcgtccactcccgcttctccaccaacaccttcccgagctggccgctggcccagccgttccgtctgctggcccacaatggcgagatcaacaccattcagggcaaccgcaactggctctccgcccgtgaaggtcgtctgagcagcgaactgctcggcgagttcgagccgctgctgcccatcaccactccgggctactccgattctggcaccttcgacgagtgcctcgaactactgcacctcgccggccgttccctgccgcacgccatctgcatgatgctgccgccggcttgggagaagaacccggatctcgatccggacgtgcgcgccttctacgagtacaacaacacgcttatcgagccgtgggatggcccggccgacatcgtcttcaccgacggcacccaggtcggcgccctgctcgaccgcaacggcttccgccccggccgctggcagctcaccgacgacggctacatcgtgctggcctccgaggccggcgttctgccggagatcgcgcaggagcacatcgtgtccaagggccgtcttgagcccggcaagatgttccttgtcgacaccgccgaaggccgcatcatccccgatgaagagatcaagaagaccctcgcctcccagcacccgtaccgcaagtgggtggaaggcaactcggtcgagatgagcgatctgccccgccgcgagcacgtgagccactccggacagtccgtccagcgccgtcagcgtgccttcggctacaccgaagaggatctgaagctgttgctcactccgatggccaacaccggtaaggaaccgctgggatccatgggtaacgatgcgcctatgcccgcactctccagccgcagccgcatgctgttcgactacttcacccagaagttcgcgcaggtcaccaacccgccgctggactgggagcgtgaggagatcgtcacctcgctcgaatccgccatcggccccgagcctaacctactggccgattccgagctgcacgccaagaagatcctcatcccgctgcccgtggtcaactctgatgagatggcccagctcaagcgccttgacaaggcccgcatcctcggcggctactatcgcccgtacgtggtcaagggcctctaccaggtcgccggcggcggcaaggccctcgaagagcgacttgacgagatctttgccgaaatcgacgaggccatcgccgacggcaagaacttcatcgtgctctccgaccgtgaatccaaccacacgtggggcccgatcccgtccctgctgctgacctccgccgtgcagcaccacctgctgcgccgccacacccgtacgcagatctccatggccgtcgaggccggcgacgtgcgcgagattcaccacgtcgcactgctgatcgcttatggtgccgcctgcgtgaacccgtacctggccttcgaatccgttgaggatttggcccgtaacggctacctcaaggtcgacgcggacaccgccgtgaagaacctcaccaaggcgctttccaccggtgtgctcaagatcatgtccaagatgggcgtctccaccatcatgagctaccgtggcgcacagctgttcgaggctgtgggcctgagccaggaagtcatcgacgaatacttcaccggcaccacctcccgtgtgggtggcgtgggccttgacgagatcgccgaagaagtggccatccgtcaccgcgtggcctacccgaaccagtggagcgcatccccgcaccgcaacctgcgcacgggcggcgactacaagtggcgtcgtaccggcgaggaccacctcaacgatcccgaggccatcttcctgctccagcagtcgacccaccgtggcgactaccagatgttcaagaagtattcgcaccacatcaacgacacgtcgaaccgactcatgaccctgcgtggcctgatgaagttcaacaacaaccgcaagccaatcgacatctccgaagtcgagccggcctccgagattgtcaagcgcttctccaccggtgccatgagctacggttccatctcacaggaagcgcacgagacgcttgccatcgccatgaattcgattggcgcacgctccaactccggtgagggcggcgaatccgacgatcgtatcaacgacccgcagcgctacagccgcatcaagcagatcgcgtccgctcgcttcggcgtgacctccgattacctcgtgcacgccaccgacctgcagatcaagctcgcccagggcgccaagcccggtgagggtggccacctgcccggtgccaaggtcccgccgtggatcgccaaggtccgtcacgccaccccgggcgtggagcttatctccccgccgccgcaccacgacatctactccatcgaggatctgaagcagctgatcaacgatgcgaagatggccaacccgaaggcacgtatccacgtcaagctcgtttccgagttcggcgtcggcaccatcgcggccggtgtggccaagtgccatgccgacgtggtgcttatctccggctatgacggcggtacgggtgcagccccgctcaacgccatcaagcacgccggcaccccgtgggagatcggcctgtccgaaacccagcagacgctgatcctgaacggcctgcgctcccgcatcgtcgtacagtgcgacggcgagctcaagaccggtcgtgacgtggtcatcgccgccctgcttggtgccgaggaattcggcttcgctactgcggccctgatcgtggaaggctgcgtcatgatgcgcgcctgccagaagaacacctgcccgcagggcattgccacccaggatcctgagctgcgcgcccgctttaagggcaagcccgagtacgtggtcaacttcttcatgttcatcgctgaggaggtgcgcgagatcctcgcccagctcggcttcaggactcttgaggaggccatcggccacgttgagtgtttggatcaggacgaggccatcaagcgctggaagtccggcggcatcgacctgaccaacgtgctcaagcaggccggcccggtacccggcacgatcctgcaccagaccatcgagcagaaccacgagctggagaaggcactggacaacaagctcatcgaacttgcccagccggccctcgaacacaaggaacccgtgcgcatcgaaatgccgattcgcaacgtcaaccgtacggtcggcaccatggtcggctacgagatcacccgccgttacggcgaggaaggtctgccggacgacaccatcgacatgaccctgcacggttccggaggccagtccatcggcgcgttcatcccgcgcggcgagaccatgcgcatctacggcgaagtcaacgactacgccggcaagggcctgtccggcggtcgcatgatcgtgcgcccggaagacaacgtcaccttcgacaagcacagtaacgtcatcgccggcaatgtcaccggtttcggcgccacgtccggccagatgttcgtggccggtcgcgccggcgaacgtttcggcgttcgtaacggcggtgccacgttcgtcgtcgaaggcgtgggcgaccacggttgcgagtacatgaccggcggcactgttgtggtgctcggccccaccggacgcaatttcggtgcaggcttctccggtggtaacacttatgtgcttgacctcgatatgaagaaggtcaacccgagtgccatcaagtccggtgcactgctcttcaagtcgcttgatgccgaaacctccaagctggtgtacgcactggtcaagcagcatgtcgaagagaccggttcccagttcgccgcggccctgctggaggactggaacgaaaccgtcaagcggttcacgcacgtagtgccgaagcagttcgtggccatgacgaaggccatggaagaagccaaggccaacaatgtagatttcaatgcgcccggcgcctgggaaaaggtgtacgagcaggttatggaaggagcgcgctgacatgggcgacccgagaggattcctgaaggtccgtacccgccgagagttggctgaacgccccgttgaggagcgtatcaaggactggttcgacgttcacgccgaaaccggcctgcaaccgtggacccaaacgcaggcggcccgctgcatggattgtggcaccccgttctgcatgaccggatgcccgctgggtaacctgattcccgagtggaacgacttggtccgtcagggcaagtgggaagacgcctacaaccgtctgtccatgaccaacaacttccccgaagtcaccggccgcatctgcccggccctgtgcgagcaggcctgcgtgctcggcatccaccagccgccgaccatgatcaagcttgacgagcagaccatcatcgatcaggcatgggatttggactacgtcaagccgctgccgccgcagcgtctgaccgaccagacggtcgccatcgtcggctccggccctgccggcctcgccgccgcacagcagctcacccgcgccggccacaccgtcgtcgtctacgagaaggacgacgccatcggtggtctgatgcgttacggcatcccgaacttcaagcttgagaagggtctgcttgaccgccgtgtcaagcagatggaggccgaaggcacccgcttccgcaccaacgtggaaatcggcaaggacatcacgtgggatgacctgcgtgaccgttacgacgccgtcgtagtggccatcggctcccgcgtgccgcgcgatatgaagattccgggccgcgagctcgacggcatccacttcgccctcgacttcctgcccgacgccacgcgccgtatcttcggcgtcaagccggtgcacgacatcaccgccaaggacaagcacgtcatcgtcatcggcggtggcgacaccggttccgactgcctcggcacctcgatccgtcagggtgcgaaggacgtcaccgtgctacagatcatgccgaaagagccgtcaagccgtccggacaacagcccgtggccgaccttcgcccgcacctaccagaagacctcctccatggaagagggcggcgagtacatctactccaccgactccgtgaacttcgagggcaccgaagaggagaaggccaaggtcaccattgataactcgaccaccgccgaaggcttcgtggccgatgagcgtggtcatgtcaccggcttgaaggtcgtctccgtggctcccggcgaaaatggtccgttcactcgccagcctggcactgagcgcgtgctgcccgccgatctggtcctcatctccgtgggcttcctgcacccggacaccgagaccatcctcgaccagctgcccgtcgaactcgacaagcgtggcaacatcgctcgcaatgacaagttcgccacctcccaggatggcgtgttcgtgtgcggcgatgccggccgtggccagagcctcgtggtctgggccatcgccgaaggccgctcctgcgccgcagccgtggacgagtacctctccaaggaaaagagcgagctgccggccccgatcaaggccagccagcgtccgatgatgctgcctcgctgaatactttccaaacagaaacatgaaaatcccttcttcatgaggggatttttgcgtttctgggattaattactgccttgagtcttcagtaatgtttatatttcgagaatattgcatacatggttaacatgaagctcctatggtgtctttcgtcgccaaaaagacgacgccagaatatttgggagagattcatgaacacacgtcatgtcacttcactggtcgcggccggtgcggcaatcgtcatgctgctcagcggctgcggatcgaccggtacctccaattccagcaatgcttcagattccaatatcatttccgtgtacggcagtgagccggcacacccactattccccggcaacaccactgaggccggtggcggcaaggttgtagaccagctgttcgcaggtctggtgacctacgatgcgaagggcggcatccacaacgaggtagcagacagcatcacctccagcgacaacgccacgcattacgtcatcaagctcaagagcggatggaagttcaccgacggcactccggtgaccgcgcactccttcgtaaacgcatggaattacaccgccaacagtgccaacaagcaggccagcgccagcttcttcagcacaatcgaaggctatgatgatctgcaaaagccggacgtggaccccaaggccacgctgagcggcctgaccgtcgttgacgacaacaccatcgatgtcaagctcagccagcccgactcggcattcccggtcaaggccggcagccacgcctacatgccgttgcccgaatccgcgttcaaggacccgaagaagttcggtcagcacccagtgagcaacggcccatacaagttcgtgtcctggcagcacaaccacagcatcgaaatggtgaagaaccctgactacaagggcaatcgtgtcgccaagaacgatggcctgaacttcaagatctatacctcgcccgattcggcatacgccgacctacgcggtggcaacctggacttcacgaacacgattcctgacaccgcacttacctccttccaatccgacaagtcgctgaaggcatacaacgagcccggtggcaatacgctcaccttcaccattcctgaatggctggaacacttcggccagaacgaggaaggcaacctgcgtcgtcaggccatttccatgtccatcgaccgcaagaccgtcgccgagaagatcttccacggcaccgccacgcccgccgtcgacttccttgcagccccaatcagcgcctactccaaggaactcaagggaaatgaagtactgaagtacaacccgtccaaggccaaggaactgtgggccaaggccaacgccatctccccgtggagcggtgagttcggcattgcatacaatgctgatggcactgcgaagaactgggttgaggcaatctgcaactacatcaagaacacgctggatatcgatgccaagagcatcccgatgtccacttccgacgaattcctgtccaatgtggattcaggcaagatgacctccgcataccgcagcggttggggccctgattatccatccgcggacaactatctggtacagctgtacgattccagttcggccgacggcaagggcggcaacagcggcaactacaagaaacccgagttcgatgccatgatggacaaggctctttccgccccgtccaccgaggaagccgacaagtattatcagcaaggtgaggagattctgctgcaggaccttccggctatcccgttgtggaaccagaatgccaccgcagccagcacctccgcagtctccggcgtcgcattcgactacggcggcggcccagtgttcaccgcactgaccaagaagcagtaagcagtaagtaataaacagacagcgctagccccccgctggcgggggctgtcggcaaagccgactgggggtggtctcaaacagcagaccacccctatcttgttatatgagcgagctcccgtaagcgggagcaatcgagaacatacaggagcacattaactatggaattcaccgtatccggcactaccgtgcgattcgatgaacgaacaatgcagttcgcttttacgcgcgacggtgccgaatggaatacctgcgctgatttcaagccgaccctgcaatgcgcgcaaggcaccttcgcgttcgcggatgccacttccatcacccatgagcagcgtgaaaccggcacgggaaccggcattcgcagcatcttcaccggctttgggcacagcgcatactcctttgaaacctatgtatgggtggagcgtgcctcaggcgatgtgctcttcgaatggattccgctcaatgagcaaggcctgaacatcaccaatgtgacgtggcccgcagccatggacttcgattgcgccgacgaccatgacacgacactcatcacccatgagcaaggtgtgatgatccccaacacatggcctaccgccgtgagcaccaaagatatcgccttcgacggtcgcttcgaaacggctggcggttacatgccgtggttcgcgcagctccgcgcagacggacacgggtatatcgccatctgcgaaactccatggaatgccggttacggcatcgaccatcccagcgatggcccgtacacccatatcaatacttggtttgagccaagcctcggcacaatgaattatcgccgcgtggtacgctaccagttcctcgaccacgccgatcacacggcggtgtgcaaggcctatcgttcgtacgtcaacgaacgaggtcgcctgcgtacgctcgccgaaaaggcggcgcgcaatccctccgtgcgtgacctgattggtcgttcatgggtgcacatcggcatcaaaaccaaagtacagcccgactcgtactactacgataaggaccaccccgagaaaaacgattcattggtcaccttcgcacagcgcgaaaagcaaatgcgaacattgcacagcatgggtgcaggccgactgtacatgcacttggatggttgggcacagcccggatacgacaacgcacaccccgactatctgccggcttgtcaggaggcaggcggctgggaaggcatgaagtcgctggtcgacgcctgccatgagcaaggcgatattttcggcacgcatgaccagtaccgcgattactacttcaccgcgcaaacctttgatgccaacaatgcgattcggctggcagacggtacgatgcccgaacacgcacgctgggcgggcggccgccagacctacctgtgcgccgagctcgcaccggactacgtacgccgcaatttcgccgaaatcgccgcgcatggcatcaagctcgactgtgcatacttggatgtcttcacctgcaacgaaggcgacgaatgctcgaaccccgaacaccgcatgacccgccgcgaatgctttgaccgccgcgccgaatgcttcgaatatctgctctcgcacggcatcctctcctcgtccgaagaggtatcggactgggcagtgccaagcctgatattctgccattacgcgccatacgacttccagatgcgctcacccaacgagccgcgccaaggtgtgccggtgccgctgtataacctcgtctaccatgattgcgttatcgagccgtggatgatggagcgtgtggtggacggcgacgattacatgctgtacgccttgctcaacggcggagctccatacctgattcgcgatgccgcatacatcggcgttgacggcgacatggacgacgaacagcgcgctcgcacggaaaacgacatcgaacgctgccatacggtcgctgcattccatgagcgggtcggcatgcaggaactggttcgtcacgagttcgtggatgatgatccgctggtgcagcgttcggtattcgcggacggcactgcggtcacttgcgacttccatacgcaaacctatcgcatcaccgattgaccgcatcactgactgaaaaaacaatgacacacagtgggttccgatggactggtggcaaattaccgccgataagcgggtaatatagccaacagtgtcaccgtcgaaacaggagtagtgaaatgccgaatcgtgcagaacgccgtgcccaagccaaagcaggccgcaggggagtgccgtcgcagtatgaccagacccgtggccgtggccgttcgggaatgattgacgaataccagctgcagcagaagtcccagcgtctgcaggacggcaccgacggcaccgaatggaagcccagcggcggtacgattgcggacaccgaaaccctgctgaccactaacccgaactacacgaatccgaagatgttcaaggcaccgcattcgctgcgtcagtggttccgcgtgggcagctggacgctgatcgccatcgcgattatcgcgttcttcgtggttatgtggctgccaagccatccgatgtggctgatcatcaccgtctcctcggtgttcattgtgggtgtactgagcctgttctttacggctggcgattccaagcacaatccgaatttggatcagaacggcacggccgtctgatcttttgtccggtaaatccggcttgaaaagcaaaacgcacgacggaagttgtgcgttttcttgtatgcggtgccctaaagtaagaagtgcttgagtttctttctgacgcacgaaggagaggcagtccgatgaaagttgatattctaacccgcgaatacccgccgca

SEQ ID NO: 827 - DNA, 24141 bp, Unknown
  R14_18m  MAG No. k141_7887
catcttgccaggctccacgaaaatcgcagctttcatggtttcagacatacgttcataactccttgttttccggcatcgagcgcttaaggcccgttatcctcgtgttctattaaacaataatcgccttgcattaaccaatagccataaaccatgtttcgccatacccatgaggtatggcaacaaccgagcaattcactgcgataggccaatatccgagatacgctcactgttcgattcgtcgccatgagtaatctggagaaccggcgatgggacccgcctgaacttgtttcgaaccgcacactgctgatagttcctacacacgatttgacattgcatgaaatcgttgtgtcttcagcaggattcagcggtttcaggaaaggctattatgggctcgcaatccccatccgcagatgcccggccgggcacgcgcacggccactcctccggcgcacaaactccccgatatccatcttgatattgtgttggtcgtcttctgcggcggtgccatcggcaccgcgattcgctatgcgttcgcgcagattcccgcagccggcagcttccataccggcacgtttgtggccaacatgctggcctgcttctgctatgcgggtctgaccgcctatttggccggctcttcccggttcgacacgcgtgccaaggagctcaccagccgtgggctcggcatgggcgtatgcggcggtttgtctacgatgtcgacgttggcattggaaggcttcaccgcgattcgcgacggtcaggtggcggccggcattgcctatctactggtgacgttcgcgctgggtctggtttgtgcgtctgccggcgtgtgggcaggaacgcatctggccggctcctcgaacgcatccgccgaagcgtccgctgatacgaatgccgctacgaccagcaagggaggtaaggcgtgatgaccgtattcctaccaatcttggtctgcctgtgcggcggcgtaggcgcctcctgccgctatctgcttgacgcgaccatcaaaacgtattggcaacgcgcattcccgctgtccacattcaccatcaatctcatcgccggattcctgaccggtctggttgcggcgctggcactgggcgggacacttgatgaaccgtggcggctggtgctggccaccggtttcctcggcggattctccacgttctcgaccgcgatcaacgaaatggtgacgctcttccacaaacaccgctaccccacggcaacggcctatctggtgctgtcgctgggtgtgccggtcgttgctgcggcctgcggttttctcgtctgaccgccacgacgattcccgacgcggtcagcggtatcattgcgaggtcgaacgtcacaggtacatccgggaggtatatgggcatggcgaacaatggagcggatgtgaagccgaatcaaggtgtgggcgccacaaatacctcgaccacaacgaatactgcggaaaataccgtgggcacggcaaccccgaagcaaaatggactcgccgtgttgggcaagtatatgggtgtttccgccacgcagaccattgtggagtatgcgacgttcgccatcctgcacttgatcggcgtgccctcgcagatctccaacggtatcgccgtggtgtgttcggcgacctacaacttcgtgatgaaccgcaacgtgacgttcaaatcgtcaagcaacttcacccgttccgtgatgcttttcgtgctgctgtggatctggaacttcacgttcagcacactgctgatcggctggatgccgggcgcgacggacctgagcccgtatgtggtgaagttcattgcgatggcctgccagttcggctggggttatccgttgtgcaagtacgtgatttttaggtgacgcattccaattgctcactgtcgttcgccttcgcctatttgtatttggagcgcttatcagaagaacagcatcgcaacacctgcggcgaagcacatgagcagaatcgatgtcaggaagctggcgagcatcggcttcttgcccttggaagcgatggccttgaagttcacgttgatgccgagcgcggccatggccatgccgagcacgatgtacgcaaagtccacgagctgcggggtgatggaggcgatgagcggcacgaaggtgccgatgatcgaagcgccgatgaagccgagcatgaaccacgggaaggccacggtcttcttgccggtgttctccacctcggagtgcttcttctcccaccagatagcgatgatgatggccgcgaacacgagcatgagcacgcgggaaagcttcatgatggtggcgatgtccaccgcgccgaaagcgtcgccggcggcgaccgcgtgggcgatttcgtgcagggaagcaccggcggtgatgcccagctggtccttggtcatgccggccagcgggccgagcgcgatctccagcaacgcgaacacagtacccataatggctacgatggccacggccatggtcacgtcgttgtccttctcgtcctgcttgtcctcaggcaccttgatggaaccggccagacccatgacggcggccgcaccgcagatgccggtgccaccggcggtcaggatggcgagcatcgggtcgacaccgagcttgcgggcgatggcatagcacacgatgatggtcagcgtgacgaccacagctgcgatcggcagacacttgatgccctgcgtgaacagcacggcgaggttgagcttgaaaccgagcaggatgatgccgaggcgcagcagcttgttggaaatcaggccagcggcgtccttgacgcctgccttgcggccatcattggaaccgacgtaggcactgcggatcgggaactggatgatcataccgatgagcagcgcgatgataagcgcgccgaacaggctgaatccggggaactgcttgagccaggaggcgaacagcgaggccagcagagtcagaacgccaatgaacaacatgtcaacggtggtaatgcgcttccaccattttgtacagaactctctcacggtgtctattgaagctcaagcatttacatcggtcaaatcattgcaaccaatacatatcatcgattttgtcgatacctaattgatctccctctgatgagggaggtggccgccgcaggcggacggagggagagaaacaacgttcgcgaccttccctcagtcgactatctgactacccgcgcagcgcagcaataatcatctccgccaactcccgctgatcgtgcgtcagaccggatctcggcaccagcgcatagaaccgccgcacaaactcatcgccaagctcccgctgcaccggcacgcccgccggcacggcggcttccgaaatcaacgactgcccgaacccggcggacagcgccgccacaatcgccgcattactggacacttccatcgtgcgtgcaggcacaacctgagcggtcttgaaatacaaatccgtgtaataccgcacgccggaaccgtgctcgcgcaccatccacacgccgtcgggctcccccgccaacaccagccggtcctcgcacagggtgacgcggtccaccgaatcgttcacgatcggcttttccaccacgccgagctgcacggccttcatgctgacccgttcgagaatcgcatccgagttcatcacgtgtacggcgaagtcgaaactgtccatgttccgagccatcaccggcaacgccttcggcagcagaatcgccgcggtcgtgtgcgagaacgaaacggccagcggctcacgcgcctcctgcacgcgggcgatctgctcacgcgtatcccgccataatccgtcgatgccgatggcggtctggtacagcatccgcccggcctgtgtgggcgtcacgtcgcttttcgcattgcgcacgaacagcggcgcgccgaccatctgctccaattgggcgatacgcgacgacaccgtcgactgcgacaccttcagttcgtcggcagccagcgtgaactggcccacctcgtatacggcgaccagggtttcgagcagagggaacatggtttaactgtacgctgtatgatgcacgaatatttcaattagcttgggcgtagccctaggccacggacctggaccaccctcagtctcgctttgcgagccagctcccgccagcgggaccccaatggttttcatatcactatgcttcgcgcagttttgcgagctgtgttttggtcttgtggagcttggcatagatttcattgcgctgaacaggattcttgacgcgctgatggtcgcgggtgagcttgtccacttcggattcgagccgagcaatttcagtatggcgaatgatgcgcgcatccagattttcgatctccggcgtgcccagaatggtctgtgagcacagcgaggcccacagctcatcaatagtagagccggccagctccagctgggcctcccccgctggctgccaatcgccggcatatacccgatagatcggcgtgtggccggcacgccccggtatcgcccgacgcacggcgaacgcacattcctcacgtgtgctgccctcgaacggcacgtcgcgtacgcacacgaacacgatgcccgatttacgctgcccggcaatcaaatcgatgacctcgttcggtatgccagtggctttggccgtaagcttcagtccgatgaccagcacttccggaaccagtttgccgtccgcaagcccagtgttaatcgaccggaccaacgccagcatggtaatggattcgatttcgttcaccaatcgctgcttgagtttgcctgaaatcggtgccttgcccacgaacaaggctttcggcagtgtgcctttggcttcgggaatcgccgtggagacgggcagtcccagtgaaagcgcggatacggaaccacagtgtgcggcttgcgaaccagtcatcatcgaccttctttcccggcctgccatcagtgtcataccctcgcagtgcagcagtccgtttatctattggaaagcaacactagcgcatccaggccggaagtcgtggtacatatccatatcctgctgcggttataggaaatcccctccgagtttcctcgaaggggatttcttaagtcgctagttcaagcgaagattcttgtctgatgataatcaggcgaggatcttggtcacacgaccggagccaacggtgtggccgccttcacgcacagcgaaggtcaggccctcctccatggcgatgggctgaatcagctcaacggtgaaggtggcgtggtcgccgggctgaaccatctcgacgccttccggcagctcgatgacgccggtgacgtcggtggtgcggaagtagaactgcggacggtagttggagaagaacggcgagtgacggccgccttcgtccttggtcagcacgtagacttcgccctcgaacttggtgtgcggggtgacggagcccggcttggccacgacctggccacgctcgacatcctcacggccgaggccacgcagcagcagaccggtgttgtcgccagcctcgcaggcgtccatggtcttgtggaaggtctcgatggaggtgacggtggtctgctgggtcggacggataccaacgatctcgaccggggtgttgacggccagctggccacgctcgacacgaccggtgacaacggtaccacggccagagatggtgaagacgtcctcgatcggcatcaggaacggcttgtccaggtcgtgaaccggggtcgggatgtagtcatcgacggcggccatgaggtccttgacggactggacccacttctcgtggtccggagcgtcgtcgtgcagggcaccgtaggcggaggtgtggatgaccgggcagtcgcgatcgaagccgttctcgtcgaggaggtcacggacctcttcttcgacgagctcgatgagctcttcatcgtcgaccatgtcgcacttgttgagggcgacgaggatcttcgggacgccaacctgacgggcgagcagcacgtgctcgcgagtctgggccatcgggccgtcggtggcggccacaacgaggatggcaccatccatctgggcggcaccggtgatcatgttcttcacgaagtcggcgtggcccgggcagtcgacgtgagcgtagtgacgcttctcggtctggtactcgatgtgggcgatgttgatggtgataccgcgggcggcctcttccggagcggagtcgatctggttgaagtcgtactccgggttgacatccgggaactcctcgtgcagcaccttggagatggcggcagtcagggtagtcttaccgtggtcgacgtggccgatggtaccgatgttaacgtgcggcttagtacgctcgtacttttcctttgccattacttttgtcctcctggacgtctcgtgagtttcctgcgccctttcgcacagggactcgcttattctactgggtttctgggttatgtgccactttgaagagccagaacccagtcagcggtatacgatactaccgctgactggagacaccggccacttcatgatgtggcgcgtgtcactcgccgcgctgggccttgatgatctcctcggagacgctcttcggcacctcgtcgtaggagtccatctccatggtgaacatggcgcggccctgggtcttggaacgcaggtcgccgatgtagccgaacatctcggacagcgggaccttggcgtcgatgaccttgacgccgacgccgtcggtcatggactggatgttgccacggcgctggttcagatcgccgatgacttcgcccatgtactcttccggcgtacggacttcgaccttcatgatcggttcgagaatgaccggcttggccttcggggcagcttccttgaagcacatggaacctgcgagcttgaaggccatttctgaggaatcgaccgggtgcatctggccgtcggtgacggtggccttgacgcccacgaccgggaagccggcgagaacaccggactccatggcctccttgacaccggcctcgatggggccgatgaattcggcggagatgtggccgccggtgaccttgttctcgaactcgaaggtcttgccctcggtggtgtcgagcggctcgaagttcatcaggacctttgcgaactggccggaaccaccggtctgcttcttgtgggtgtagccctggtccatgacggccttgcggatggtctcgcggtaggcgacctgcggcttgccctggttgcactcgaccttgaattcacgacgcatacggtcgacgatgatgtcgagctggagctcgcccatgccggcgatcagggtctggccggactcttcgtcggtcgtgacctggaaggtcggatcctcttcggccagcttggacagggcgatgcccatcttctcctgatcggccttggtcttcggctcgacggccacctggatcaccggatccgggaaggtcatggagtcgagggtgatcgggtcgttgatggagcacagggtgtcgccggtggtgacgttcttcaggcccacgaaggtgtagatgttaccggcgtcggcgcggtccatcgggttttccttatcggcgtgcatctggaagatcttgccgatgcgttccttcttctcgcgggtggagtcgagcacggagtcgcccggcacgacggagccggagtagacgcgcacgaacacgagcttgccgtagaacgggtgggtggagatcttgaagaccagagccgcgaacggatcggacttgaccgggtgacggtcgatctcgacggactcgtcgccgggcttgtagcccttgatggccggcacatcctcgggggacggcaggtagtcgacgacaccgtccagcatcggctgaacgcccttgtccttgaaggcggagccgcagaagaccgggaaggcttccttggcgatggtgagcttgcgcacgccggcgcggatgtcttccttggacaggtcgccgtcctcgaagaacttgttcatgagttcgtcgtcggcttcggcggcggcttccacgagcttctcgtggtactcctgggccttgtccttgagatcgtccgggatctcggtggtgtcgtacttggcgccgagctcctcggtgccgttccacacgtaggcctgcatctcaaccagatcgacaacgccagtgaagtcgttctcggaaccgatcggcagctgcatcacgatcggagcggcacccagcttctccttgatggtgtcgacggagtagtagaagttcgcgcccagcttgtccatcttgttgatgaagcagatacgcggaacgccgtacttgtcggcctgacgccacacggtctcggactgcggctccacgccttccttgccgtcgaacacggcaacggcaccatcgagcacacgcagggagcgctccacctcggccgtgaagtccacgtggccaggggtatcgatgatgttgatctggaacttgtccttggtgtcgtgggactgacggctccagaagcaggtggtagcagcggactggatggtgataccacgttcctgctcctgcgccatgaagtccatggtggaggcgccgtcgtgggtctcgccgatcttgtagttcttaccggtgtagaacagaatacgctcggtagtggtggtcttgccggcatcgatgtgggccatgatgccgatattgcggacgtcgtggaggtccgaaatctcttcagccatctttttccttagttttactcagggcgagtgattaccagcggtaatgagcgaaggccttgttagcctctgccatcttatgagtatcctcgcggcgcttgacagaagcaccgaggccgttggaggcatccaggatctcgttggcgagacgctcggccatggtcttctcacgacgggcgcgggagaagtcggtcagccagcgcagcgacagggtgttggcgcggttcggcttgacctcgaccggcacctggtaggtggcgccaccgacacggcgggagcgaacctcgagggacggacggatgttgtccagggcgcgcttgagcacagccaccggttcctggtcggacttctccttgaccatatcgagcgcggagtagacgatgtcttcggcgatcgacttcttgccgtcaagcagaatcttgttgatgagctgcgccaccacggtggaaccgtagatcggatcgggcagcacgacgtgcttcttggaaggtcccttacgtgacatatctcttacttcgccttctttgctccatacagggaacgaccctgcttacggtccttgacaccctgggtatcgagcgcgccacgcacgatgtggtaacgcacacccgggagatccttcacacggccgccgcgcacgagcacgatggagtgctcctgcaggttgtggccctcgcccggaatgtaggcggtgacttcgatgcccgaggacaggcgcacacgagcgaccttacgcagagccgagttcggcttcttcggggtggtggtgtagacacgggtgcacacgccgcgacgcagcgggctgcccttcagggccaaagtcttggacttcttcggctttgcctgacgtcccttacggacgagctgttcaatagtaggcaacttgaattctccgattcagtggtttctcttgcttttgtgtgaccgccgcactgcgcccacacttttcagcacactcgcttggcatccgcctgttggcgacacccgacgaatcggaaaagatagcccagtccaccggcccgatggccttcgcccctcccgtcggcgcattactacgtgcgatcagcggtttgaaggatatcccagcatgctcgcctgttacataaggcgtgctgctggcacacacgaatatctatactacgattccgccggacaacgacgcgccgggcctcgactcactagcttgggacaatccgcgccctgtacttctcccctcctcccaacgcaacattcccgggaatgcgtcgcacaacacacgcacacacgccctcccaacgcaatattcccgggaatgcgtcgcaaaaaagcgaacgccacacagcaggtgcccccgcggagactatgtcacacgggggcaccgccaaggaggttacattatgtttcttttcaccacatgccgcttctgtgttatctgtttccagcacatcctcgtgctcttccatatccgatgggaacctctagcgacccggcctctttgccgtatcaccttgccgctttctgcattactaattatagcaaaaccgccctcgcgaaacgcccgatacatcaatcgggagtaagcgggagcggctatgttatgcggggtaggaaaagtggatgaccgactgactggagtcgtgccttacccggcctttctcaccatctcaggatttcaggcagcgaccttggcggccttgtcggcgtcgaacgggtgggccacggaaacggtgctcttggcggagcccttctcgccgttgtcagaatcccaatgaatctcgtgccggtcgtcatggttgcgccaccagctggacaggatggagccggagatgttgtgccacacggagaagaaggtggacggcacggcggcgagcgggttggacgcgaaggaggtcagggccagcgtggcgcccagggcggagtcctgcatgccgacctcgaacgtgatggccttctgctgcgcgtagcggaagcccttcgggtagatcctgtacatcagcttcgagaagccgaagcccagcgagtagccgcacagattatgcaggatgaccaccgggatggccatcagggagctggccacgaacagcttcggaccgttggcggcgacgaccacgccgatgatcagcaggatggccacctgagacacgatcggcagggccacggtgaccttctcgatcttcttgccgaagaccatgtggcagatcacgccgagggcgatcgggaaaagcaccaccttgacggcattgaggaacagggattcgaccggcacgctcacatactgggaggccagcagctgcatcagcagcggaatcatgaacggggcgcacagggtggagaggatgccgatggagacatcgagggccacgtcaccacgggacaggtagctcatcacgttggaggaggtgccggacgggcagcagccgacgagaatcacgcccacggccagcgggccggacaggtggaagatcgcgcacagggccacggcgacgagcggcatgatgacgaagtgggccaccgtgccgacgatgaccatcatcggctgggtgaggatgcgcttgaaatcgtccagcgtcagggtcagccccatgccgaacagcacgatgcccagcatgtagccggtgtacgccttgccccacaggctggcggccggcacgaagtagttgaagacggcccagacgatgacgatgaccgtaaaccacttggtcagccaatctgcaaaggctttaaccttttccatggtgtttctcttcccttgttcggtgtaggtaacatcgcatgaaactaggcgggtcgcggttgatatgaaacataatgctcacattgtgaacgctcacgtaatcatctctgcaatccccagtcgcaccatcacgccgttgtgtgccctgacttttcatcaatcgtcacacaagacccactcgtccacatcccaccatttgagacagcccacagcctggccccaagaatgaaaccaaccacttgattccatcgcgacacaccgatgagcacacatccgcaaagttgtgtatagtattcacctgttgtgcgaattcagcttgctgaatacgacactatggtggccatagctcagttggtagagcatctgattgtggttcagaaggtcgcgcgttcgagccgcgttggccaccccagtaaaacccttccgttcgcggaagggttttgtttttctccatgaattccccgctcctgccgggaaccgccacgttgtacactcgggcatatccaattcatctaacacaaggacaaaaggtccgtcatgctgtcttttgagaacgattactcccgcgccgcccatcccgcagtgcttgaagccgtggctgaagccaacaaccatctgtattcgggctacgggtccgacgaactgagcgatcaggccaaggccaagatccgcgaggcctgcggccagccggacgcggatgtgtggttcctcgtcggcggcacgcagaccaaccaggtcgtcatcgacaccatcaccccggcgtatgcaggcgtggtcgcggtcgcctccggccatccgaacgtgcacgaggccggcgccatcgagttctccggccacaaggtgcttacgattccccaacacaacggcaaaatggatccaaccgaactggacgagttctgcaagaccttctatgcggacggcaactacgagcacatggtgttccctggatccgtgtacgtctcgcaaagcaccgaatacggcacgatctactccaaagccgaactgcaggctatcgccgatgtggcgcataagtacgatatgccgctgttcgtggatggcgcgcgactcggctacgcgctgaccgccactggttccgacatgacgctcacggatctggcgaccatcgccgacgtgttctacatcggcggtaccaaggtgggtgcgctgttcggcgaggccgtggtgtttaccaagcacaacacgccgaagcacttcctgacccgcatcaagcagcacggcgccttgctggccaagggcttcgtgctgggcgcgcagtttgacgccttattcaccgacaacctgtatttcaagattgcccgcagcgccaatgaggcggccgatcgtattcgcgaggccctgcgcgccaagggctacatgctcactttcgaagcgcccaccaaccagattttcgtgacgatggatcagccgaccatcgaccgtctggagcgcgaggtcaagctcggctttaccgagaaggccgacgacacgcataccgtgatgcgcatctgcaccagctgggccaccacgcatgaagaagtcgatcagcttattgagttgttgtaaaacccttcgctaatccctccctccgtcatcgcttcgcgatgccacctccctcatcagagggaggttttttcgtagctcccgccgatgagggagctggccgccgcaggcggactgagggaaaacctctccgcaaacgagaaggctcctactcccctatcgccttgcgttccatatccacgaacttgtggaccgaggcttccacggaataatgcgccttggtgtattcggcgtatttctcgccccattcggcgcgctcggcctgatgtgcgatccaccaatcgatgcgtcgggccagcagggccgcgtcccgcacggggaacaacgactcgtcgatcagcgcgaactggccggccgccgacagttcggacgcggcgatcaccggcaccaatccgcacgccatcgcctcgatcacgctcaccgattcgatgtcggcaatcgaacaatgcacgaacaaatcgcccgaacgcaacaaatcgggcatatcggcgtgcttgtggaatccgatatcggccttgcgcgccagcaaacgtccggcgcggaacttgagatactgcttgagcggcccagtaccggcgatcaccagctgaatatcgccggcgtgccgggacatcgacaccgccttgatcagcgtaatctgatctttctcgctggccagtcggccggaagcgacgacacggaacggcacgggagccgaggcatccggatcggccggcttcttcggcgaatacaccggtgaataaccattggaaatcacgtgcaacttggctttatacccgtgcgcgcgcaacaggctcgcggtcatttcggtgggcacatggatgtggtcaatgtgcttgtacagccagtgcttgaacagccagtacaggaagctggaaataccgggaatgcgacgtagcgggccggccgaatacagcacgttctccggctgcaggtggaatccggcagtcacgggaatgcccagttggtgggcgactttagcggcacgacggccgaatttgaacggcatatagatatgcaccacatccacgccttggaaggcggtgcggaacaacgtgtcgctgggttcggcgaattgcatgagctgcttggcggccacccacgagacgagcggcaccttattcacgcgcgccggatattcgggcgcccctataccgacaagcctcacatgatggccttgccgctccaattccgcagcccattgcaaggccgaattggaggtgccgttgccctgattgcccaccgtatcgaccacaagagcgatagtcagcggacgatcaatgctctcttcaatcccgttttcgcgcattgcctcatcctaaaccaccgcgcggcaatagcgtcggccgcgctgcctgaacgcgtgtgaaatggtatgggctgccgcattttgcctaatattgaatcacgcgcttcgcagcgcacgatcggcgcgggccacggcctggaacaactcggcggtgtgcttgagcagactgatgcgcacccagccttcgcccgcctgaccgaagcagacccccggcatcagcgccacgccggccgtgttgagcagccaatccacgaatgcggcggaatcgccatgccaccgcgccagccggccaccatatacattttggacagcgagccaagttccagcgccacgtccagcgcgcccggagtctccagcaggctcagcgagcgtacgtcgccgaattcgagccccgcataggcggaatcgttaagtacttcgactattgccagcgtgccggcttgtagcctgaaatgccggaaccggcacgccgctattcgctatatgtcgcatcccaaaatgttggcccgaccgccccatacttcatcggccggtaattgctaaggtacgacggctctgttacacacgcaatggcgtgtctatacgcagtatttatggcgggttacgggcatctgaatcttcatggggcggtaacctgcccatggggcggtatttcccccatggggcggtgaaattcccatggggcggtaaggcaaaacggcttaattccaaggtttcacaaaaccaacaaaccgccccatggactcattgccgccccatggggaatttaccgccccatgaagccggatattccgcccgtaattttgccgcgtgaggcactccgctcacgcgacataccgaaatcatcgcgtcatggcagaatgtgggtatgactgagaacgccgtgaatactgccgtgacttccgcctcctctcccgcaattcccgccgagacttccgccgtctcccccgcaactcgcgcagccaaccacccgctgggcacaccgctgggcaagcaccccacccgtgtgctgtttttgggcgctggcgagctgggcaaggaggtcacacttgaactcatgcgactgggcgcatgggtgtgtgctgctgactcctatgccggcgctccggcccagcaggtggcgcatgaataccgcgcgttggatatggcgaatgccgccgaattgcaggcattgttcgatgaaatcaagccggacatcatcgtgcccgaggtagaggccatcgccaccgatgtgctggccggtgctgcggccgcgggcgcccaggtggtgccgagcgccgaaatcgccgcgatttgcatggaccgcgagcgcctgcgcgtactggcccacgaagaattgggcttgccgactacaccgtatcgttttgccggctcgctggaagagctgcgcgccggagcttcggaagtcggctatccgtgcgtggtcaagccggtgatgagctcgtctggtcacggccagtcggtggtgcgttccgccgacgccatcgatgccgcttggaccgaagcgcaggagggccgccgcgccgccgatgagggcgatgtgtcgcgcgtgatcgttgaggcgcttgccccgctggagcgtgagctgacggtactgaccgtttcttcgtccgccggcattgtgacgtgcgcgccgatcggccaacgtcaggagtccggcgattaccgcgagtcctggcagccggctaccgagcccgatggcgaggccgagcgggcgcgcgacatcgcacgtaccgccgttgaaggcttggtggccaaggctcaggcgaccggcgaaaccggttggggcgtattcggcgtggagctgttcgtgctcaccgacggctcgattctgttcaacgaggtctccccccgtccgcacgataccggtatggtgacgatgacctcccagcgtctgagcgagttcgcgctgcacgcccgcgcgattctcggcctgccgatcacccccgagcatgtggcgctcacgattccggccggctcggtggcggcaagccatgcgattgtggtggccggcgacggtgaggccgagttcaccgatgtggccgctgctctggccgaacccggcacggacctgcgcatttttgccaagcccgaagtgcatggccaccgccgcatggccgtggcactggccgtcggcgagtccgaagccgacgcccgtgccaaggccggccgtgttgccgatgcgttgacgattaccgtggagtagtccacggcctgatcagctcagcatggcctcaatattgttgccgtccgggtcgtggatgaacgcggcgtaatacgtggggccatagttcgggcgcgggcccggagcgccgttgtcggtaccgccagaggcgagaccggcctcatggaacgccttgacggcggcctcatccttggcgcggaacgccacatgagacggcaccaccgggttgccgtccttcggagactccaaccaaacgctgtcaccatcctcgtcattggcaaagcacacggcggtcgggtacgccactttcttgacgtagcccagcggggccagcagcttctcgtagaaatccgcgtactgtgcggcgtcggaaacaaacaaaccaatatgatcgatcatgacgaacctccttgcaccatttcgtcactcccattatcgtgcgtgcgcggccgtacactcacgttttgtctattgacgaacatctgagtgtccgcgcgcttgcgtagatactgtcacgccgaacgactatgcgaccggcaatgagtcgattgtcggaccaataccgtccgcctccgccatcccaacagcgtatggccgttcgatgaggcgacatatgatgcgctggccgcatcgtagcgtcatgccgagtgttgttgtagccctcgattggtacccttttaccgttagttcacccagaaattccactcctgaaaggtgagtcatggagaagctggaaaagctctacgagggcaaggccaagcaactgtacgcaaccgacgatccagaggttctgtgggtcgaatacaagaacaccgccaccgctggcgatggtgaaaagaaggaagacttcaccggcaagggccgcctgaacaacctcatcaccaccatcatcttcgacctgctcaagaaacgcggcatcgacagccatctcatcaagcgagtgaacgacaccggccagctggtgcgcaaggtgaacatgttcccgttggagatcgtgctgcgcaacgtggccgccggccacttctgctcccgtctgggcgtggaggaaggactgccgctcaaggagccggtgcttgagtacttcctgaagaacgatgatctgcacgatccgttcgtcaacgacgatgacctggtggccctcgacgtatgcactcgcgaggatctcgccgagatcgccccgctggcccgcaagatcaacgaggccctgatcgagatcttcgccaagatcgacgtcaagctggtcgacttcaagatcgaaatgggccgcgccaccgacggcacgctgctgttggccgacgagatcaccccggattcctgccgtctgtgggaccagaaggaccactccggcaaggtcgagcaccttgacaaggacctgttccgccgtggtctcggcagcatcatcccggcctacgaagagatcgaggagcgcctcgccgaactcgccaagtccgaaggcatcgaagtcgccgaataagtcgtttaggtgcaggtagcagaacatacagctggctcccctctccgaggggagctgtcgccgataggcgactgaggggaggtcaagacgttcaccgccatgacaactcccctcagtcagctccgctgacagctcccctcggagaggggagccaagttcttttaccgcacttcttcaatttttcaatattttcaagaaaggatttccatggtttttcgcgtgtacgtggaaaagaagcccggctttgatgtcgaagcccagcagcttgcgggcgaactgcgcacgatcctcggactgaacggcctcaaggccctgcgcatcgtgaaccgctatgacgtcgaaggcatctcccaagagctgttcggccagaccgtgcccaccgtgttcagcgaaccccaggtggacaatgtggcctacgacctgcccgacttcgccggcgccaaggtcttcgccaccgagttcctgcccggccagttcgaccagcgcgccgactccgccgccgaatgcatccagctcatctcccagggcgagcgcccgacggtccgttccgccaagctgtacgcgttggaaggcgaactgaccgacgccgacgtggacgccatcaagcattacgtgatcaacccggtcgaggcccgcgaggccagcctggagaccaaggaaaccctgaagacccaggtgccggtgcccggcaaggtcgagaccatcgccggtttcaacgagatggacgccgaagccggccagaagttcatcgacgagcgcggtctggccatggatctggccgacctcgaattctgtcagaagtacttcagcgaggagggccgcgagcccaccatcaccgaaatcaaggtgatcgacacctactggtccgaccactgccgtcacaccacgttcggcaccgagctggacgaagtaaccatcgatgacgccaccgtcaaggccgccttcgagcgttacctggcgatgcgccacgagctcggccgcgacgccaagcccgtctgccttatggacatgggcactatcggcgccaagtggctcaagaagaacggtgtcctgaccggccttgacgagtccgaggaaatcaacgcctgcaccgtcaaggtcaaggttgacgtgaacggccacgacgaggactggctgttcctgttcaagaacgagacccacaaccaccccaccgaaatcgaaccgtttggtggcgcggccacctgcatcggcggctgcatccgcgatcctctgtccggccgttcctacgtgtatcaggcgatgcgcgtcactggcgccgcggacccgaccgtgccggtctccgagacgctggaaggcaagctcccccagcgcaagctcgtgaccaccgccgccgccggctacagctcctacggcaaccagatcggtctggccaccggtcaggtcgacgagatctaccaccccggctacgtggccaaacgcatggaggtgggtgcggtcgtggccgccactccggccgaccatgtgcgccgcgaaaccccggcccccggcgacaagatcatcctgctgggcggccgcaccggccgtgacggcatcggtggcgccaccggttcgtccaaggcgcataacgtggaatcgctcgaactcgacggcgccgaagtgcagaagggcaacgctccggtggagcgcaagctgcagcgtctgttccgccgcggcgatgcctgccgtctgatcaagcgctgcaacgacttcggcgcgggtggcgtgtccgtggcggtcggcgagttggccgacggcctgttcgtggacctcaacaccgtgcccaagaaatacgagggcctggacggcaccgagctggccatctccgaatcccaggagcgcatggccgtggacgtggccgccgaggacgtggacgagttcctgatctacgcccgcgaagagaacctcgaagccacggtgatcgccaccgtgaccgaggacccgcgcatggtgatgacctggaacggcgacaagatcgtgaatctgtcccgtgagttcctggcctccaacggcgcttccaagcaccagaccgtgcatgtcgaggcacagcagtcctacgagaccccgtggggcgagggcacgctggccgagcgtatgaacaagctggtcaccgacatcaacgtggcctccaacaagggcctttcggagcgcttcgactccaccatcggcgcgggcaccgtgctcatgccgttcggcggcaagcgtcagctcaccccgaacatggccatggtcgccaagctgccggtgttcggcgagaccaccaccgcttcggcgatggcgtggggcttcaacccgtacatcatgtccaagaaccagttcaccggcgcctacctgtccgtggtcgagtcgctggccaagctggtcgcggccggcttcgagcatgagaaggcctacctgagcttccaggagtacttcgagaagctgcgcgacgagccggaacgctggggcaagccggcggccgccgtgctcggcgcactgatggcccaagtggacctgggcgccggcgccatcggcggcaaggactccatgtccggttcgttcgaggatctcgacgtgccgccgacgctgatctccttcgccgtggccgtgggcaacatgaagcgcgccacctcccctgaattcaaggacgccaatcaccgtatcgtgcgcatcgcgccgcgctacctggccgacggtctgaccccggacaaggatgcgctgcttgaggtgttctccgtgatcgaggagctcaccgacttccacgatgccctggccgtctctacgccgggctatggcgccaccgccgaagccctgttcaagatgacgctcggcaaccgcatcggcgtgactctgaacgacagcatcgccgtggacgacctgttcaccccggcatatggttcgttcatcgtcgagctggcagacgatgccaagcttccggccgtctccaatttggtcgagatcggcgaaatcggcaccaccacctccgagtacgtgttcaaggccgccggcgagacgctggacctgaacgctgtgcaggaagcttgggagtccggcatcgaatccgtgttcccgtaccgttccaagggcgaggacaagggcgcgaccgtcgagaccatcgacttccacgcgccgaagaagaccgtgtacgtcggctcttccgtggccaagccgcatgtggtgatcccggtgttcccgggcaacaactgcgagtatgattccgccgccgccttcgagcgcgccggcgccgacgtgaccacgctgatcatcaacaacctgacaccggccgccgtcgccgaatccacgcaggcgttggtcgatgagatcaacaagagccagatcgtgatgatcccgggcggcttctccggcggcgacgagccggacggttccgccaagttcatcaccgcgttcttccgcgcgccggccgtcaccgaggccgtgcgtgacctgttgaagaaccgcgacggcctgatgctcggcatctgcaacggctttcaggcgctcgtcaagctgggtctggtgccgtacggcgacatcgtgccgatgaccgacgcctgcccgacgctgaccttcaacaccatcggccgccaccagagccgactggtccgcacgcgcgtggcctccgacctctccccgtggctgtccaagacttcggtcggcgacatccacaccgtggccatctcccacggcgagggccgcttcgtggcctccgacgaggtactcgcccagctcagggccaacggccagatcgccacgcagtacgtggacgagaccggcacccccggcatggacctagatgtgaacccgaacggctcgctgctcgccatcgagggcatcaccagcccggacggccgcgtgtttggcaagatgggtcactcggagcgttccggcaacggcctgtacgtcaacgtgcccggcaacaagtaccagccaatcttcgaggccggcgtggaatacttcgccgcctgataatcggcgcgtatcgcgtctgatacggcacacagggaaggaactctcgggttccttcccttttttgttcatgccggtcatgggctaaggttggggtgttcgcactaccgaatccgccgctgaaaggacctgtcgtcatgccgatcaacgaggcattgttcgccgcgatgaaggccgccagctacatcaagcccaacgcgggcaagtcgtacaaattgcagcgcgtggcggaagagcttgtcgccaagcaggcacccgccaatccgaaatgccgtgtcgaggacgccttcgcgcctatggcggatggatatgccgtaccattgcgagtgttcacgccgctggtcgcctatggagcgcccctgcccgaagccctggaggaatcttccgccaatggcacgccagtggcctcggcaatatccgcgattctgcccgccgtattacccaaagtcctacccaaaatacccatcaaggaaagcatgtcgagcggcaacaccgacggtatttccggcaatgccaacacggaacttccctcagtcacgccgcgtggcacgatcctgtttttccacggtggcggttggaccacaggcggcatcaacctgtacacgcaggcttgcgcgcatatggccgtacgtctgcaacgccgtgtgatctcggtcgagtaccggctggctcctgaataccgcttccctactgctgttgaggattgctatgaggtagcccggcagctgtttgctggggaattgccgatttctggggtgggtggttctgttgatgttgaccacccccagtcggctgcgccgacagcccccaccggcgggggcgatatatctgcgacaatcccagcaccggatcccgacagcatcgtgctgtttggcgacagcgcgggcggcaatcttgcggccgccgtctcgctcatggcccgcgaccgcggcgagttcatgccgcgcacgcagatgctgctttacccggtggtcggcaacgactacaatcccgagaccagcccgttcgaatcggtgcggaccaacggcaccgactacatcctcaccgcacaggacatggccgactacatcgacatgtaccgttcgtccgtggccgacctgaccaatccgtatttcgcgccgctcaccgcgcatgacctgagcaatcagccgcgcacgctggtgttgtccgccgaatactgcccgctcagagacgaggacgaagcgtacgcccgtcgtctgcaattggtgaacgacaacgtctcctgttaccggattcacgacggcatccacggttatctgctcaacacgtcggccgtagggctggtgtccaccacttaccggatcatcgagcatttcctcgacgacacaccgctggtgccggctcccggcaccggcaccaccgccaacgcaccggagggaggcgacgcatggcaagacgtacttggtaccgactagacaacatcggcaagttctactcctcccaggctggccgctcctcgcagaccgtgttccgctattcggccgagctggcggacgacatcgccccggacatcctgcagcacgcgctcgaccatgccatcgcccagttcccgagcttcaacgtgcacctgctcaacggcatgttctggcattacctcgaacagtcggacggccggccgctggtggagccggaacatctgccgatatgctcgcgactgcattacgggcccaaaagcatgctgttccgcgtgagttatttccgcaatcgtgtcaatctcgaggtctcgcacatcatttcggacggtcgcggcgccatcaacctgttcaagtcactgttgcacgcctacatcgccgagcggtacgacgtgccgggcgtgccttcggattacgacggctcggacagcgacaaagccgaaaacagcttcgacaaatactacgagaaagacaaggccggtgccgcgcccggcacgaagatctaccggctggccggccccatcgaccgggacgcgcccacgttcatggaatatcacgtcagcgccagcaaggtgcttggtgcagcgcatcagtgcggagtgagcctcacctcctacctcatcgccgcgatactgtgcgcgattcgcgacgtcatgccctcgcgcgcccgcaatcgcgcgattcgcgtggatattccggtcgacttgcgcgccttcttcaggtcggagaccgtgcgcaacttctacggcatgacttacgtggcgtacacgccggccgatatcgaagccgatgaggactccgcgaaaacttccgcaacgggcccagacgcgaccggcgacggccagcagtccgccgcccgtaccgcgcacggcaacggtatgggtggattgctgaccgatgagccgttggccgacatcgcccgccatgtgcaggagcagctcgaccatgccaccagtcgcgagcgcgtcgaatcgcatatgaaccgcatgattgcgctggaa

SEQ ID NO: 828 - DNA, 24082 bp, Unknown
  R14_18m  MAG No. k141_7932
gtggccacgttgtacggcagattggcgaccagcgtaaacgatgcgtcatcgctgaaatcaggcacgttctccggggtgacggttaaggcatcccgattgacgacggtgagtcgtgacgtggcttcgggcatgaattcggcgactgtgcccggcagtcgttcggccaacggcggatcgatttcgactgcggtcatggtggcgccggtttccagaatcgccaatgtcaacgatcccaggccggggccgacttccatgacatgatcggcagcggtcactcccgcctctcgtacgatacgacggaccgtgccggggtcgatgacgaagttctgcccgaatttcttggtggggctgatgccggcatcggccgcgatacgacggatatcggcggcgcctaacaggtgaccggtggcgggaatggtgtcgttcataagcgtgtgttccttgtgggcttcgtaaccgatcagtaccaaccgatttgttcggaatgttgccatgccttggacgggctgccgtaggcttgtgcgatgtaccacagaccccaatcgatctgtacggcggcatcgtcacggtaattggcgccgaacgcagccattttgtctgctggtcgcgactgaggaatgccgtaggcaccggagctcgcgttttcggcataccacagccaacgggactcgcggttccatagtttgaccaggcaatcccagtcgttgcctgtccacccgcgctgcgcggcggcaccggcggcataggcctgagcctgggctacggtggcgtgccagagtcggccggagggcgtggtggttgttcctgaatcggagccggaagagccggaattgttgttcgtaccgccgccggtgttaccggaattaccagtgttaccggaattgccggtgttgccggtgttgccggtgttgccggtgttaccggtgttgccggtgttaccggagttgttgccgccggtgttgccggcattgttgttggtatcggtgttcgtgttgttgccagagctgctgttgttcttgtcgcctgtgttgttggcattgttaccggacgactcgtgctgattgttggaaccggaatcggccttgccgttatcggcggagtcggattttttgtcggaacctttatcggaacccttatcggtatcagacttggcggcgcctacggcgatgatctggtcgatggccatcgtggtgacggtttcggatttcagcgtctccgattcggccacgccatcgacatacgtgacgttatacacctgggttttctcgccattgacgccttgctggcggatctccgactggccttcaggcagattggagtcgatgatggtttgtgtggagtatggcactacggctgtgcgcgtttcctcgccatgcgtcacgcgccgtacgcgcaggatagtggtatcgccgtccttttcgacgctcacacggtcctctttgttcagcacgatgcctttggagtcaagaatggaggccgcaggcagtttgccgttgggggccacggaagtcttgccgtccgcaatgacggtgaccgggccatcctgattgatgaccagtccgccggtgagctggttgtacacattgtcgatgtcgacggtgatttttgtggcgttgttctggttttcctcgaaaaatcccagcaactggtcggcactggtggccacggtccagaagggaacggacgtgccgtcgatgttgatagtggtctggtaggcggactgtacggtgaccacggcatgattggcgagttggtcgccggacgaggtagtgacgatatcgtgggtcttgatatccaccccttgttcctccagaagacgggtggccgtcatcgcatatgtggtgacttgggtggtttgcccgttgatgttcagggctacggatttacgcgcggtgaacgcgaatgatccagccagcgcgatactggtcgccgcgatacaggcgattacgcggatgcgacgcagtgtaacaaaccgctgcggggtccaacgccgtgccattgccatactcttcctgctggatgaacgattacgccacccatcgtaacggttgttccggcccgtactgcggtttcaccggccaccgtcaccattcctgctcgtcagattgttctgagctcaaaaaaagaaaagaaaaagggggcgggagagaaggggatgttcccgccccccctgaaggcgcggagctggttgggggacgctccgccctcattccaggaagcccatagttgggggaaggctcctggagtacttacccaaggtaagaattatatgcgtagaaaagtctacgtatcatataatacgccacttttctacgcgtcgagcctcttgtcgggatcgaaccgacgacctgccgcttacaaggcggccgctctggccatctgagctaaagaggcgattgttcttaacgcgtaaatcgttttgaacaaatctctagtataccggtagttctcgagtggtcaattcaggccgagccgcgccggtaattaatcggccagcgaaatcggcttcttgttggcgccgatcgatggcatctggccttccacgcccacctgatcggagtccaagccgatggacttgaggaatccgtccaccatgctggtgtccgccagcgtgagctgcttcagatcccagtattcgccattgatggtgagcgtgggggaggagaacgcgccggagctgttgaacagttcggggcgtaggatcgtgtagttgttggaggcggtgagccacttgacgtattcgttcttaccactgaatgccgcggtggccacatcctcgctcacgccggcattgacggcctgcttctccagcttggcgttgcttaccggctcgtaattggacaattcgcccggctggaaatcctcagcgtagatgttggagaggtagctcatgaggtgatcgggattgtcatcatgctcggcaatgtagatggcaccgttgaacgcgcggttggagtagttgtcggagctcttgttgtcctggaaattgaggaagtgcaaatcgatgttgagctggccggcgttcatcagcttgatgagcgtcgggtcaagctggcggttcaccgaggcgcagccggggcacagcggctccatgtagatggaaacggtgggcgccccttcggccttctgaccgtaccccttgctcgagatcacgaagccggccttgtcatcggcgttggccggctgggtactgactttcttgagcttgctataggcctcgtccacggtcatgttgctttgctggctactgctgctggtgttggacggccgcatagccttgtatacggcgaatccagcgatggccaccagcaccacaataatggccaccacaatgcagccgatgatggtctgctgcttacgttccttagccgcctgctcggcccgtgcctgctgggcggcctcctcggccgctcggcgctcagcgcgtgtggcacgcttggcctgacgcttcggatctgacatagctatccccttgcaatcgcttcaatgtttgggccccatcataatgaccgggcctgaggaggactgcgcccagagctgatctgaggtgaattccctgtaaaagtgtgacggaacgaacgtatcggatacacaacggccatgtgtgcggatggctgatgtgtgagattccgccccgctctaggcgaacggcatccagttgatcggcatgcccagaatcggcatcgcgcacaaggccacggtgatgatggcccatatggtgaacagcacggtgccgcgcccgccgcccttgggcgccggcgccactggagcaggtggagccccacccacttcggtggatggcgcgcccgccgggcgactgtgtttgagcccgcgcagtacgccgccccccagccgaatcatcatcgactgtggggcgaacacagtgaccagccagccgatggccatgaaaccgcccagcgccagcccggaagcggagaacggcacatcattgagcaacggcaccggaataccccaatcctcggtgaaataccaggagatggtgtgaacgggcagtgccagagccgcggtggccacggcggttcccgccatatagatgatgactagcagcagtatgcggggaatggccagcagcagggctttgaccagatgccagggaaaagtcgccacgcgaatccacgaatcggagtttttgcgctcgccgccgcgtttgccctcgcgctcaagctggggttcggtgttataggccagggtgagcagtagccacaacaacgcagtggccgcgatgatggccacgagcggagcatttgccgccagtgccgccagcggcgccgccagcaggatcaatggcagggtgccgcgctgcagatattcccctcgcttcacgtccaccggattgggcatgggaggattttggaccatggtttcggtgggggccgcttgggcggtttggtcgatgatgcgctgcaatgccgggcgaatggcggggtccaccgctgtgggctggttgcttgcgggatcccagctgctctgggcggtgccggacggggggaatgatgacggctgcggcgtggggagtacggtggtgcgctcggccagcggcgtggtcggggccggagtcgaatcggtgttggtcattggtgtggtggcgccggccattggtgtggtttggtccggcatcggtgtggtcgcgccggtgagtacctgtgtgccggcgtcgtcggtgaaatcggcagcagcgtcgggcaacagttgcgtggcctgctccgcaccggccggcggacgtggcggcatatcggctaagggcagcgtggcggtagcggcgccagccggcgagaatacggcggtttcgccatcgccgttatcgcccttattgccggagaacacggccatggtgggagcctcagcggcttcctcggccgcgcgccagatggttcggggattattgcggtcaacgccgccggccgcgccaaaagggggcatcgcctccgcggcttcggcaacgatcgcagccggttgtccagccacggctcccgcggcgaacggtcccgcctgctcgccctgccaagcgttgggattcaacgcatccaaggcgatggcattcagcaattgatccggcgtgcaacgatccctgcgatccgggtccagtgcagaacggaaggcagccaatgtgccggccggtagtccggaaagattcgcgttgcccgaggcctcgcgctcaagtaccgccatcatcggcttggtgccgaacacaggcgcgccggttgcggcaaaagcgagcacggacgccaccgaccaccaatcggtggcgtcgtcggattcggcaccgtcaataatctcgggtgcgatgaatccgggtgtacccatcactaggccggtgcgggtcacgtgactttcgccctcgcccatcgcgataccgaaatcgaccaataccggtccggcggccgacaccatcacattggtgggtttgatgtcgcgatggacgatgccggccgcatgtacggctttggtggcttcgatgagcttgcgggccaagcgttccagatcgtcgcccacataccggccattggcggccacatcatccttaagattcttgccctcgatgagttcagtgacgatgaacgccaacgtatcgtcgagttccatatccacgatgccgcacacacccggatgattgaccttcttcaaggccatggcctcgcgccgcaggcgctcgcgcggcgtgacatcgggcttgaggtcggggtcgtgcagggccgtggacgcagagccggagcctgccactgactcgtcggtcagggagtcgcgcagaatcttcatggcataggtggtgccgccgtcgtcgcgcacccgccacaccgaccccatagctcctgagccgagccgggagatcagcgtatacccaccaaccacttcgccgggctcaagattcaacgcgttcaaatcgctcatgccctccatcctaatgccttgccggtgcattattctggctctctcctgggaggccgagcttgatatttcttggctcccctctctgagaggggagccaagaataagtgccgtttacgtattgagaagtgccgtttacgccattaaggtcgattgccctgaccggatgtggtagcaaattatgcgctcgaaatgacaggataggtgcgtgggcaggtgcgccagtcgtgaatttgcgactctataaccatcggcatcaaggatgtgtcggcggtgacccaaaggtgagccagccgggcacattcaacagtggcacagcgatgcaagggcagtatcgtgagccgctgatcgaatcgataacgatatcagattcgaatgccgcgacttcgccggtcgtaccttcgaatacttctccgaagacggctacctgttcggcgtgatggcctcccagcaggtcgctggcgctcaggccaaggcctgaggtgtgtctccgataactgaatagctaaatagaatggacggcctgctgagtgctactcaacaggccgtccattgtgtatctgaatgcgaaaagtcattatatggaacggaatatatcgatactgtgcattgtgccgattactgattccgacgcaagtattcgcgcaggaagggcacggcaaaatcgacttcgcctcgttctgtttcgcggataacgaaggcgtcaaggaggcgtttgcggtaggtggcggcatagttaggcgttttgcccatgcgctgtgcaacattcacggtgggagagggaccatctgacgctgccatggcttcgagatactcacggtcgtttttggataagccttgcaactccgggatgcacacggcgttatcaaggtcaatacgtgcttcctcgatacctgccgtaacatcagcgtcgatgatggtatccgagtcccgcatgtctgcggcatcccagatatggtagccaaccagttgaatcatataggggtatccggctgtcacattggctgcagtgcttaattgagcgtcggtgatggacatgccggaggcgcggaatgttgtggcgaaagcatcacgcacttcatcaagaggaatatctgtgagcatgttcgttttcgcgcgacgtaggaacgtgatgacttcgtcattgaacaaatcagaaatcatctgtgggagaccggcgaacacgatggcgatattgcgtcgttccctgatttgatgctgtatggcagtggcgatggcaatcatgtcggatcgctcagccgcttgagtctcatcaatggtgataagcaacccagcatggcgcttctcaagcgcatccaaccgtccggcaatggcacttctcaacgtttcgggcatacgcttcggggatagttcggcttctccgaggccgatgcccgctccagcaaaagtcaacgatggtcggatagtgaggtggtcaagggcccctcgcccggttcgtaaggcatcaacaaggcgttcgcatagtccggcagaggccgtttcttcgatgacatcccatctgcgcgctttggcccggtctccgaacacagtgagcatcacggtttttccggttccacgagcgccggtgacaagcataatgcgccctggggcaccgactccgttatcgagacctttctcgaaatcgcggataactttgcctcggccgatgagcaggggcggttcccctcctgccgttggcttgaatgggttttcctttgccttcatgtggaccgcctcctcgctgaatcaacctaaaataaaaattatcaaaaatatcaaaaaaataaaaattatcaaaagttgggttgagccgactgaagaaaacagccgtggcgacaatgattctgccgcaatccgcggtgacaacaactgacgcggaccttcttggcagaatcgttgtttgtcccgcttcgccaatcaacgtcgctcaagttcggtgcgcagaccggctaccgtagcggtcagctcacgcacttcctcgcgcaataggtcgatttcgggattggctgatgttgcaatagcctcttgcgcggcttccttggccacttccttctcccgagcgtcctcgcgccgatccgtctccagattgacctgatccacgatccacgaggccagcgtggccgtcacaataccgatcaacgcgatgccggtgaacatcagcaccaccgcaatgatcttgccttggaaggtgaccggcgagaagtcgccatatcccacggtggtcacggtcacgaacgcccaccacaacgccgtgccgaagtcggtgatcgtggatccggacgccccgcgctccacggaatacacggccagcgcgcccacgtacatgagcattcccaccgcgccgaccgcgtatacggtgatgcgcccgcgcaccgccatgccggaggtgcggttcagcacgtgcagcacggtcagcaaacgcaacagtcgcaagggccggagcatcggcagcgcgatggtcagcagcgtgaacaggttgtgcttgaaccaccgccagcgatcgtcggccaaccacagcgagaccacataatcgacgacgaacaccacccagatcacgttgatgacggtttcacacagcgcgatatgcgtgcgggagagaatttcccacgaatacaccaccagaaacaccacggacagcaccatcagcggccagtccgtccacttcttccacgtcttcagtcccatattccgattgtagtggcgcgtccgctgcgccactgcggagcatgactccggacatcagtgttgtatacgttcgtatacatttcacgttgtgtacgaacgtatacagcggtatttttcatctcgtatttcccttatgactatcaccacagtgatataatcaagaatatgtaaggagagagaaggagccggccaatggagaccgcatcgatcgaactgtggcatggctcttcgcatgtcatcaagcatcctgaatacgggctggtcaagccgaacaacgattatggccgcggattctattgcacgcgcagcgtcgagctggccaaggaatgggcgtgcgcgggactggatgacggtttcgcgaatcggtacacgttgaccacggacgggctcctcttcctggacctgtcccagccgccctacaccatcctgaactggctggccatgctggtcgaaaaccgtcgtttccagccgaccaccgccgtcgccgcgcaaggcatcgaatatctgaaacaagtgtttctgccggatgccagtcaggctgacgtcatcgtcggatatcgtgccgacgattcgtatttctcattcgcccgcgcttttgtcaataacgcgatttccatcgaccaactcgctgaggcgatgcggttgggcgagctcggcaagcagatcgtactcgccagtcctcaggcattcgcggcactgcggttccaaggctgcgaaatcgcccgcgcttcgacctaccacggattgcgtaacgagcgcgaccgcacagctcgcgaagcctaccgccgcaaaagtgcagaagccgatctcgacggcctgttcatgcgcgacatcatccgcgagaaagtgaccaacgatgatccccgcctatgatgagacatacttgccggacgccatggccaacttggccggcgccttcgattatgcgctgaacgattgcgggttgccggtcggcctattcatggacttcttcgccacctccgaggcggccgcgcttttcgggcgaggcacgcccaaatacgtgtgtggcatgtccggcgaggagctggtggccgaaatcatgcggcaaaccggttgggcgcgcattctcgatatgccgccagccgcactgcgcgccggctcaacacccgaatactgggccggatgggtactcgcatactgccaatggaccaggggagtgcggttctcggacattctcgatgtgctgtcgctcgacgatatcgtgcgactgtacccgactctgcacgaagccgacgaaagccgattcgtcgacgtgtacgacgagcgggccgcccataatcgcaccgagggcgactcccggctgcacacgatccgcgtgcgcgccggactcagccaatccgggctggcccgccgctccggcgttaccctgcgctccatccaaatgtacgagcagcgccgcaaagaccttggcaaagctgccgtctccaccgtgctcgctttggcccgcacgcttggctgccgcatcgaagatctgttggagccgtaaagacgcggagtagtatcgcgccgcatcgattctgataactgaacaactacttttaaggcccggccggatgctcgtttggacatccggccgggccttctggctccacacggggtgccgaggtatccgttctccgcttcgaggggctgatttggccttccgtagaggtttactcccgtttcgaggggctggtggcccgctagaacacgggtataaacggcttcgccccaccgtcattccgccattttggggatgcgcttacttgagtaccagcccctcgaaacggagatagatctccggaaagggtcaaaacagcccctcgaaactcaagatggcggttgcagggcggttgaggatcagtcgaagagcggttcaaacgcaaatgtgaacaatgccacatgtgattgggcgggtcgctgcacgccgattttcgggggtgcatgggaatggcggaatatcaacgaaaaaccctatatctaggtttgttatgtgacacgcgccactacatatagtgccttgatttcaaatcacaccgctgtaatatggccttcgcttcactgttcatcagaaccacatcaaggggagtcgccatgaccgtcaccgtgttcaccaagccgcattgcccgcagtgcgatgccaccaagcgccagctcaccaagctgggtgtgccgtttgaaaccgtggacctgacgcagaacccctccacccttgagcagctgcaggccgccggtttccagcaggctccggtggtcatcacgccggacaactcctggaccggctaccgccccgacctgattcgcgaagtcgcccagcaggtggccgccgacaaccgcgccgccgccacggtgtccgcgtgagtctgagccagcccgaattcgcggccgaaggcaagacgatcggcgcattggtctacttctcgtcggcctccgaaaacaccgcacggttcgtggccggatgccgtttgcaggacgaaggcatcaacgtctaccgcatcccgttgcgggccgccgacccggcgctaaacgtccgcgaaccgtacgtcatcatggtgcccacctatggcggcggcgtggtcaagaaagcagtgccgattcaggtcaaacgcttcctcaacgatccagccaaccgcgagtggattcgcggcgtcatcgcctcaggcaacaccaatttcggtgaggcctactgtgccgccggagacatcatcgccgccaaatgcaaggtgccctacctctaccgttacgaactcatgggcaccccggaagacactgccgccgtgcgaaacggcctcgtccgcttcttcaccgaacagtaaatcttgaccccctcgaggtattggctcccctctccgaggggagctgtcaacgaagttgactggggggagcaactgtctgagtaaacacacttctgccatattccaaggatttccaatgactgacctcaccgccaccggcctgccgctcgacaatactgccgacaccgcagcggaacagtacgacccggcgcacgattaccacgcgctcaacgcgatgctcaacctctatgacgccgacggcaagatccagttcgacaaagacaaggccgccgaacgcgaatacgtgacagggcacgtggccaccaacagcaagcggttcgcctccaccgccgagcgtctcgaatacctgatcagcaaccagtactacaaccctgcggtcttcaaccagtactccgctgaattcctcgaccgcatctacgagcacgtggaatccgccggctttgagttcggcactttccttggtgcgttcaagttctacacgtcctacgcgctcaagacgttcgatggtcgcctctatcttgaggacttcccgcagcgttgcgccgctgtggccctggagctcgccgccggcaatgagcagcaggccatcgaatacgccgacgaaatgcttgccggccgcttccagcccgccaccccgaccttcctgaacctcggcaaggcccagcgtggcgaaccggtcagctgcttcctggtgcgcatcgaagacaacatggagtcgatttcgcgcggcatcaacgcggccctccagctctccaagcgcggcggtggcgtggccctgctgctgagcaacctgcgcgagctcggcgccccgatcaagcacatcgagaaccagtccagcggcgtgattccggtcatgaagctgctggaggactccttctcctatgccaaccagctcggcgcacgtcagggcgcgggcgcggtgtacctcaacgcccaccaccctgatatcctgcgcttcctggataccaagcgagagaacgcggacgagaagatccgcatcaagtcgctggctcttggcgtggtgattccggacatcacgttcgaactggccaaacagaaggcccagatggccctgttcagcccgtacgacgtggagcgcgtgtacggcaagccgttcgccgacatctccgttaccgagcattatgacgagatggtggccgacgaccgcatcaagaagacctacatcgacgcccgtaagttcttcaccaccatcgccgaactgcagttcgaatccggctacccgtacatcgtgttcgaggacacggtcaaccgcgcgaacccgatcgaaggtcgcgtgaccatgtccaacctgtgctcggaaatcctgcaggttcaggagccgagcgcatacaacgaggacctcacgtatgcgcatgtcggccgcgacatctcctgcaatctgggttcgctcaacatcgctaaggcgatggatggcggcttgggccacacggtggagacggcgatccgcgcactcacctcggtggccgagcacaccagcatcaacgcggtgccttcgattcgccgcgccaatgaggagggccacgccatcggtctcggccagatgaacctgcacggcttcctggcccgcgaaggcatccagtacggttctgaagagggcctcgacttcaccgacatgtacttcatgaccgtggcctaccacgcctaccgtgcctcgcacgcgctcgccgtggagcatggccgcacgttcgccagcttcgctacgagcgactacgccaagccggccggccagggcaactacttcgacaagtacaccgatggtcgtcgttcgctcactccgcgcaccgaacgggtccgtgcgctgttcgaacagtacggcatcgcgatcccgactgcggccgactgggaggccctgcgcgacgcgattctgaaggacggcatctacaaccagaacctgcaggccgtgccgcccaccggctcgatctcgtacatcaaccattccacgagctcgattcacccgatcgcctccaagatcgagattcgcaaggaaggcaagatcgggcgcgtgtactacccggccgcctacatgaccaacgacaacctcgggtactacaaggacgcctacgagatcggctggaaggccatcgtcgacacgtacgccgaggccacccagcacgtggatcagggactgtcgctgacgctgttcttcccggacaccgccaccacccgcgacctcaataaggcccagatctacgcctggcgcaagggcatcaaaaccctctactacatccgcatccgccagcaagccctggaaggcactgaagtccaaggctgcgtctcctgcatgctctgatcgttcgagggagcgtataccgcctttcttcggcactcgacgtaccttcgtacgccttcggcctcagacggcggtctccgcacgcattgaacaaccagagagccgttgttactcccctcactcggctaacgccgacagctcccctcagagaggggagctggccgcgaagcggactgagggggggctccaccatctaaggaaccaacaatgtcacgaaccatctatagagcactgctccggctgaccgcgccggaggagttcgaaaacaagtccaacgacgataacgacaacgacaacgacaacgagtaataaggaacactcatggcacctatctccattccgcgcaaaccgctgaaactcatcgaccgcgtctccgcaatcaactggaaccgcctcgaagatgagaaagaccttgaggtctgggaccgcttgaccggcaacttctggctgcccgaaaaagtccccgtctccaacgacatccctagctggcagaagatgaccgaggacgagcacacgctcaccatgcgcgtcttcaccggcctgaccctgcttgacaccatccagggcacggtcggtgccgtgagcctgattccggacgcgctcaccccgcacgaggaggccgtgtacaccaacatcgccttcatggaatccgtgcacgccaaaagctactcgtccatcttctccaccctgtgctccaccgaacagatcgatgccgcattcgactggagcgagaacaacgagtttctgcagaagaaggcggaaatcgtgctcgactactacgagggcgacaacccgtacaagcgcaaggtggcctccaccctgctcgaatccttcctcttctactccggcttctatctgccgatgtacttctccgcgcacgccaagctgacgaacaccgccgacgtgattcgtctcatcatccgtgacgaggctgtgcatggctactacatcggctacaagtaccagaagggcatcgcccagctgagcgatgccgagcgcctggatctgcaggactacacgtacgacctgctcaacgagctgtacgacaacgaagtggagtacacccagtcgctgtacgaccgcgtgggcctgaccgatgacgtcgagaagttcctgcggtacaacggtaacaaggcgctgatgaacctcggctacccggctttgttcccggctgagatttgcgatgtgaaccccgcgatcctggccgccctgagcccgaacgccgacgaaaaccacgacttcttctccggctccggctcctcctacgtgatgggcaaagccgaagaaaccgatgacgacgactgggatttctaagggtttcgcggtccgcgaacccgcagcgccgccgcgttcgcacgacggcgctacgctggaggcatggaacaggagccgttggtcagcatcattattccggtgtataaggtcgagaagttcctcgacgaatgcgtggcgtccgttgccgcgcagacgtacgccaatctggagattctgctggtcgacgacggctcgcccgacaattgcccggccatgtgcgacgcctgggccgcccgcgacccgcgcatacgcgtgattcacaagcccaacggcggcctgtccgacgcccgcaacaccggcatcgccggggccaccggtgcgtacatatacttcgccgattccgacgacaccgtggcccccacgttggtggaggactgcctgaacgccatgcgcgagtatgacgccgacctcgtgatgttccagttcgacaccatctccgagaacaacaagccgctgctgtccaactatcgccacaacgacttcaccgaggtgcagatcctgaccccggtcgaggccatcaaaaagcaggtcaaggctgagatcgacggctatttctgggccttcctggcacccgcctccacctatcagggcaccggattctccttcccggtgggtcgcaaaatcgaggatctctcccgtatctgcaacgtgatcggcgaggccacgcgcgtggtccgtctgcccaaggcgctgtaccactaccgcatgcgcgagggatcgattaccgccaactgggatccgcagctcacccgcgactggacccgcgccgccgacgaccgcgaggaatacatcgtccaccgattccccgagctcaagggcttcatgacgctgcaacagctgaatttctttgccaacctcgattacgagaccatgcgccagtcgctgatcgccgggctcaagatcgatcccgaggacgccgacgcgcttcgtcgtcgcatcgagggcctgaccaagtccgccgatgagggcgatgagccagtaccggaaacgttgcgtgagttgctcggactgctcaagctgggcatcaccaaggtggccgatggcacgttcggtaaggccgatggcagcggtactgatgacgatgccgtaacgctggccgaccgtttccgcgacatgcgcgaggactggcgccagctgcgcatccagcgcatcgaaaacgccgaggagcgcaaggccgagcgcaaagccgcccgcaacggcgtcaccttcgagtctgtgtcgcattagtcggcgactgatggaatccgtcagttcgggaagagcaggcctgctctacgccgggcgtgccggttcgcacgttcgagaaacaagcgtgtcatgggccgaaccacacaacacccccagaaacgcccataaagttaactacattttcagacacgccacttgccttggtccacggtccgtgtatagtagttctcggctcaacgaagagaaccttcactgaaccggaaaaaagtaaacgctgaagcttgcagtttccgaaagcaaagttgtacgtcggtggcgagggcggaagcgcagtaaagaacaaatccctttacaacggatcgtgaggcacgtacctgcctctgaaaggattagtaattatggcagaagtcgttttcgaccacgtcactcgtatctacccgggcaacgataagccctccgtggatgatctgaatcttgatatcaaggatggcgagttcctcgtcctcgttggcccttctggctgtggtaagtctacgacccttcgtatgctcgccggcctggaggaggtcaacaagggccgcatcctcattggtggcaaggatgtcaccacgatgcagccgaaggaccgcgacatcgcaatggtgttccagaactacgccctgtacccgcacatgaccgtggccgacaatatgggcttcgctctgaagatcgccggcactccgaaggaagagatccgcaagcgcgtcgagaaggccgctgagatcctcgacctgaccgagtacctcgatcgtaagccgaaggctctgtccggtggtcagcgtcagcgtgtggccatgggtcgtgcaatcgtccgtgagccgaaggtcttcctcatggatgagccgctgtccaacctcgacgccaagctccgtgtccagacccgtacccagatcgctgccctgcagcgccagctgggtgtcaccaccctgtacgtgacccacgatcagaccgaggccctgacgatgggcgatcgcatcgccgtcatcaagctcggtatcctgcagcaggtcggcgccccgaccgagctgtacgatcgcccggccaacgtcttcgtcgccggcttcatcggctccccgtcgatgaacctgaacacccacccggtggtcaacggcaaggcgaagatcggtgaggacaccgtggacctgccggctgaggccgtcaacaagctcaccgccgaagacaacggccagatcgtggtcggcttccgtcctgaggacgctggcctggccccggctgacgacccgaacgccttctccctgaaggttgtgaacgtcgaggatctgggctccgatggctacatctacggcaacatcgtcaccgatggctccgccgctgaggcttcccaggtcatgtccgaccagaacaagctcaccacgattcgtgtgaatccgcgtgcgctgccgaaggttggcgcgaccgtcaagatcaagatcgacccggccaagatgcacctgttcgctccgtcgactgagctgcgtctgaactaatagatacttggcgaggtctaatcgcttcgtcaaccattaaacgaggttattctcttcctctcttatgacctcgttggaaaagccctgcatagctgcggggcttttctttttgccttctagacggtctgagggagagaccaaacggtgttttcccgtaaacataacgcgccgaagtcgtggccaaggagcacacatcgcgaacgacacgtaaaatcgaacacatggagttgaacgaattgccccagatggatccgcgtgcgctgaaggccacgtctgtcaaagccgaagacgaacacgccgattcagcggaaccgcaagcactgaaaatcaccgccgccagctcgaacccaaagatgttcacgctgccctggcacaagcccttggccacctggcctgaggacctgctggccaacctgccgcgaggcatctcccgccacgtcgtgcgattcgtgcacgtgggcgacgaggtgtacgccatgaaggagatcacgcgccaggtggccgagcgagagtacgagatcctgcgtcgactgcagaagctcgaactgccaactgtgaccccgatcgccgtggtcaccggccgtcacacccgtgaaggggagccgctggaggcgattctggtcacccggcacttgaagttctcactgccgtaccgtgcgctgttcgcccgcaacctgcgcccggacaccgccgaacgactgatcgacgccctcgccgtgctgctggtgcgcctgcacctggccggcttctactggggcgatgtatccctgtcgaacgtcctgttcctgcgcgacgccgacgctttctccgccttcctggtggacgccgagaccggtgacctgcaagtccagctcaccgacggccagcgcgaatacgatatcgacttggcccgcaccaacatcatcggcgaacttatggatttggcgtccggcaagctactgcccggcgacgtggatgagatcgaggtgggcaaccgcctggtcgaccgctaccactcgctgtggagcgctctgaccgacaccgacaagttcaacccggacgaaatgtggaagattgagcagcgcgtcaacaagctcaacgagctgggcttcgacgtggacgagctggaaatgaagaccgccgaggacggcaagcgtgtgctggtccgcccgcgcgtggtggacgccggctacgccaaccgcaagctgctgcgcctcaccggccttgacgtgcaggagaaccaggcccgtcgtctgctcaacgaccttgacgcctaccgtgcctccacgtggcgtgagggcgaggatctggaaatcgtggccaccgattggatgcgcgaggtgttcgagccgaccgtgcgtatgattccgcgcgaatatcgctcccagatcgagcctgctcagttcttccatgaggtgcttgaccatcgctggttcctggcggagaaggccggtcacgacgtgccgatgggcgaggccgtgaccagctacatcgacaacgttctgccgagctacaaccttgattccaaggcactcgccgaacttaacgaagaggccgattccggcgtcattgacgacgaatccacctacagcgacccggacgacgacggctacaaccccgatgacgatccggatgcggcagtgtggagtcattaagcggacaatccggtggactgtctgtaggtgagcccatcacacaaagaagcccctcagatagaggggcttctttgtgtgtacaacctattacggcctcaagcgacaatcactccgccgcagccttgcgccgtgcgttggacaccgcgtacaggctgatacccgccgccactgaagcgttcagcgactcaacagacgagctgatcgggatgccggcaatcgcgtcgcaggtttcgcgcaccagtcggcccaaaccgctgccttccgaaccgagcactacaacgagcggatcggattcaaagccagtctcgccgacgagcttatcgccgccaccgtcaaggccgacaacgtagtatccacgctccttcaagccctcaagtgccttagtcaggttcaccacgcgcgccaccggcatatgcgcggccgcaccggcagacaccttccaagcggcggcgttcactgaagcggaacggcgttccggcagaatcacaccattggcaccgaatgcggccgccgaacgaatcacggcacccaggttctgcggatcggtcacgccgtccaatgcaatgaacagcggtcgcgcagcaatacgggcggccgccgaattcgcggcctccattgccttggccttcttctcagcacgatcggccagctcgttcagcgaggagtactggaacggatcgaccttcagaatcacgccctgatggttgccggagcgggcgatacgatccatctccagacgatcggcctccagcatgtgcaggccgttcataccagcgattttcacgatttcgcgagtacgatcgtcatgttcaatacgagacatgatgtacagcgtggaagaaggtacgcctacgcgcagtgcttccagcacggaattacggccgtacaccagatccgaagtatccgccgaagcgaacttgtccactcgacggcgggctgccagacgcgggtcggccatctgccgacgttcggccgctttcttggccttatacgccttgtgatagacgcggtcctcggctttgggagtggggccgtaacccttcagtttgttgcgatgcttgccacccgaccccttggtcggtccttttttgatagccataggtgctattgtcccagcaccccgcgccaaaacgcggctattccgccgtcggtagccggtaaggtattgagagtgaagaagcagcgcatgatattcggactgtccctgctgtattggggattatggttggcgattctgattctgtggatgggtcgcttcgtgacctcattcttgtcgatatatttggtttccgcgctgcgcctcgatgagggtgtggtgggcacagtcgtggccatgtacggcttcggcgcaatcatcggctgcctgttcggcggtaccttgtccgacagattcggccgccaatccatgattatcatcggcgaaatcggcgcagcggctgccctgctggtcgtttccgtgctcactgaccccgtggctttaggcgcggccctgtttgtctatggtgcgttcgcctcactgcccagcccggtcatcgccgcgtatatcgcggatgtggtgcccgccgaacgtcagcaacgtgcgtacgtactgcaatcgtgggcgattaattttgggtacgcgattgggccgattgtggccaaccagctggtcaagatctcgtattcgctgatgttctacgttgaagcggcggtgatgatagccgtcgcgatattgctgattgcgttcttccgcgaggtgcggcatttggggattactgtatcggtgccaagtgcggtgcgccatgaagacgaacgcagtgttacgcatgcggaattcgccggcgtcgaggggccgaatcactcggatgccgcaccggctgccagtgccaagggctccatgtctcgcaattggcggcgcgtgctcactgatacgccattcctcggcttctccctgctgatgttcggctacttccttgtgtacttccaaagcacctccggcctgcccattgccatgacggaccttggtctagggctgggcgagtattcggtgctgctcaccatcaatggcggtatgttgtgcctgctgcagattcccgcgatgaaactgttctcgcgcatgggcaattcacgcgtgctggtgatgggcctcgccgtaaccgtcatcggctatgcggtgcaggccgcggcccattcctggggcggattcgcgcttgccgtagtgctgtggacgctgggtgagctgggcacattccctatcgccaccactacggttgccgccatggcacccgcgtcggcacgcggcacgtaccagggcgtctacaacgtagtgtggtcggtatcgattgcgctggcgccgctgattggcggctggaccatcagcaacttcggcggtcgaacgctgtggatcgcctgcacgatagtcctgatcgccgtaaccctcggtctcaagctcaccaaaggcttgcgcgaccgcgccatggccgccaacctgcgcaatgcctcacagtaaataattcccgtcaagaaaagtgtgaggcatccgaacttttccgcacagtcaaacatggtccgcaacggcgggatctcactgatatgacgctctgcatgtgcgattgaggcatcgtaatcctcacgcttttcttattgagaatcattctctgcgatacgttctagaatcatcacaagcaatgcgccatatacaacggcagatataggcggtctccttcaacgcgcattggtctaggatgcagcacatattgcatgccgacccggctgtcgaatttattcttgaacttatcgagcgatgaggttttgtatctctttgtcgatttgacctccacggggcagaccctggccttcatggcggcatttgaatactccccgataaggagaaaatcaatttccatgcggtccttcgcctgacgggaatatcgggaatagaagaacaggcgatggcctgaggcccggagctgctgcgcaacgacattctccaccagcatgccttcattcacttccagcttgccgaacaggatatcgcggtacaactcattcgacgtgtatgcgcggtcggcaaacacttgcgttactaacaagccggtgtctcccatatagcatttcatcgtggagtcctcttggtgtaggcgcaggcccacatgcggatccgtggcattcatgcagcggttgatcaggaacgattcatccaaccagaagaaagcattgccatattcacgttcgcgtgcgttttcgcctaaagacgacagtgtgaacttcttttcatgcttggaaagttgccctggaatttcatcgaagatacgtttgacccgttctttcgaatctccgccgtatttctttatgtcctgagcgtacaggtgcaaaatttggcgtttcactcgatcgacattgcccatatcggatgttcccagataacgctctacggcctgcggcatacctcccaccagcatgtattcacggaacaggcgttccgccttgttgtccagcagcggagacattgctcgcctgtccgcaaaagattgccgtatcgcatcggcgagtagttcttctcctctggcccatagaaattcctcaaaatccatgggaaacatgctcaccgattcttcctcggagggaatcaagatgttttcgacattcttcttaatggagatcagggagccagtctccatgaagtcatatcgaccatccgcaacgagttgtttaaccgcgctgcgggcaaaggggaagagctgtacttcgtcgaaaataaagagggtgtcacgctcatgcaggcgtacgccgtaatagacggaaaggtccatgaacagcgtgtccaaatgatccagattgttgcggaacgagtctcgtaccgcctgcggagccttctgccagtcgataaggatgtatgagcggtattcgttcttcgcgaattcctcggcgacggtgcttttgccgacgcggcgggctccttcaatcattaacgcagtagtacccttgctcgctgctttccatcgccgtagatggtcgtatacttttctcttatacatgttaagctcatattcctagtattttcaaggatttatgagctattatatcacgattcctaagttatataatgccgtaaaactcactattcctaggttatgaattgctttgattctcacgattcttaagttatataacgaggcgcgattctttggctatgtggccgacaacagcgaggagatggaaccggaccgcatacgcccggccatcctgattttgcctggtggcggctacgccatgacctccgaccgcgaagccgagcccgtggagaatacgctaatgctatccaggcctgccgggccgccggcgtgagcatcgaagcacacctgttccccgaaggcagccacggcctgtccctggccaatgtggaaaccgctggcaacggcttctatgcgcacatcgtcgaatgcgtgcagtgttggcctgatttggctgaagcctggttgcgtcgcctgttctaggcaaaacgctattacgctgtgcgccaagtgcgccacgcagttatggaataatagcaatcgtatgcatcggcagcagttgcgccgatgtccataaccgcgcagtcctgtgcgtccagccgggagagaaaacccggcagcggccgcaaggctgactactccgcggcaataccaaggagaacattatggatgatctcaaagatcaatccgcagtgtccgcgaccgcaac

SEQ ID NO: 829 - DNA, 2781 bp, Unknown
  R14_18m  MAG No. k141_7935
atactttttcatacagcacctttccgctacgctcaatctccgccctcagcgatgaagaaatcggctcatccagattgatgacatcaactttaagcagtgaccacagattgtcctgaaggttctgctccaagcgattgaaatcgggacaaccggccacggcaagatcgatatcgcttttaggccggttcacgccctttgcgcgagaaccgaacagcacgaccttgcgagcgccggcatcagcggcaaacgcgcgaatctggtcgtacacgtgctcgataggaaccatgacacctcccgccgcatccaacagtcccggaccaatcccggaccacccgcgcttccatcatacggccgcgtcccactcaccgcacggagcccgaaccacccgaacgcggcgacgtagttgcgggaggcgggctggcgctgtagggcgtgcgggaagttcctgacgtctacttttcaggaggtgaatcctcatgttcaccacgttttctctggccatcattctcgactgcaccgtacgcattgtgctcggcacggcattgggcgcgctgatagggctcgaacgccagttgcgcgcccgaagtgctcggcgtgcgctgggatgtggagcacatcaccacgtccgactgaaacgtccgactgacgctgaccagcaacatcgcaacagtacaacaagccaacaagtgggatggggcatcgagcctcatcccactttgttattatccggcgattgtcagactcactcacgccacggtgaacgtggtgcgcttcaggtcctcacggcgcgaggaggggccgatgagcagttcaaattcgccgggctcgacgatgcggttggcgtccgggtccacgatcgtgcagttcgccaccgggatctcgaaggtgacggtcttggtctcgccgggttccagtgcgacgcgctggaacgccttcaattcgcggtcggtccagctgtaggaggtcacgatgtcgccgatgtaggcctgcacgatctccacgccggcgcgctcgccggtgttggtgagggtgatttcggcacgtacggtgtcggtttcggcgaatgtgccgtcggcgttgcttgcgccgcccgtaatggtcggttcgccgtatgcgaacgtcgtgtagctcaggccttcgccgaacgcgaacgccggatcctgggtgaggtcggcgtaccggtcgccgtgctggccgcgaatctggttgtagtagactggcagctggcccgcgtggcgcgggaaggtgatcggcagtcggcccgacgggctggtcaggcccaggattatttcggcgatggcctgaccgccgcgcatgcccgggttcggcgcccacaggatggagccggtgccggtttcagggtcgctgacgcgcttggcgaacacgccgtactcccccacgatggaggcgggcaacacctgcggcttggagctgatgagcacggtgaccatcggcttgccggtttcgcgcgagacggcggcgagcgcgtcgagcagggcgttctggccaccgagcagttcgagcgtggcggtggagcaggtttcgccgaccagctggaccacgtcgccgaccacggccacgatcagatcggactggcgggcgttggccacggcttcgtcgatcattgctcgatcgacggcggcggaaacgccgattttcgggcgaggctggccgtccgggtagaactcgccggcagggtcaggcacgaggtcgatgacgttcgcgccgcgcgagtagaccacttcgcaatcgtcggaggtgagctgggtcaggccgtcgagcacggtggtaatcatgcctcgaggctggccatccggcatccaagagacctgaccggagttgccggtccagtcgccgagctggttctgggcgtcgtcggcaagcgggcctaccacagcgatgcgcttggccttgtttgcggcgaacggcagggcgccgtcgttgcgcagcagggcgacggattcgcgggcgagttccaggttggtctgctggtgttcggcggagccgatgaccgccttgatgcgttcggcatccggcaggcgcgggtcttcgaacaggccgaggcggaatttcagggccaggatgcgggctaccgcatcgtcaatcagggattcgtcgagcagaccggtttttacggcttcgatggctccctcatagaactgtggggtggtcatgaccaggtcgttgccggccttgaccgcatcggctgcggcgtgcacgtaatcgggcttgacatgctgttcccataccgagcggccgacgttgtcccagtcggtgatcagcgtgccattgtattgccatgcgccgcgcagcttgtcggtcagcagccatttgttgaacgtgaccggcacgccttcgatggactcgtagccgagcatgaacgtgccgcagccttccttggccacgcgttcgaacggcggcaggaaccaggattcgagcttgcggtgggagaggtcggcttcggaggcgtcacggccgccctgggtctcggagtaaccggcgaaatgcttggcgcaggccaggatcgcgttcttcggcagggcctcgccggccttggcgccgccctggtagcccttgaccatggcggaggcgagttcgccgatcagcatcgggtcctcgccaaaggtctcgtccacgcggccccaacgggtgtcgcgggcgatgcacagcaccggggagaacgtccagtgcacgccggtgcaggagacctcttcggcggtggcgcggccagcggcttcgactttggcggcgtcccagctgacggccatgccgagctgggag

SEQ ID NO: 830 - DNA, 12391 bp, Unknown
  R14_18m  MAG No. k141_7962
accgcaaagcgcgccaagctcatccccggccgttggcagggcgtggtggaatacggtcttgacttcgtgcgtgacaaggtcgtctatgacgtgatgggcgaggttcgcggcaagcgctacgtgccgatgatcaccaccatcttcttcacgattttcatcttcaacctgtgtggcatcatcccgggtatgaacatggcggccaccgccactgtggtcatgccgctggtgttcgccatctggaccatggtccagtattggatcgccgccgcacgttcgcaaggtcttggccattatctgcgtcacgagctgttcacccccggtgtgccgtggccggtctacatcctgttgaccccgattaacatccttgagttgctggtcatccgtccggcctccctgaccatccgtctgttcgccaacatgatttccggccacctgatggtcgccacctgcctggcattcgcacagtactggatcgtcgatgcagccaacaagctgcaaggcatcccagtcggcgcgatgtggttcgtcagcggtcttgccatgacgtgcttcgaggcgttcgtcgccttcctgcaggcttacgtcttcgccattctttccaccgtgtacatcaacctaagcttcccggaggagtgaggttcaaccccctctttcggaacccggcctcgcctaggtaggcaggaccgaacgaaataagatttataacgtcgccaagtacgttagaaaggaaacacaatggatatcatcaccctcgcagcggtcgccggcaacctgtccgtcatcggttacggtctcggtgcggttggccctggcatcggtctgggcatcctcttcggcaaggccatggaatccaccgctcgtcagcctgagatgtccggcaagattcagaccatcatgttcatcggcctggctctgatcgaggtgctggcactgatcggcttcgttaccgccctgatgttccactgatcgaacgttttctcagtcgaatacagaaggcaaaacgaatccaccagtgaaaggaggacttcataatgacgctcgcagaaggcggaattgatctgttcattcccgagacctatgacattgtgtggtccctgatcattcttgtcatcgttgcggtgttcttctacaagttcttcatgccgaagttcaatgcgatcttcgacgagcgtgccgccaagattcagggtaacatcgccaaggcggagcaggctaagaaggacgccgacgaggccaaggccaagtatgaggcccagctgagcaccgcccgtgtggacgccgccaagattcgcgacgacgcccgtgcggaagcgtcccacatcatcgccgacgctcgttcccgcgccgagtccgatgcggcccagatcaccgcatccgcacagcgctcgatcgaatctcagcaccagcaggccatcgtctcgctcaagggcgaggtcggcgcacttgccaccgccttggccggcaagatcctcggtgccaagctggaagacagcgacgtgcagtcctcgatgatcgattcgatgatcgacgacctgggcgccaagaagtgaccgtgaccatccgtaaccagaaagggaggtgaccatgcgaggagaggcatcacgtattgcagaccgcgagtcgcgtgattcgctggccccgaaactgcgcgacacccgtgaggacgcgtggcggatcggcaacgaactgttcacgatcaccaaggtgctcgatgacagcattcagctggaacgcgcactgaccgacccgtcccgcccggtcgccgacaaggtggccgtcctgaagggactgctcggtgacaacgcgcatcctatgaccatggagatcatgaccgacttggtctcccgccgttggagccgtgcgcgcgacatcgccaacgcggtggaggacttcggcgtggacgccatgatgtactacgctgacgccaccgacgccacgctgcaggtatccatcgagctgtccgagctgcattccgcactgctgaacctgccggtcgtccgctccaagctgtacgactgccaggccaccagcgaggcccgtgtgaagctgttccgcgaggtgttctccggcaagaccctgaacaaggtcaccatgaggctcgccgaacacgccacctgcaacctgcgccgccgccgctacttggagaccatccagtggctgatcaacaagttctcccgccacatgggcgagtcgatggtcaccgtgaccaccgccaccccgctgaagaaggagcagattgagcgactggtcgaggtctactccgccaaggtgggccgccaggtgcacatcaactcggtggtcgatccgaccgtactgggtggcatgcgcattcaggtgggcgacgaagtcacggacaacaccgtggtcgcacagctgcagaacctgcatcgcaaggtgcagacggaggcgactccggcctgaccggccgagccaatccgtccaacaccacacacaagcaaagacttgactgaacaataaccaatagaaggagtgatcatggcagaactgaccatcgatcccgcctcgattcgcaaggccctcgacgacttcgtgtcgtcgtacaagccgagcgacacccccacccaggaagtgggctatgtcgccacggccggtgacggcattgcgcacgtgacgggattgcctggttgcatggccaatgagctgctgacgttcgaagacggcacgctcggcctggcgttcaaccttgacgcccgtgagatcggcgtggtggtcctcggcgatttcgcaggaattgaggaaggccaggaagtgcgacgcaccggcgaagtgctctccgtgcccgtcggcgacggctatctcggccgtgtcgtggacccgctgggcaagccgatcgacggcctcggcgagatccagggcattgagggtcgtcgtatcctcgaagcccaggcccccgacgtgatgcaccgccacccggtcgacgagccgctgtccaccggcctcaaggccatcgacgcgatgaccccgatcggccgcggccagcgccagctcatcatcggcgaccgccagaccggtaagaccgccatcgcgatcgataccatcatcaaccagaaggccaactgggaatccggcgacccgaagaagcaggtccgctgcatctacgtggccatcggccagaagggctccaccatcgcctcggtgaagcagagcctggaagacgccggcgccatggagtacaccaccatcgtggcctccccggcagccgattccgctggcttcaagtacatcgccccgtacaccggctcggccatcggccagcactggatgtacaacggcaagcatgtgctcatcgtcttcgatgacttgtccaagcaggcagaggcctatcgttcgatttccctgctgctgcgccgcccgccggggcgtgaagcctacccgggtgatgtgttctacctgcactcccgcctgctcgaacgttgcgccaaggtctccgatgatctcggcggcggttcgatgacgggtctgccgatcgttgagaccaaggcgaacgatgtgtccgcctacatcccgaccaacgtgatctccatcactgacggccagatcttcctgcagtccgatctgttcaacgccaaccagcgccccgccgtggacgtcggtatctccgtctctcgagtcggtggcgccgcacagaccaaggctctgaagaaggtctccggtacgctgaagatctccctggcacagtaccgttcgctggaatccttcgccatgttcgcctccgatctggatgcggcttccaaggcccagctgacccgtggtgcccacctgaccgagctgttgaagcagccgcagttccacccgtactcgccggaacaggaagtcgtgtccgtatggaccggcacccacggcaagctcgacgacctcgacctgaaggacgtccttccgttcgagcagggactgctggactacatcgaccacaacaccgatatcctcaagaccattcgcgagaccgaggaattcaccgccgacaccgaggctgccctcgataaggccgtggacgagttccgttcgacgttcgtctcttccgccggcaagccgctggtcgagaagaagccggacgttgacaaggccgcgccggttgatcaggaaaagatcgtggcgggagaaaagtaagccatgggctcgcaactcgcattgaaatcacgcatccactccaccgagtcgttggcgaagatcttcaacgctcaggagatgatcgcgtcttcgcatatcgccaaggcccgtgatgtggccctgaacgcgaagccgtacaccgatgcgattttcgatgccgtgcaagcgttggtggcccacacccatatcacgcatccgatcgcggtgaaggacgagaagaacccgcgcgtggctgttctcgccctcacctcggatcgtggtatggccggcccgtacacctcttcgattatccgtgaaacggagtcgctgctgtcccgcctcgatgcggcaggcaagcagccggagctgttcgtgtacgggcgtcgcggttcgacgtactacaagtaccgtaatcgtgacatcgcggcgacgtgggaaggcgacaccgaccagcccggcgtggaaattgctgaaacgatctccaacactttgatggacgcctacatgaagccggctgagaaaggtggagtttccgaactctacatcgtctacaccgagttcatcaacatggtggtgcaaaaggtgcgcgtgctgcgcatgctgccggtcgaaatcgtgaaaaacgagaccaaggtgcccgatcctgatgaagaggcaccggctactgcggatgtcgctccgctgtacactttcgagcccagcctcgaaaaggtactggacgcgattctgccgaagtacattcagtcccgcatccacgagtgcctgctgaccgcggccgcgtcggaaaccgcaagccgccagaacgccatgcacacggcaaccgacaacgcacgaaacctgatcgacgaccttacgcgcaagctcaacgcttcccgccaggcctcgatcacccaggaacttaccgaaatcatcggcagcgctgacgcgctgaccaagaaggaagagtaggaacgcatatggctgacaaccagaccactgcggccgagcctaccaacggtcgcgtcacccgcgtccagggctcggttatcgacgttgaattcccggtgggtcatctgcccgacatctacaacgccctgaaagtaacgatcgtcaacaccggcgccaaggaagaaggcgaggcgaaggagaccgagatcaccctcgaggtcgaacagcacctcggtgattccacggtccgttgcgtcgctctgaagcccaccgacggcctggtccgtggtgcctccgtctccgacaccggcgccccgatctccgtgccggtcggcgacgtgaccaagggccacgtcttcgacgtgtccggtaacatcctcaacaagaagccggatgagaccatcaccgtctccgagcgttggcctatccaccgcaacccgccggccttcgatcagctggagtccaagacccagatgttcgaaacgggcatcaaggtcatcgacctgctgaccccgtacgtgcagggcggcaagatcggtctgttcggtggtgcaggtgtgggcaagaccgtgctgattcaggaaatgattcagcgcgtggctcagaaccacggtggcgtgtccgtgttcgcgggcgtcggcgagcgtacccgtgagggtaacgatctgatcggcgaaatggccgaggccggcgtgcttgagaagaccgcactggtcttcggccagatggatgagcagccgggtacccgtctgcgtgtcccgctgaccgcactgaccatggcagagtacttccgtgacgtgcagaaccaggacgtgctgctgttcatcgacaacatcttccgcttcacccaggccggttccgaggtgtccaccctgctgggtcgtatgccttccgccgtgggttaccagccgaacctggccgatgagatgggttccctccaggagcgcatcacctcgacccgtggtcactcgatcacctcgctgcaggccatctacgtgccggccgatgattacaccgacccggccccggccacgaccttcgcccacttggatgcaaccaccgagctgtctcgtgacattgcctccaagggtatctacccggctgtggacccgctgagctccacctcgcgaatcctcgatccgcgttacgtgggccaggctcactacgactgcgccaaccgcgtcaaggcgattctgcagcgtaacaaggagctgcaggacatcatcgccttgatcggtatcgacgagctcggcgaagaggacaagaccaccgtgaaccgcgctcgtaagatcgagcagttcctcggccagaacttctacgttgccgagaagttcaccggtcgccccggctcctacgtgccggccgacgagaccatcgaagccttcacccgcatctgcgacggcgtgtacgacgacgtcccggagcaggcgttctccggtatcggcggcatcgatgatctcgaagagaagtggcacaacatgcagaaggaactgggtgcgtgatggctgcggaaaaaaccacgatgaaggtcaacatcgtcgccgctgaccaccctgtgtggcacggcgaggcgacgagcgtgaccattcccgcctctgagggcggcatgggcatcctgcccgaccatgagcctgtgctcacggtgatcaagcagggtacgctcaccgtggttgagcccgatggcgatcgccacatgttcgaggtgaccgacggattcatctccttcgactcgaacaaactcaccgtggcggtcgagcgcggccacgacgtccagtactccggcaccgccgagtgatctgaaccaactcctcaaggggctctctggttttccagagagccccttttgctatgtatgccatgtgttgcgctacagtggtggcctatgcgagttattgttgccgactgttcggccgagtattcgggccgcctcaacgcctcactgcccctggccaagcgtgtattgctgatcaaggctgattccagcctgttgattttctccgaattgggctcctacaagccgctgaactggatgaccgcgccctgcacgattcgtgagatcgacccagccgccaaatccgcgcaacattcccgggaaagtgtcgctggtggggctgtggatggtgattccgcgacgcattccccggaaagtgtcgccgctggtgagccggaaaaggtgctacgtgtcagcgccgacaagggctctgacattcttgaagtgacgctgcaacacatctattccgaccaaacctatgatctgggcgaagatccgggtctcatcaaggatggcgtggaagaccatctgcaacgctatctggccgagcagatcgagcgtatcggcaagggagccaagctggtgcgtcgcgaataccctaccgccattggtccggtggatatcatggccgtgaatgccgagggcgagcatgtggctgtggaaatcaaacgtcacggcggcattgatggcgtcgagcagctgactcgctactgcgaactgctcaatcgcgatccgctgctggccccggtgcatggcattttcgccgcacaaaccatcacgccgcaagcccaggtcttggccaaggaccgcggcttcacctgcctcatcctcgattacgacgatatgaaaggcaccgaggacgacagtctcaggctgttctgattgttcttggcttccctcttgaaggggggtttcgaacgtacatagagagactgaggggaggcctcacggtatattccgtgaggcctcccctcagtcagtttcgctgccagctcccctcttggggagagccatcgagattgtttagtacgcggcgagaatatcgattacgaagaccaacgtggagttggcgggaatcgaaccttgctccttatctccataggcctgatccggcggaatcaccagcagaacctgagagccgacggtctggccgaccagacccttctgccagccctcgataacctgatgctggccgctggaatcgctgaacagatcggcgtcgattgtggaatcgcgatcccaggacgaatcgaactgcttgccatccgtaagccaaccggtgtacttgaccaccacggtgttcttgtcggtcagcttggcgccgttacccttgatcagcgtctgcgagatcagcgaatcaaccgaaccctgaccgttcatgtcaatggacggcttgccattcttggctcgcgtcaccttcggcagattggccggcacatccttgacttcctcgccagtggccttcttcaggtccttggacttggatacaaacgtcatcgccaaaatgtaagagtatccggacgaatcctgagcgttgacgccaaagccgatcgtggtgttgatcttggcacccttgatctggttgtagtaggtcgaggagagggtcttggaatccaccttcagcgagcaatccggcgtgttcttggtccaggtgtccatgagctcggtgccgtctttaacgttgagcgcgatgccttgggcgcagacgcggtcgccctcctcgatcacgtcgccatcgcccttttgcagcaccacataggagccgtcggacacggtcatcggcgtattaaaggagatggtcggcttctcgccgagcttgcccttggcggtcacgccggcaatttgccccttcttgtcagaagagccggaagaggatttcgagtccgagctcgaactggagcaggcagccagcgatacgcacatcgccagcgagcaggcaagagcaacggccttgccgagaggggataacatagatttaacagacttacgcatgacacaccaccctactggtgaaccttgattttctgcgctcctaggtaataaacaggtgaagattgtagaatggttaagttatgagtgctgaagaacagactacaagaccggataagggcgccaagcgtccatcccgtcatgccaagatcatgcgtggagtggtgacgcctatcttcggtctattggccgtggcggctgtggtgttggggtacatgaataccacgatatggaagccctccactgaaatcaccgcttccgcaaccatgagcggctcccggtatgccgtcactgatccgaatgtgctgaccttgttggatcagaacgccacgataaccgtggactcgggatcctctcaggacgaggcgtgcgtggcgttgggtccgtccaaggatgttgccggatgggtcgcgtccgagaagtcctatacccgtatcaccggattggcgtcatggagcgagctgagcacccagaagggaagcagcacgagtcagggagcgcctgccagtgccgatgacgcggtggcgttcaaggattccgatatgtggactgccgtgaaatgcggcaccgggtccgtttcgctggagagcaagaagaccggcgcctcgacggtggccattgtggatttgggtgaaaatgccaccaacgccaaggtgcagctgcactgggtgcgctccgaagtgccggactttgcgatgccgttctatctgtccggtggattgctggccgtgctggccgtattgtgcgcctccgtgttcgccatgccgccgcataagcgccgcaagcgcatggtggaaggcacggcaagcgccgtaattgaggaagaggcacccgccagcatcgcagtgtccgggaagccggatggtgcaagtcgacgtaatcgtcgccgccacgccacaaatcggcgttcgggccgtgcgtcctcgcaatctgaagccaccgaaacaccggttatcatcgacccaagttcacgtaacctggtcgccgaccagcagactggtgccgagagcggcgctgagaccggcttcagcgccggcgataacgaatcgacttcggtaatcacccctgacgaactgcaggcctacttctcccgcttggcccaagaggtcaataccggagacgactcggccgatgacggacaggaggaaagctgatgaacaagcgatggaacaaactgtgtgtggccgccctcgcctgcgtggcgttggtcgtgccgttgaccgcctgtgaaggccggctgccgacgccggctgctgatacctccaccaaggttgcgccggatttgaccgaggcacaggagaagaagattcgcctgaagattctcaagacgatcgatgaagccgatcaggccaagaatcccgatggatatgcggccgttatgggcgggccccagctggacattcgcatcagccagaccacgatcaaccagcgcggcggcggtatgtccaaatacgcgaccattcccaaggacatcgcccagacggtgattcccatggacgacggatggcctcgctcggtgttcaccatcacgaccaccaccgaagatcagcagtccaagcgtttgctggtcttcgatcaggaatccgcccagcagaattacaagctgatggccatggctcgactgtttgagggggccaagctgccgaagttcgagattccgactattggctcgcagatgggcactgcaaaggatgagaagctggtggccactcccgccgatgccttgacccaatacgccgatgtgctgcagaacggctccaagagccaatacgcttccaagttcgcagacgatttgctgcgccaggaactggccaataccacggccaaggtgcaggaaggtatgcaacgcaacaacggtacgcaggagcagaaattcaccgttgtgcctgaacagatgtgggtgatgcgtgctgcagacggtgccggtgatttggtggttggccgtattaacggcgaatggactcgcaaggcgggggatggccgcgaatcgcagccggcttccgacgacgagaaggcgctgttcaatagcgacaagtacaccagcaccatgaaggtcacgtatgtgaacgtggtggccttgtacattccgttggcaagctccggtgagcaaatcaccgccgtgggcgccgaccgtcagccggtaaaggtcgaagcgctgtagttgttgccgccgcccaccgcgcggttaacgccccaccacgatatgattcatccaccacgatgtcggtaagttttacctttcgcacaatggtgccgttttgagtcacatcgtggtgggcgttttgctacgtggtgggaatttcaccgcgtagtggaagaatccctacgtggtgggaatcggcattacaatcaatgtcagcaaatgtgattgttgttgtacgcgaatcgcgtggaatcgggaggcattatggcagagcagcagttcaatccgggagtctcattggcgggcgccgtcgatttggaggcgctgaagcatcaggtcaaggccgagcccggccaggcgggtggcgctcctgccgctggtgggtacgtgatcgacaccaccgaaaacaccttccaggcaatggtgcagacttctgcgaccttcccgatcctgctgctcctgtggataccgaccgatgaccgcctgttcccgatggcccgtgcgttgggcgacgcggtgaacgccctgaacggccagattcagctctcccgtatcgatatctcgtccaatccttcgattgcccaagcgttgcaggtgcagggcgcgcccgcactgttcgcgttgattgccggccgtccgatgccactgttgcagggccttccgggtgacgacgagctcaagcaacttaccgacgaggtgattccgaagatcattcaggccgccgcgcagtctggtgtgaacggtaccgcgccgtactcgggtgatcctgattccgatgccgccaagagcgctggtgccaccggtgccggcgcgggtgctgagcaggtgccgccggagcatgccgaagcccatcgtttggccgaggagggcgattacgccggtgccgccgccgaatacgagcgcgtgctcgaatccgacccgtccgatgcactggccgcccgcgaacgtgcgaaggcgctgttgctggcccgctccgggtccgctgatgtacgtgacgtgcgtgccgctgccgccgcagcgccggacgatgtggaagcgcagttggctgtggctgatatcgacatgatcggtggccagattcaagacgctttcgaccgtttgctggactttttggccgccgggcacaaggccgatatcgagccggttcgcaagcgtctgctcgaatacttcgccatccccgaacccaccgacccgcgtctggctcgcgcccgccgtcgcctagccaccctcatgtactgattggttttggctcccctctttgaggggagctgtcaggcgtagatgactgagggaagcgcgcgaacgtacttgattgcttcccctaaaccatccgattcttcccgaaatattgctggaaccttggcccctccagcgccagttcctcctcgaaatcatccgcccacttgcagaacggacggttggcgagaccatcgttattgaatcgcgcctgatcg

SEQ ID NO: 831 - DNA, 20995 bp, Unknown
  R14_18m  MAG No. k141_8075
caacattcccgggaaagtggcgcgcaaagagtgtcaggcgcgtcgctcgatgagtgcgcggccggatgcgaggcggtcgagcacaccggttttggcgatggccagcatcagataccaggccatcacgccgctgataagcacgccgccggtgacctcggaaatcatgtgcacgatgccacgcgggctgacgaatgacacacccacgtagcgaaacagcatcagatatgtgccgtattccaaggcgaccaacgcaccggatgcaatggaaatcggcagattgaacatgcggtaacgggtcaaagcgaacggaatctcagcgaaaacaccctgcagcagcgccgagataatcacgaagcccaaatcgaactggctaccaatcaccgtttcgaccagcgtgccgataaggttcacgtacagcgccgctccgggtttgcgcagaatcagcaccgccagcgtaccggagaaataccagacggcgtgcacgatgctggcgaaaccgggcagaatcgcaccaaacaccgaagagatcggcatgtacgcgaagttgaatccccagaagatcacgccgcaggccgcgcccagtgtggcaccgaccgcgatgtccaacggctgccatttcagcgacgatacggcgaccgaacgtttcggaagagtatgaatggtggttgcaggcatggtgatctcctagccttaaaggccgcacacagtaatcgaatcacgggcgttccttgacctgtgcggctcgggcgggaacgccacaccacagtgtagccgctcggttcacggctggaagtacccttggaggttatgaagcttaccgatatttcccccgcaatcgcattgaccccgctcgacggccgttaccacaaggccaccgccccgctcgtcgaatacatgagcgaacctgccctgaaccgcgaacgcatgcgtgtcgaagtcgaatggatgattcttctggccaacggctttgagggcaacggcaaccagccaatcgttgacggcgtcaagccgttcactgccgaagagcaggccttcctgcgcgccattcccgaggacttcggcgccgaaggcatcaagcagcacgccgctcatgaggccatcacccaccacgatgtgaaggccgtggagtactacatcgatgatcagatcgacaaggctccggccgagctggccaacatcaacgacgagctgaagaccctcgtgcacttcgcctgcacgtccgaagacattaacaacctctccatcgcccgttgcgtcaagaacgcgatggaaaacgtgtggaccccggagttcaagcgcatcatcgaccacctcgccggcaaggccgaggaattcaaggatatgccgctgctctccctcacccacggccagccggccacgccgaccacgctcggcaaggagctcgccgtctacgtctaccgtctgaaccgtcagctcaagcacatcgaaaaccaggagtacttgggcaagatcaacggcgcgaccggcacgttcggcgcccacctggccgcatgcccggatgtcgactgggtcgccgtctcccgcgaattcgtcaccaaccgcatgggcctgacctggaacccgctgaccacgcagatcgaaagccacgactggcaggccgagctgtactccaccgtctcccacgccaaccgcatcatgcacaacctgtgtgtggacgtgtggatgtacatctcccgtggagtgttcgcccaggtgccggtcaagggtgccactggttcctccaccatgccgcacaaggtcaacccgattcgtttcgagaacgccgaagccaacttcgaaatcagctgctcgctgctcgacaccctctccgccacgctggtggaatcccgttggcagcgcgatctgaccgattcgaccacccagcgcaacatcggttccgcgctcggctactccttgctcgccctgaccaacctcatgggcggccttgagtccatccacccgaacacccacgtcatcgagcgtgagcttgatgagaactgggaggtgcttggcgagccgatccaaaccgccatgcgcgcctgcgagctcaagggcctgccgggcatggacaagccgtacgagaaggtcaaggagcttatgcgcggccacaccatcaacaaggaacaggtcgagcagttcatcgaccagcagtccttcgacccggaaaccgccgctcgcttgaaggctctgacccccgccacctacaccggtgtggccagccagctcgtcgctttcgaccgctgaaataggtgcgatgcgagtccctcgagcccatcgcatccaccacactactgcgctgagtcacaaaccaaaccacaaactgaaccgaacaaggacaggcgtcaggtaaccatttcatgactactgaacaggagcagtccactacggaagatcgcccggacaaggcgacctcctccactaccgaccggccgatcgcctctggtgacggccggtcggccaattttgctgtcagcggaccggacagcccggcaaccgacgacagcaatgattccggaccgtacatcgacgacatcgctccgcgccgcacgcgcgacttcggcgatctgacccgggccggtctgtcgctgttgatggccgccgtggtcatggtgttcgccgtgtatctgggcggcatgacgcgcggcgtcgaatccgacgcacacaccgcagcccaggtcatcaactggttggctgacttcccctccaccgtgctgacgcagctggccaccatcgtcatcgtgatcatcgtgctcgctcaattgctactggcccgggaatggctgcaggccgcggtgtccgcgctggccatgttcgccggctacggcatggtgtgggtcgtatcgacggcaatcagcagtctgaacgatttcaccctgccaatggcactagtctcagccgccacctcatacggctccgggctgttgcccgacatctacgccggcatggcgtccttcctgaccgccgccgggccacgccgcacccgctccacggtcaaatggagctggaatatcctgtatgccatcgctgcggtgatggtggtgctgtcgtggcattcggtcaccggcatgctggtgtcgatggccgccggccgcacagtgggcatgctgatccgattcgtggtcggcacgcagaacaagggcgtgtggggccaagatctggtcgccgccctgaaaggcatcggactggacaccgcctcgctgattcggcatcaggagcccggcgtcggccacggttcactggccgtcacgctggacgacgatctggccgaaggctcgcgcatctacgatctggataccacggacaaccgtcgtttcatcgtttccgtcatcgacgcgcagacccataccgtcggctatctgaagcagttgtgggactgggtgcgtttcaccagtgtgtccatccgacgtgaccgttccgtgcgtgacgccgtccagcatcatttcgccatgctgctgggtctgcacaatatcaaactgcccgcgcccgcaccctacggcatcgccgataccgacgaatccgcgattctggtgctggatgcacacaccatcgaactgcccgccaacctgaacacgcttaccaaggcggatgccgtggcctacatgcgctacctgtccgtggcgagccggcgcggctatacgcaccggcgcatcacgccggacacgctcgcccggcttgaagacggcaccgccgtgattgccggctggctcaacggcgacaacgcttccggtccggccaacaccgcgctcgacaaagttcagctgctagtgctgttcgccgcgctgatcggcgtggaaccggcggtggaggccgcccgcgaggcgtggggagacacgactctgacggccttggccccgttcattcagaaggtcgcggtcccctcccccacgcgcgcgctggaatcctgggacaagcagctgctcaagggcctgaggagtcgtatcaccgcgctggctgacgaggagacggtggaatccgccgaaccggtgacgctggcccgattctcctggcgttcgatgatcaccatgctgctggtcatcgtggccgtggtcgtggtcttcacccaactgaagcccgaggagatcatcaccgcgctgaccaacgccaacccgttgatggcggtggtgacgctcgcgttcggtgtctgcggctggatcggctcgtcgatttcgctcggttccctgatggcgcggcacaagcgtgacaatatgggcgtcttcatgagccaggtggcaggcggcttcgccaccgtatccatgccagccggcgtgggcccctcgttcgtcaacctgcagttcctgcgcaaatccggctatcgcaacacccaagcgaccgcaattatgagcgccgtgctcgtggtgtattacgccgtgtacttctccatgctggtcatcatcggcctgttcaccggccgcaacatgttctccggcgcaatcccgacaaacacgttggttatcgtgctgggcgttgtggtcgtggtgctgtccattgcgatgatgattccgccgttgcgccactgggtgacccgtcgtcttatgccgctggccaagacgtatatcaaccagctgctggacgtgctttcccagccccgacagctcacagtcagctgcctgggcgcgctgttccagaacgcgaccactgggctcgctttctgggcggccctgcaagcgttcggccattcatcgaatccgattgaaacgacgttcgtcttcctgctggcctatgcattgggttccgcagtgcccactccaggcggtctgggcggtgtggaagcggcgctgacattcgcgttcgtggcggtcggagtgccgcagggcgtggcgctttccgccactttgctgcaccgcgtggtgttctactggctgcgcattccgctgggcgcggcggccatgaagtggcttgacaagcataatcttgtctgattcgtctattttcatacccccttcggggaaatagatgtgaaaacccttataaaacgcgggttttcgctgaaacatgcgctagtatcattgatgacaacatggactaagcaaaagtgcttgtcccctgacccaagaaggatgctttatggcatacaacaagtctgacctcgtttcgaagatcgcccagaagtccaacctgaccaaggctcaggccgaggctgctgttaacgccttccaggatgtgttcgtcgaggctatgaagtccggtgaaggcctgaagctcaccggcctgttctccgctgagcgcgtcaagcgcgccgctcgcaccggccgcaacccgcgcactggcgagcagattgacattccggcttcctacggcgttcgtatctccgctggctccctgctgaagaaggccgtcaccgagtgaccttctgctcgtagcgattacttcgagcattactgacgacaaagaccccgaccgagatggtcggggtctttttgttgtggtgctgtgacgtgttgtccaaccgtattattccggactagttcagcgcttccataagctgctcgaatcccagggtgggctcggcctcgaagggatcgaggagtatggcttcccggcgttcgggggcggtcagggtcaggtgggtccagtcggcggagaactgggctccgacgttcagggccgcgtccacgaaccggccacgcagggcggcacgggtgtcggtcggcggattgtgcacggcgtattccacgttgtctcctgtcagcagctcacgcatctggttgcgggctacgagcgaaccgtacaggcgaccgttggcgatgtcgtggtagtcgagctcaagctgttccatctgggcgaaggtgacgtccgggcgacggcgtttgagcgcgtcgaacagacgcttcttggcagcccagtccacgcggtcggcgagcgcatcgtatgcaccacgctccagcgcgtccagaacgcggctccactcccccataatcgtgtcgatcgtggtggccggcagcgaacttgccagcgcatcgccatgggtttcgatgaaggccttgaccgccgcataataccggcgctgcagacccagtgcggacacggattcgcctgattcgagcgtcagttcggcgcgcggattgtcaaggaatcgactgaccgtgcgattggcggcagccggatcagcaaaggcatactgctcgaatccggacggaacgccatggcggaaggcgtcttcgatcgcgcacagcacaaggtgcgtgacggcaagcttcatccatgtggaccattgcgaacggttcgagtcgccgatgatcacatgcagccggcggaaggagtcggggtcggcgtgcggttcgtcgcgcgtgttgaccatcgggcgggagcgggtggtggccgaggagacggcctcgtccaggaagtccgcgcgctgggtgatctggaagccgtccggggtcatgcggccggcaccggtgtacagctggcgggtgatgaggaacggcagcagctggtgttcgatggtctccaacggcacgaagcggcggaccaggtagttttcgtggcagccgaaggcgtggccggcggagtcgacgttgtttttgaacacatggatcgtggcgtgtgcgccgtaggattcgcgcagcttgcgctgggccttcagggctaggttgcgcatcacgtgttcgccggcgaggtcctgggccagggcctcgcgcgggtcgcgcgcttcggcggtggcgtattcggggtgggatccgacgtccagatacagacgtgagccattggccagatacgtgttggtggagcgggaacgggagacgatgggctggaacatggtcatcgccacctggccggcgtccacggggcgttcggcaccggtgaccgccacgccgtattcggtttcgacgccgaaaatacggcagaacccgtccatctcggcggatggtacgggttccgtggcgtgcagggagcgggtgccgctgtcacgcagttggggcatcactcgccgcctttttgcacgaagctgttgacgtattcctcggcgttggtttccaaggcggattcgatgtcgtcgaggatgtcgtccaacacgtcggcttggtcggtggactcggtttgggcggcggcctgcgtggtggcgagggcgtcgtcttcctgggtcgcggcctgctgtgcttgaggttgttcgaattgttgtggcatgttgtcttctttttgggctgtcaaactcccctcagtcagccttcggccgacggctcccctcacccgaggggagccggaggagtcaaaaaattatcgctggttgatggagtcgagccacggatactgctgcaggtaatgctgcagttcgcggatgatgagtccattggaggccactacatcgttatcgtgacgccagtggatgcgttcgccgtcccaacggctcagcgtgccctgtgcctcccagaccactacggtgccggcggcgatgcccgcgatatcccacacgtgcagcatcggctcgaagtaggcgtcataggtgccgtcggccactttgcacaggtcgagcgagacggggcccacgcgcttgatgtcggccgggcgtccggcgagcgaggaggccacgtcgagcgcacgctgcgattcgctggggatgaaggacatgccgtagctcagcacagaaccatccagcgaggaggtcatcgacggcacgaccttgtcgcgcttctcgccgaccgcggttttgtggatgcgcacggcacccgctcccctggcggccaggtaggtcaggccgagggccggggcgtgcacgatgccgatgatcggcttgggctcgttgtccgggccgaattcgaacagggcggcggtcaccgtccattcgctcatgcgacgtacgtagttgatcacaccgtcgatcttgccgatgtaccagtaacgctggccagggcggctttcggcggggcgggtggtccagaagccgtcgaagtgggcgatgtcggcgattctggcgctcatgaagcgcatgatcttgttgtccacttcaagcttgtagcgggggccacggtccgcgttctcggtgctcggctgggcgaggttacgcggattgagttggtcgtggagggcatgctggccggcttcttcgagcaggccggcgactttgagcgcaaggttgcgcaggtcctgtggggtctcttcgcgtgtttcttccatagctaccaagtctatcgttcggcgttgatggccagcgacttcagcagatcgatggcgtgttcggctgaattgagttcggtttcgcagtgcgccttggtgaaggcgagcggatcggagatgtcgagggagaacaggtgatggtcggtagcggccatatggccggcattgccgtagaattcgaccgcctcgccctcgtctgcggcgcgcgggtcgcgaacagtgagtcgggaccagctggcggcggccacctcatcgccgaattgcgccacgagttttgccctgagccaggcgcgggtgtcttccggcggttcggtggtggcgcgtgcgatgtcggcggcgctcaccacccgttcggtgcggggttcgagtttggtgaagatgctgtccgcggggtcgagcgccgcccatttcaggtcgatgaccttcagtcgcggatcattccatccgttggccacgccgggtgcggacgttgtggtgattttgcggcgcagtttttcgagcagctgccatttgagcagccattcgatgcggctggcctcgccggtcatggccagacgttcgtcatcatcggcggcatggcggatggaggcgcagtcgatgagcgcctgctgccacatcgccataatggatgtggtggatttgtccggccaggcgggttcgccggcggtgtcggtgccttcgaccagtgcggcaacctggtagacggcttggcgcagtttgagctggataagccatgcgttggtttcgccgccgttggccagcggcaagattgcccccagcgtcaggtcgcgggaaacggtgtgtatggcctcgactgggtcagacagttcgagttcgtcgaggaaggcgttcaggtcgaatccggcctcgtccgcatgttcgagcagccacagcagcatgctcgtggtgccgagtttcagtgcctgcggcacctccatgcgattggcgtcgccgacgatgacgtgcagacggcggtatgcatcggtggagtgggattcgtcgcgcgtattgatgatcgggcgttcgaaggtggtttgcaggccgactttggcgtggatgtagtcggcgcgctggctgagctggtagcccgggatctcgctgttctcgccaatccctacgcggccggagccggcgtagatctggcgggtgacgaagtggagggtcatcaggcgtgtgaccaagtcgaatggcaccgcgcgggccatcatatagttctcgtgcgtgccccagcaggagcccttgccatccacattgttgcgatgcagggcaatgggagtgccagtctgtttgcgggcgcgttcggtggcggcctgcatgatgaggtctccggcgtggtcgtatcggaccgcttcgaacgggtcggtggtttccggcgccgagtattcggggtgggcgtggtccacatagacgcggccgccgttgggggcgatcacgttggtgatgttgagctgcggggcgtcggtgagcatgtccgggcgggcggcggcgcgttcgagacgggtgccgcgcgcgtcgttgaccgggtcctcctgccggtagtcccagcggatggatttgctgtggctgtccgcggcgccgttcaccacgtcgaaggacagttgcaccggattgtagcggtccggggtgttcagggataccgcgtattcggtttcggtgcccatcactcgtttaacggtcatgtagtgctccttgagcttgagctattcggcggtgcggatgcggcggatcgggtccatgccgttgatgcgcgaccattgttcggggtccacgtcggccatggaatcgcgggtctcgcggtattcgtcttccacggcggcagcgagcagcggcacggtgagtgccacgtccaagccggtttcgatggattccttgaccgctcgggtcttggcccggtccacgatgttcttgagcatcgcgccggagaccacgtcggccaggaacaacgcatgccactggccgttctcctcctgcacgtcgcatagatggcggcgttcggaggttccgtagatgtcatgcaccagcacggcggacaaggcgtgcgcgtcgacgccatcttccagaggcaggtcgtcggtgaggtaatggtccacgatggcgatggcctgattggttttgggccggtcgacgcgaatcttgacgtcgagacgccccggtcgcaacacagccggatcgatcatgtccacgcggttggaggcaccgattaccatcacattgtcgagtgattccacgccgtcgagttcggagaggaactggggcacaatcgtggtctccacatcggaggagacgccggagccgcgggtgcgtagcagcgaatccatctcatcgatgaacacgaccaccggattgccgtccgcggcgcgttcacgggcgcgctggaaaatcaggcgaatcagtcgttcggattcaccgacgtatttgttgagcagttccgggcccttgacggacaggaacacgcccttgacatgggtttcggccggactgattgcgccgtcgccattcgaatcgtaaccaccctcgcatagggcgttcgccacggccttggcaatcatcgtcttgccgttgccgggcggaccgtacagcagcacgccctttggcggcttcaaatcgtagcgctcaaacagcgcacgatgctggaacggcagttggacggcgtccctgatacgaccgatctcactatccaggccgccgatgtcggcgaacgtgacatccggggtctcctccagcaccagatccttgtcgccctcggcgggcagcacttcgatggcgaggcggacggacggatcgacgataatacggtcgccctgattgatgcccgcatacgcgagcgcgccggaacggcggatgagcacgggattgccggaggcgtcggtaacgatcagtcgaccgtcgtcaagtacctgcttgacactgcgaatctggcccacggtgtcagcatcgcgctgctcgaccagcacgagcttctcgttgagcatcacggtggctccggcggtcaggcgggcggcgttgacgttggaggccacaggcaccaccatgcggcgggtgccggaaatgacttcggccgacgcgtgctggatgccgtcttcatcggtgcgggtggaatcgaccttgaccatggtggcgaaggtgagcggcggctgagcgagctgggcgagctgtgacttcgccttggtcagttccttgccggcgcggctcagcgcttcggcgagcgcatggttcttggccatcaggcgatcgttcagcgcggcgagatcttcggtgtcgctcatgcgggttcttcgcttcccttctatccgggattttcggcaacttatggcagtcggcagaccctattcgttgccgtcggcggatttcctgttacgtataacagtacgcacttttcgcaccacgaaccatacgatgaccacaatcacggccgcgatgaccacgtcctcgaacacgccgagcgcgccttgaatcgagcaccactggtcgccgagcaggtaaccggcggaaacgaggatggtgttccacacggccgagccgagcagggtccagccggtgaagtgcaggaagttcatgcggttgaatccggcgggaatcgaaatcagcgagcgtaccacgggaatcacgcggccgatgagcaccgaccatgtgccgtatttggtgaaccagtcgttggctttgctcacgtctttgcggctgacgccggggattttgtctgccgcgagattgatgcgatgcaggcccacccagcgggagatgccgtacaaggtccaggcacccagtacggagccgatggtggcccagatgattgcgcccggcagactcagggtgccgcgtgcggcggtgaagccggcgagcggaagaatgacttcggacgggatgggcgggaagatggattcgagggcgatggccaaggccacgccgataccgccgatggtttccatcagcatgatcagccagtcggtgatggtgccgatcaggccgggttcggtggtggtgcagatgggtgtggggtcggttgcaagaatagtggcggctgccatggaaaaactcatagagggcattgtcccaaggttttcccagaatcagaagcatgacgcaagaagatgtgcattttgttgacaagtccgccgagagcgaagttgggagcccggctgattctgcggtttctgtgccgacgctgagcaagcccggcctgctggttatggatgtggactccacgctcattgacgaagaggttatcgacgagttgggcgtggtggctggctgcggtgaggagattgccggagtgaccgcacgcgccatgcgcggcgaactggagttctgcgatgcgctgcgcgcacgagtggccctgttggagggcctgccgatctccgtgttcgacacggtgcatgacaagctgcatttcaccaagggtgcactggagcttatcgacacgctgcatgaacacggttggaaggtcggcgtggtgtccggcggcttccatgaagtggttgacatgctggcggccgagggccatatcgactattggattgccaaccggcttgaggttgccgatgggtgcttgaccggcaaggtgctcggcgaaatcgtgagcaagaccgtgaagctgcacgccttgcaagcgtgggcggaccgtttgggtattccgatgagccagaccgtggctgtgggcgatggcgccaacgacattccgatgattcaggccgccggtctgggtctcgcgttctgtgccaagccaaagacccagctcgccgccgacaaagccatcaacgaccgcgacctaacccacgtgctcgattatctgcgccggtaaaattttaccgacctcggctccggcacttatagttgagccatgactacttcaggcgcagaacagttgacgcttgcggggctggctccccgcaagcggcgtaaacgtgcgcctgcggagcatacgccggccgagcagcatcccatagcgcaagtcgtgttggatgtgcaggcgctccacctcggccagacattcgattacttcattgatgaaaaagacagcgaggccgcacaaccgggtgtgctggtgcgcgtgcggtttggcggtcaaagggtcagcggcgtgatctgggcacgcaccgataccagcgataccccgcgctcttcgattcgctatatcgaacgggtgttgagccccgatgtgctggttcccgcatcgatgcgtgaggatatcggtctgattgccaaagcctatggcggcacacgggccaatattctgcgtttcgctgtgccaccgcgcgtggccaaggtggaggccgaacagcggttagccgcgtcgttccgccgaccggtcggcggctccctaccagataatacgcaaggcggttttgccgggcgtggcaccaatcccgatgggaccatgcctgctggctctacctttgccgttgccagtaccgtttcggagggggctgcgcaggggtatcgtcgtctgaccgccaattacgccgacgtcaatgtgcttcatgatgcgcttaccggtcagcgtttccaatcttttgtgtttgattcgctgcccggtgcacaggagtggcaacggaacatggcatggatggtggccactgcgctgagtgccggtaaagctgccgtggttgaattgcccaccatgcgcgaggtcgaagacctgatgcctatgctgcgcaattatgggctcaaaccgttcgcccctgctccggccggcggctgggtgggcgacgtcgccgtgcttaacgcggagaccatgcccgcggccgaccggtatcgcacctatctggctgtggcgttgggacaggtgaaggtggtgatcggcacccgtgcggtgatgtatgcgccggttgaaggcccggcgctgttcgccattctggaggatgccgcctatcagaacatggacggtatgatgccatatccacaggcccgtggcgtgatgcggctgcgcgccaagtcccatggcggcgtgttcgtggccatggccaatgcgcgcaccccgcaaagccagtgggaaaacaccggtccaggtacagtggagaccccagtgagcggctattccaccacaattcatccgctcgcctcgccgctgaaggacgccactccttgggtgcgttggctcaatcgcgatgaacttgcgcgtcttgccgacccgtccatcggggcgcgcgtgccgcatacggccgtccgcgtgctatctaaggctttggagagcggccccgtgctgctgtccattccgcaagacagcgtcagtgagactctgagttgtgcgaaatgccatcgtcaggcgcgttgtgccaagtgttccggaccattgcaactaccggccgaccgccgggactccacaccgcgatgccgctggtgcggggctgccgccatcaactggaagtgtccgggctgtgggcatgaacgtatgcgcgtggtgcgcgtgggtgctgcaggcactgcggcggagctggccggattgttccgtggcgtgccagtagttttgtccagcaagacgcagggcctggtgcgcgatgtggcttgtcagccgatgatcgtcatcgccactcccggtttcgaaccgcgcgtgcgtccggtcagtgccgagcagggatcggctggccatgagtatcgtgccgtggccgtgctcgacgcttggaccagcttgtatgcgttgggcgtggatgctcgcttggatacattgaccgcgtggatgcgtgcggtgtcgttgtgcgcgccgcgttcccgtggcggccaggcgttgattctcggcgaaaccgacccggccatcgcccaatcgctgatgctctgggattcgaggattcttgcagccaaggatcttgaggagcgtgtggagaccggtatgccgccggccgtggccgccgcctgcgtgtggggccgccgtgatgcggtgatgatgctgatgcagcgtatcggcgccctgggcggcgattggacggcctgcggcgagctgcccggcatgttgggcccggtgccgatcgcgcaaccggacacggtcgacgcccgggagctcgaagccacggccgaccgggtgaaggcagtaatccgtgtgccgcagagtcggcgagccgagctggcggcccgactgcaccgggaaaccgctcgtcatgtggcgtcccgcgaacccggcgagcttcgcttccgagtagatcccaaggacctgatctaatcgtcttcaacacgtgaaacgataattacagaatgaacatcgctagaaggaggacactatgaagggttggcctggagagccggatatggattacgacgtgctggtcgcggatggcgaggccgctgcgaacgccggcaagccgatcaccgacgtgatcttcgatttcggcaacgtgctgatttactgggatccggtcgccgtactcatcccccgctacagccagaagaccatcgacgaattcctcgacaacgacatctccggcttctacgatgtcaacgacctgatggacggcggcaccagcaccgacgaggccatcgccatcatgcgccgtgacaagggcgataagtgggcggacatcctcgactactacatcaagaacttccgcgactccctgaccggcatcgtgccgggcgcgcgcgtgctggtcaatgacctgaaggctgccggcatcggcgtgtggggcctgagcaactgggaatccagtctgttccacgtggccgaggaacagtgcgatattttgcagcagcttgatggcaagctcgtctccggttttgtcaagctgcgcaagccacacaaggaaatctacgaggccgcgttgaaccagttcggcatcaaggccgatggcgcgttgttcatcgacgacaaggccatgaacatcgtcggctcgaatgcggccggcatccgtggcgtacgtttccaggatccggtcaagctgcgtgaactgctcatcgccaatggcgtgaacattccggccgtgcagtgagcatcgacatttcaaggaggaccatgctcaaactcgtgttcgccggcacccccgacgtggcggtgccctcgctcaaggcctttgccaccgatccacgttttgatgtggtcggcgtcattacccgccccgatgcgcctaccggtcgcggccgcaagctcacgcccagcccggtcaaggctacggctctggagctcgggttgcccgtcatcgatctcaaaccccgctcccccgaattcatggaggcgttgaacgacctgcatgcggatatcgccgctgtcatcgcctatggcaatatcctgcccaataacgtgcttgatgcggtgcccatgggctggtacaacctgcatttctccaacctgccgaagtggcgtggcgccgctcccgcccagcgtgcgatttgggcgggcgacccgaccaccggcgccgacgtgttcaaggtgggcgagggtttggatgatggcccgatcgtcgcttccctgaccatcgaactgaccggccgtgagacttccggcgaactgcttgaccgtctggccgaggaaggcgcgcccatgtatgtggatgcgctggccgccgtaggtgaaggcaccgccacattcaccgcgcagccggccgagagcctggaatacgcgcacaagatcacggtgaaggacgcccgcatcagttggacggacgaggccgaggccatcgaccgtcagattcgcgcctgcacgccacatcccggggcatggaccgaactgtttgcggaagggccaatcgccgataatgacgagtcaaccgctaaatccctcgccctgcatattctcgccgcacaaccggccgaccagtccaatcccaacactccggccgagcttcagcccggcgagctgaaggtgggcaagaagaacgtgtgggttggtaccggcagcacgccgctggaactcacccaagtcaaggcgcaaggcaagaaggccatgcgcgccgccgactgggcccgaggcgcacgcctctcccccgccgcctgcgtgcgataacaagcaatatcgctcccgccttcggaagcacagtaaaggcccggcatcttcataaagaagatgccgggcctttcagctatgcaatcggcgatcagttgagaccggagagcttgttgatcagctccgggtcacgcgtcgcacccttgtcggccgagcgggcgaaggcggcgtacgccttcagcgcctgggagacgtggcggttgcggtgagccacgtagccgtcgccagcctcaagctcgcgacgacgctcgtccagctgctcgtcagtcagttcgacgttcacggaacgggcttcgatatcgatatcgatgatgtcgccgttcttgatgagcgccaccgggcccttgttggcagcctcaggcgccatgtggccgatggccagaccggaggaaccgccggagtagcgaccgtcggtgagcatggcgacctgtttgccgatgcccttgcccttgacgaaggaggtcgggtacagcatttcctgcatacccgggccgcccttcgggccctcgtaacgaatcacaagcgccatgccaggcttcagggtgtcgttcagaatgacctcgatggcctgctcctgggagtcgaccaccagagccggtccacggaacttccagatctccggcggaacaccggcggtcttgaccacgcagccgtcgggggccaggttgccgcgcagcacggcgaggccgccttcgtgaatctccgggtggttgatgtcgtggatggcgccgttggcgcggtcgcggtcgagcgagtcgaacagggtggtgtgcgtccacggctccggggagatgatgtggccaggagcggccttgtacatctgctgggcttcctcggtgcaggtcgggcgcatgatgtcccaatcggccagcttggcttccagcgtcgggtagtcgatggaatgcacgttggtgtgcagcttgccggcgcggtcgagctcgccgaggatgccggtgatgccgccggcgcgatgcacgtcggaaatctcccacttgccggacggcgaggccttgcagatgcacggcacggtgtgggaaatacgctcgatgtcgtccagggtgaagtccacgtcggcggactgggccatggcgaggatgtgcagcacggtgttggtggaaccgcccatggccacatccatggtcatggcgttctcgaaggcttccttggtggcgatggagcgcggcagcacggaatcgtcggaatcgtcgtagtactggtgagcgatcttgacgacttgcttggcggcacgcttgaacaggtccttgcggtaggagtgggaggcgaggatggtgccgttgccgggcagagccaggccgatggcctcggtcaggcagttcatcgagttggcggtgaacatgccggcgcaggagccgcaggtcgggcagacggtcttctcatagttgagcagttcctcatcggagacgctgtcgtcagcggtggcgtacatcacgtcgataaggtcggtgctcttgactgtgccgtcggcgagcaccgtggtgccggcctccatcgggccaccggagacgaacacggtcggaatgttgaggcgcagggctgccatcagcatgcccggcacgaccttgtcgcagttcgggatgcagatgagggcgtcggcgcagtgcgcgttgcactgatattcgacggtgtcggcgatgatgtcgcgggaaggcagggagtagagcatgccagtgtggcccatggcgatgccgtcatccacggccatcgtgttgaactcgcgcggaatgccgccggcttccttgatagcctcggaaacgatgcggccgaccttgttgaggtggacatggccgggcaggaactcatcgaacgagttggcgatggcgatgatgggcttcttgcccatgtcgtctccgctgacgcccgcagcacggtagagggctcgggcgcctgcaaagacgcgccctgacataatttttgcagatcgcatttcagtcatggttctattcaagcctttgcgagggacacgccatttgtcaagagtcgaataatggaatttgcaaaaacgtaatgtttctcacacatttttttggaatacattcctctggcgagagtccggtatagggctgacagaagtccccccaaacggctacacttgcttcggttgagatagattttccaatgtttggagataagaacaatggcttttggtactgacccgacacccgacggtcttgcgaacccgccgatcgacgatctgatgaagcacgccgattccaagtacgcgctggccattttcgccgctaagcgcgcacgccagatcaactcctacttcacgcagctcaacgagggcctgctgcagaacgtcggcccactggtcgaataccagaacaacgagaagcctctgtccatcgccttccgcgagatcgacgagggtctgcttgaggagaccttgggcgaggacgacgccaacgagggcaactgatcgattcagacgattcgtttggattgtttggacagttcgtcgccgaatgatggtgtgagagttctctcacaactgattttgagcgacacgcttgcctgagttatcgcaatcagctataactcatcatcaggagcgaacaagacgtaaggctcgagccaccgcgctggttggcacgggcctttatttatgcccgcttccgcagtgacaagtaaaaattgacaccgtatcattgtgcctcgcaccccgcggggcgataagtcctgaagaaagggatgatatgacagaagaacatcggcttatctccgccgaatccgtgaccgaaggccaccctgacaaggtctgcgatcaaatctccgacgccattcttgatgatctgctggcccaggatccgtccagccatgtggccgtggagacctccgccgccaccggcgtgttcctggtcttcggcgaagtcacgtccaaggggtactgcgacgtgcagtccaaggtccgcgaaaccctgcgcaacatcggctatacctcctccgaagtcggccttgacgccgattcctgcggcgttgtggtggccatcaccgagcaaagcgccgaaatcaaccagggcgttgcccgtctgactggcgatcaggagaccgccgccagccgcgaagaacgttacgaagcacagggtgccggcgatcagggcgtgatgttcggctacgccaccgacgagactccgacgctgatgccgcttccgatctatttggcacatcgcctcgccttccgtctgaccgaggtccgcaagtccggtgaagtgccgcacctgcgcccggacggcaagacccaggtaaccattgagtatgacgataacgataagcccgttcgtctggacaccgtgctgatctccacccagcatgatcctgaggttacgcaggattggcttgctgttgagctgaagaagcacgtgattgacccggtgcttgatgaggtgctgggttccaaggtgccgcatgacaactaccgccagctggtcaacccgaccggttcgttcatcctgggcggcccggcggccgacgccggtctgaccggccgcaagatcatcgtcgacacctacggtggcgccgcccaccacggcggtggcgcgttctccggcaaggacccgtccaaggtcgatcgttccgccgcgtacgccacccgttgggttgcgaagaacatcgtagctgccggcttggctcacaaagtcgagatccagatcgcctacgctattggcgttgccgacccggtgtccgtcaacgtggagaccttcggcaccgagcaaggcgtgacgcgcggccagatcgccgccgccgtacgcaaggtcttcgacctgcgccccgccgcaatcatcgacaagctcgacctgaagcgcccgatctacctgaagaccgccgcttacggccacttcggccgtaccgacgttgagttcccgtgggaaaagaccaacaaggtcgaggagctcaaggccgcgattgctgcggagtgaggtgctctaattaggacagaga

SEQ ID NO: 832 - DNA, 4691 bp, Unknown
  R14_18m  MAG No. k141_8083
tatccgaaacaccaatcgccgctgcgcccggccagcagcaatacgtttgggatcagacgacgcaaagcttccgcccggtggaaccgacagcgccggtgacgccagccgcaccagcggcaccggcgacatcgcctgtttcggcagcttcaaacgccgcgacacaagcgttccagcccagtcaggccgagcagcctgcggtagatgccgaggcaacacaagcattccggcctgatcaggtcatggcaacacagcttttcgaagctcaggccatgccgaatgccgaaaccgcggccacacaggcattccagcctaattcagctgcggccacacaggcatacggcgcatcatccaccgtatccggtgagaccgttgccatgccggcaacgcaagtagcgtctgccgatgatgctgcagccacacaggtgttccaaccggccgccctggctgcttcggcacaggctcagcctgctgtgatgcctccctccattccgttgaatcaggtctccgatgaggacgattccgctggcgccgagcctcgtcacggcggtagcggcaaaaagaacacccgcaaaatcgtcggcattgccgtagcagtagtcgccgtgatagcgctggttgtcgctggcctgctctggtggcattccaacagcagcaaggcgagccaagccgtggcactggccgagtgcaaggtagcggccaagcagtacacgaatgcgcagaagaagctcaccaccgccatatccaatggccaaaccagcgcgcaaacatccaccagtgatgtggccgatgccaatacgctcaccacgctgaatcaggcgttgcaagacgccgacaatccgaccgacaccgccaagtgcgattccagcctcaacgccactgagctgaagtctcacactaaagagctgcagaatgacgccagcgacatggctgacaagacggatgccatcaacaatgcgatcaaggccgttaatacttcaaaggcgacggccgataccgacacactgaaatcgaacctgagctcggctatttcgcaggcgcagggcacgctggataattccgcgggcagtgtggccgatgaaaacacccgcaccgcgctgcaaaacgccatcaccgaggccaatacggtgatgaacgggaccagtccgtccgaatccgacgtcaacaatgcgatttctaaactgcagaaggccgagtccgacatcaccgcctcgatgcaggccaagcagcaggcagatgccgccaagcaagctcaggaagaggctcagcggaaggccgaccaagaggcacagcagaaggccaagcagcaggcacagcagaagtctcaagacgggtccacctctactgacggccccgacggcagccacaactgaggtctgcagcgttctcccatttcccatggggcggtaacttccccatggggcggttagcgcattttcctttttcgcggaataatgccgttttcagcgaccgccccatgaggaaattaccgccccatgggataattaccgccccatgaggagccgtttggatatagcagtgggccgggccctgaataccagagcccggcccactgctatatgcccacaatcagggctattgcgatggcttaacgcttggctatcgcgcgtagcacaatcttgcgtagctcggaggcaatcagcacgattgcggccaggcagatgcattccacccaagccatcgggctcaatgccacggtgccgaacggaccgttaaggaacggcacgtaaatcaccacgagctgcagcgccacggacaaaccaatcgcgccccatagccacttgttggagaacagacccacgaatgcggactgcagatgcgaacgggaggccagcgcgttgaacagctgggcaaacaccagaatcgtgaagcccatcgtacgggcctcggtcatctgcgcttcatggccgatggcatccaccgagcggtcggtgaacaagccgccggataggtgcatgtccataccaatcagcgtgacgatggccataatgacgccgacgaagatgatgtcgccccacatggaggcgtcaatcacgcggtccgtcaccttacgcggtttacgacccatcacatcgtcggtctgcgggtccacgcccatagccaacgccggcgcggcatcggtcagcaggttgatccacagcaactgtgtggcgagcagcggcacggtgacgcccacggtttccggctggcggatgccgaggaagccagcaaacaccacaccgaggaacacggtgaacacctcacccacattggaactcagcaggtagcgcaggaacttgcggatgttgtcgaagatcacgcgaccctcgcgtacggcggccacaatggtggagaagttgtcgtccgccagaatcatcttggcgctctgcttggtcacttcggtgccggtgatgcccatggccacgccgatgtccgcggacttgactgccggggcgtcgttcacaccgtcgccggtcatggccacgatgttgccttgacgctgcaaggattcgacgatcttgagcttgtgctcgggggccacgcgcgcgtacacggacacttcggacgtggccttgtcgagtgcggcctcatcgggcagctggtcgagctggtcgccggtcagggccttgccgtccttggcgatgatgccaaggtcggaggcgatgcgggcggcggtcagcgggtggtcgccggtgatcatcaccgtgcggatgccggcacgatgggcctcggtcacggagtcgcgcacctcagtacgcggcggatcgataatgccgaccatgccattccagatgagatcggtttcgatggcttcggcctgatcggcgatgtcggacacctggcctgcggcgttgacgcttacaccgggcacatcagccaaagaactggtttccagcggacggcaggcctcgccaagcgtacggtaggcctcggaggagagacgttcgacggtggcgagaatcgactggcgatcgccttcggtgagcttacggacctgaccacccacgcggatgcgcgtgcagtagctcaacagcacgtcgggcgcgcccttggcgaacacggtgagcttgtctgaatcggtgctgtccttggcgatgatggacatgcgcttgcgttcggaggtgaacggaatctcgccaacgcgcgtgtatcgcgtgatcttgcgatcggccttgaccttgcgtgcggccacgatcagcgagacttcggtggggtcgcccacgatctcccagcggccgttctcctcgcgtagttcgccgtcgttcgcgagcgtgccggccacaagcgtggcgacgacttcatcggccacaatctgggcctgctcggattcaggactgacgccaccggtcataaccatgcggccttccggcgcgtaaccggtgccggtgatctgcactgcgccggacggggtgaccacgcgctccacggtcatctcgttgcgggtcagcgtaccggtcttatccgagcagatcacggaagcggagcccaaggtctccaccgaatgcagtttcttgacgatggcgttgtgcgcggccatacgctgcacaccaagcgccagcaccacggtcaggatggcggccaagccttccggcacggcggccacagccagcgagacggccaacagcaaggaatcaatcacgtcatggacgtcgtcgaagccttccagcacggcgagcgccaccagcaccacgacagcgatgacgcacaccgcgatgccgaggatcttggagacgtaatccatctccttttgcagcggggttttctcatcttcggtggcggagagcatgtcggcgatcttgccgacctgcgtgttcataccggtgccggtcacgattgcgcggccggtgccttgcgtcacggaagtgccgttgaagatcatgttggcacggtcgcccagcgccttggcttcggtgagtgtgtccggcttcttaccgaccggcacggattcgccggtcagggaggcctcggcgatgcgcaggctggccgcgttgaccagtcggccatcggcggagactgagtcgccttccgcaaggacgatgatgtcgccggggaccacgtcggcggtgttgatgcgcatgactttgccgccgcgcagcaccgaggtctgcggggccgtcatttgggcgagcgcctcgaccgcggcctccgccttggcctcctgcatgtagccgagcacggcattgacgatcagaatcaaaatgatcacgatggcgtcgaacggcagcacttcaccgccttccgcgccgggctgcgcattggccttttcgatgaaccatgcgatcaccgagatgatggtggccgcgatcagcaggtagaccagcgggtcctggaactgggccaggaatttcttccatttcggtacgggcggggcggtggtgagctcattcgggccgaatttggccagtcgacgcttggcttcttcctcgctcaggccctgggatgggtcgacattcagggctttggccacgtcgtcggcactggtcagacttggatcagcttcccccaatagcgcttcctgcgcgcgcacttcttccgattccacgacctcgttcgttgcggtcgcggacactgcggattgatctttgagatcatccataatgttctccttggtattgccgcggagtagtcagccttgcggccgctgccgggttttctctcccggctggacgcacaggactgcgcggttatggaca

SEQ ID NO: 833 - DNA, 5221 bp, Unknown
  R14_18m  MAG No. k141_8165
atggcatccgtgccgccatctgccttcagagcatagcggacaattgttgcattgcctaggcggtacaacgctttctgtggcctgtatcacatccttgccggcgttctgcggcgtggttgggcgtgtacatgtgctcttgtgcggttttgttgtgtgtgatttgggtatacggatagagtttcttctctgcagtggcaagggcctctcggccggcgagccggctgatttctcccatgcgttgctcaatgatttccgttttgcgagtctgaacggcaaaatagctctggagaagtgccacttcttctttctttggatcaccgttttgagcaatgagatagcaggcgtatcgggtgagcttgacgtccgcgatggagcgggtggcaccgctgccgagagtcacgtctcgcgtagtgtcacggaaatgggattcaacggatacgccggaattgtcgcaagcttgcttggctcgtgtaatagctttgctgaagttttcccatctgtcgtaccccatataggtcattagctcgcgtgcataccaatactcaactttggagtcctcggtggtgtgtgcgatagtgctgagttcgctggttttgcgtgtgatttcgtcgcagttcatgggtgtgtccttatgtttttcatgaccattttcgtgactccacgaaaatggtcaaagccaataattgcaatggttttgaggtatgggcgcgctccgcccaactggtctgtcttcgtccgccttttcgaccagatacctcatggagcacaatgccaacgtcgctaccgttggcccagcaaatattcttagacgacgccccgaagtgaatatctatgcggctttcagaatatcaaagagcgtggagtgtgtgcattatgcgttccaaaaatagtttctagtaatgaattgtttacggtgtgagatattcttggggatgtttgcggcgctctgccgtgtggcgaatgggaatggatggtgctcttatgggatttgagcaggaagcagttagtgaactgtatgccagcgtgtggggcaatcgttcgacgatgcagagggaattcactcgtggagcccatggtgagcagttcgtgctccgggagctgtccatgaaggggacgcaaacgccatcgcaattggcatcggcgctgcaggccagttccggccgcatctccactgtgctgtcgtctctggagaaaaaaggctgggtcacgcgtgacattgattccaaggatcggcgcattattcgcgtgaatctcactgattccgggcgcgagcagtctcatcggatgatagaggaaatgcgttccgcaatttgctggattttctcgcaaatgggggagcggcgcacgcgcgaattcgttgacctggtgtctgagttcaccacatatatgtcgatttgccatccggggcggcctcggccgacggctgaacaagtgcgtgaggcattcgtggagcgggacaagcgcgtggctgaacacatggcagctaagcgcgcggaggctgagcgagactagcttcctcccgctggcgggtctctccctccgtcactgctgcgcggtgacacctccctcgtcagagggaggtaaaggtaattgaggacgctcacagcgaacatacagaagtgcgtataatatctcacagtgtaagtaatcaaacaatggaaactattaagacatcgtgaaccgataatcaccgataacccagccaacttaagaaccaatcgccaataaccaataaccaacccaaccaacacaaggggaaaccaatgtttcgcatcatgaaatacctctccaaagcggagatcggtcagatgctcatcgccctggtgaccatcgtcgggcaggtctacttcgacctgaaactgcccgactatatgtcagacatcaccacgctggtcgagacgccgggcagcgacatgaaggacatctggatcgcgggcggcaagatgctgctcatctcgctcggatccgtggcgtgtgccatcatcaccggctacatcgctgcgcgcgtggccgcctcgttcacccagcgtctgcgctcgctcgaattccgcaaggtcgagtccttcggcccggccgagatgagcaagttctccaccgccagcctcatcacccgttccaccaacgacgtcacgcaggtgcagatgttcatcaccatgggcctgcagctcatcgtcaagtcgccgatcatggccgtatgggccgtgtgcaagatcgccggcgaaggcttcgaatggacgctcgccaccggcatcgccgtggcggtcctgctggtgtccatcaccgtcatgatggccatggtcatgccgaagttcaaggtcatgcagaccctgaccgacaacatcaacctcgtggcccgcgagaacctcaccggcctgcgcgtggtgcgcgcctacaatgccgaggactaccaggaagccaaattcaccaaggccaacaaggacctcaccgagacccagctgttcaccaaccgcgtcatggcgttcatgatgccgttgatgaacaccgtcctgaacggcctgatgctcgccgtctactggatcggcgcttacctcatcgacgccgccgggctcaaggacaagctcaccgtgttctccaacatggtcgtgttctccaactactccgtgcaggtcatcatgagcttcctgctcatgagcatggtgttcgtgctctggccgcgcgccgacgtgtccgcgcagcgcatcatggaggtgctcgacactgagccaatcgtcgagaacggcaccaaaaccgccgccgacgtggccaaaaccggccagaggggcaccgtggaattccgcaacgtcagcttcacctacccggattcgcgcgaggcgatgctggaaggcatcaacttcaccgccgaacagggccagacggtggcgttcatcggctccaccggctccggcaagtcgtctcttatcaatctcgtgccgcgcttctatgacaccagccaaggccaggtgttggtcgacggcgtggacgtgcgcgactacgacctgaaggccctgcgcgacaagatcggctacgtgccgcagcagtccgtgctgttcaagggcaccgtggcctccaacgtgagctacggcgatcagccgggcgacccggcggaggtcgagatggccgatacctccaccccggccgggcgcaagcgcgaggccgcgttgatcgccgctggcgaggccgcggaaggtgccgatataccggccgagcagctgaatcgcgtcaaggccgccgccgacgtggcgcaggccagcgagttcgtggcgcgcatggacggcgggtattccgccgcgatcgcccaaggcggatcgaacgtgtccggcggccagaagcagcgcctgtcgattgcgcgcgcggtgtaccgtcacccggaaatcctgattttcgacgactcgttctccgcgctcgacttcaagaccgaccgcgaagtgcgcgacgcgctcgcccgcgaggccaaggattccaccaagctcatcgtggcccagcgcatcggcaccatcatgaacgccgaccgcatcgtcgtgctcgacgacggcaaggtcgtgggtcagggcacgcacaaggaactgctcgacaactgcgacgtataccgccagatcgccgaatcccagctcagccagtcggagcttacggcgtaggggggcggcagcggtagctccccatgtcaggggctgagccgtaaagggaacagcccagtgggctgttcccaggcgaagacgagctgataagcgagcgaataaaacagcacagctgactgaggggtagtcgcgtacggcttctctccctccggcgcttcgcgccacctccctcatcagagggaggtcaatacggacttttaaggagtaaaacaaatgccaagaggaccaatgggcggcaggcgtgccgtcgaaaagccccatgatttcggcaaagtcatgggcaaactcgtgaactactgccgcaactatcttcccgtcatcatcatcgcgctcatcctgggcgcggccggcaccgtctgccagatcgtcggcccggacaagctcaaggacatgaccaacgagatcgtcaaaggtctgcccgccatcgtcaacggcagaccggtgatgaactcggtagatttcggcacggtgggccacatcgcctggactttggtggccctgtacgtgggctacgccgtgctcggctacgtgcaaagctggatgatggccaacgtcacccagcgcaccgcccagcgactgcgcgagtccatctcggtcaaaatcaacaaactgccgctcaaatacttcgacaaggttagctacggcgacgtgctgtcgcgcatcaccaacgatgtggacgccatcggccagacgctgggccagtcgctcggctcgctgattacctcggtgacgctgttcgtgggcgcgctggtgatgatgttctacaacaacgtgatcatgaccctgtgcgccatcggtgccagcctcatcggcctgatcatcatgatggccatcatgaagtcctcccagaagtacttcgcccggcagcagatggcgctgggtgacgtcaacggccacgtggaggagatgtacgccggtcacctcatcgtcaaggcatacaacggcgaggccgattcgattcgtcgcttcgagaagtacaactcggacctctacgagtccggctggaagtcgcagttcctttccggcctgatgatgccgctcatgaatttcgtgggcaacttcggctacgtggtggtgtgcgtggtgggtgcggcgctcgcgctcgacgggcagatcgagttcggcgtgatcgtggcgttcatgatgtatgtccgcctgttcacccagccgttggcgcagttcgcccaggccttccagaacctgcagcgttgcgcggcggccgctgaacgcgtgttcggcttccttgaggagccggagatggaggacgaatccggcaagtccgctttgcttgggaccaacggccacgaagtgaagggcgacgtggaattcagccacgtacagttcggttacgaaccaggcaagccgatcatccacgacttctccgcctccgtcaaggccgggcagaaggtcgctatcgtcggcccgaccggtgccggcaagaccaccatggtcaacctgctcatgcgcttctatgagatttccggcggctcgattgcgattgacggcgtggacaccaagtccgtgccgcgctggaacgtgcacgaccagttctccatggtgctgcaggatacgtgggtgttccgcgg

SEQ ID NO: 834 - DNA, 5782 bp, Unknown
  R14_18m  MAG No. k141_8281
gaatgaactggcaatcattgactataaagaagtagtacaaacacgctcttgagttctcaaaccaccaccactcacccacctcgcagctccccggaggagaaccactcgctgagcggcagcaaggaaataacttacacgcatgtttggattcgcgcaaatcgaggcgcgcaaaagcctcaggaatcgttgcaatcacacggttccttcggcgtgtcgcaaacagcctatttgcgctgttctgataccagaataatccgttttgcattgccgatgcgtaacaaattcatgcgttcaccggcgtgttgcaagaattcgattgcgtgaccatccaggttcaccttctcgcaaccggtcatcgcatatgcaaaaagggacttccctttacgggaagtccctttcagtagctattgaagctcgctagcctcaggccagggtgttcgggtcaaccggaacgcccgggttcatcgtggaggtgatggtcgccttggtcaggtaacggcccttcacggtggacggcttcagacgcttgacttcgtcggccacagccttgaagttctcgtccagagcggactcatcgaagctcatcttaccgatgaggaagctcaggttgccgttcttgtcgacacggaactcgatcttgccgcccttgatgtccttgacagccttggtgacatccatggtcacggtgccggtcttggggttcggcatcaggccacgcggaccgagcacacggcccagacggccgaccttgcccatcatgtccggagtagcaaccacggcgtcgaagtcgaggaagccgccctgaacctttgcgatcaggtcgtcatcaccgacgatgtcggcgccagcctcggtggcctcggtggccttcgggccacgggcgaacacgaggaccttggcggtcttaccagtgccgtgaggcaggttgacggtaccgcgcacgagctggtcggccttacgcgggtcgacgctcagacggaacacggcctcgacggtctggtcgaagttgtaggcaggcatgctcttgagcagagcgatggcctcgttggcggtgtagaggttgttgcgatcgacgcgctcagcggcttcgcggtacttcttggaacgctttaccatctgtccttctccttatcagtccgtaaccgtgatgcccatcgagcgagcggtgccctcgatgatcttcatgccggcctcgatatcgcgagcagacagatcttccatcttggtctcagcgatttcgcgaacctgcgccttggtgacagagccgaccttgtgggtcagcgggttctcggtacccttctcaatgccagcagccttcttcagcagagctgcagccggcggggtcttgagaacgaaggtgaaggaacgatcttcgtaaacggtgatctcgacagggatgacctgacccatcttgtcctgcgtctgggcattgtatgccttgcagaagtccatgatgttcacgccatgcgaacccagagccgggcccagcggcggggccgggttggccttgccagcctggatctggagcttgatcagcgccgagactttcttcttgggagccatattatggttcttctttctataacgcggttcgaatggtcgccgtcctcagatccgcttgcctgctatcacgctcggtcttgactcgttatttatccgtgcatgctgtaggcaatcggcctgtggtcggtctcctcccgcaacttatattgctgtgctgtgctagcgggtcttccctccagacacaagctttcctattatgcaaatccacccggacaacgcaaaaagcccgaccacgatggtcgggctctgcaaagtttggggttaatccagcttctgaacctggtggaagccaagctccaccggcgtatcgcggccgaagatggacacgagcacggtgagcttttgggtggtgggctccacgtcggaaacaacggcggccatggtggcgaaaggtccatcggtgacggtgacctgatcaccaacggcgtaggagacttcgaccttgcgcttcttggcggcggcaggcttgtcgccagcggccttgagtgcctcggaagcgatcatcggagccatcattgccacgacttccttgcgggagagcggggctggatccttggtcgggccgacgaagccggtcacgccttcggtttcgcgaacgatacggcgagcgttctcatccggccacatacgaatcagcacatagccaggaacacgtacgcgggtgatgatcttcttacccttttcggtgtgcttctcgacttcttccatcggcacctcgacctggaagatctgatcttccatgccgaaggaggcgacgcgggactcgatgttggtcttcacgcgcttctcatagccagagtaggtgtgcagcacataccacttgccatcaagggaacgcagggacttggagaattcgtcaacggcctgctgaccggcatcggtttcctcggcctgctcggattcgttgacttcttcctcgtcctcatccagagaaacggtctcggtctgagtggaagcaacgggagcggattcagtcacggccggagcggcggactcaacatctgcattgtcgacggatgcgtcagattctgcggaaaggtcagcaaccggttcagccggggcagctgcctcatcggcagcagcttcggaagcctcgacaacaggctcctcagccggcacggcgtcgagattctcgagattcagttcatcactcatgcgttgttattcaccttaggttgtgcggatcagccgaacacccacagcacgagcttgcccagaccgaagtccatgcccgtgacgagggccatcagcagcagcacgaagataaacacagccagagaccagaagaacagttccttggcagtaggggttacgaccttgcgaagctcgtcgatgatctgcttgataaacagaccgatacgcatgaagacattcggcttgactaccttttcgctgttgttcgtcttagccattctgtacctcgcgtcagctgcttgattattgaaaacttggcagggaaggcgggactcgaacccacaacctacggttttggagaccgttgcgctaccaattgcgccacttccctaggtgaaaatccacctcggcgtgcattccgtagagaacgcttcgccacggcgaaaccgccaagttgttatagtaacggctccggtggattatcgcaaatcgcgtgtcgcgcgcgtggcatgtgcgcggcacacgactcttctcagttagcccattccttgaatcgacgcatgccttcggctaggtcttcgtcggccagtgcgtaggagaaacgcaggtaaccgggagcaccgaaggcctcaccagggacggcggccacgtgggcctcatccaacagtgcggcggcaaaatcagcggacgtatcggacacagtgccgttgggccccagcggcttgccaagcaaagcggtgatgtccgcaaaagcgtagaacgcaccggtcggagtcgggcagttgacgccctcaatatcgttcagagcagccacgatcgcgcggcgacgtgcatcgaacgccttgcgcatctcatgcacctcgtccagcgggccagccacggcggccagagccgcacgctgggagatgttggccacattggaggtcatatgcccctgcagcttggtggcggccttggccacctcaagcggcgcgaccatccagcccacgcgccagccaggcatcgcataggtcttggccacgccgttcagcaccagcagctgcccgcggcattccggcacggcggcaccgatgtaggtggtgcgcgcgtcgtcgtagttcaggtgctcgtagatctcgtcggagataacccagatgtggtgctcgacggcccaacgaccgatcgcttccacggtttccggcttccagacggctccggtcgggttgttcggggagttgacgatgattgccttcgtacgctcggtacgggccgcttccagcgcctcaagcgagggctcgaagttcacgtcggcaccggcgaatacttcgaccggcacgccacccgccaatttgacggcttcaggatagctggtccagtacggagcggggatgatgacctcatcgccatcgttgagcaagatctggaaggattcatacacggcctgcttgccaccgttggtcaccacaacctggtcggcggacacctcgtagccggaatcgcgcagcaccttagccgcaatcgcttcgcgcagctcgggcaggcccggcgtaggcgtgtacttgtaattctttgggtcaaggcaggcatctgccgcagccttgaccacgtttgcgggggtcgggaaattcggttcacctgcgccgaagccgataacgtcaagtccggcggccttcatggccttggccttggaatcgacggcgagcgtagcgctcggtgccacagtgttgatacggtcggaaagagtctgccattgcgccatagtcatggcttccatgctaaacctacagcacgaaaaatcgccagagccgcactatggtgatgaaacctgtcgtgtgacagatcccatcagtcacacaagtacaagattgtcgcgatgaaccagtgggtgggcgtactgggggccgaggaaacgcttgagttgggcggtgttacgcccgagcatctgcggaatttcttcggaatcgaagccggcgaggcctcgggccaggtgttcgccgctttcggcatcgatccagaccggatcgccggcggaaaaatcgccatgcacttcgagcgcgccggccgccagcagcgaggcacgcccgccgcgaatcgcctggccggcacccgcatcgaccacaatagtgccgcgcgggtcggcggcgaagccaatccacagacgacgcgacgaaccgcgggccttaaccggtgcgaacacggtgcccactggatcgcccatcatcgcagggcccgcgttcgaggcgcaagtgagcaccgtggggatgccggagacggccgccacgcgcgcggcctcaagcttggtgaccatgccgccggtgccgaccttggagccggagccggagacttggatgtcgccaagtgcatcgataacgttcggcacatattccacacggcgggagccgggctgcgagggcggtgcagtgtacagcgcgtccacgtcggtcagtagcaccaaggcttcggcccgcaccagattggctaccaatgcggacagacggtcgttatcgccgaatcgaatctcgttggacgccagcgaatcgttttcgttgataatggggaccacaccaaggtccagcaatcggtccagcgtgcgttccacattgcggtactgggtggcacgaatcgtatcttcggcagtgatcagaatctggccgacgcgaataccgaaacggccaaaagcagtctcgtagcgagccataagcaaaccttggccgaccgctgcggtggcctgctgagtagccacgtcggccgggcgttcgtcaaagcccagcgggccgaagccggccgcaatagcaccagaggaaaccagtactacacgcccgcccatcagtcgtatttgggcaagggcggcggccagagcgtcgagcttgcctggatcgaggtgaccgctcggctgcgtcagcgaactggaaccgaccttaacgacgatggttccagcggatgcgacggctcgccgcacctcggcctgactcggagtgctcatttattcctcggtttcaccatcttcgctggactcaccgtggccgaacagactggtttcgtcatggcgatcgtcgtcaacggtcgggtcggcccagtggccggccttgcgttcggccatcatcgc

SEQ ID NO: 835 - DNA, 18550 bp, Unknown
  R14_18m  MAG No. k141_8508
aaggtgatgtcatcgatggccgctctggcgtacaagccggagccgccgacgagaatcggccggatgccacgtgattgcaggtcggcgatggtctcgcgcgcaagctgctggaatcgggccacgctcatcgtgtcttcggggtcgatgatgtcgatgagatgatgcggcacggccgcctgttcttcggcggtgggtttggcggtgccgatatccatgccacggtacatctggtaggcgtccgcgttcacgatttcggcccgctcccccgcttcggccagacgccgggcgatggcgatgcccaaccccgtcttgcctgacgcggtgggaccgacgatggagacgactcgttgcgtcatatacgccccctcagtgccgcacggaataggtctgtccagcggccacatcggggtcggcaagcagattatggcggccggcgtgtgtgacggtgaccgtgacgaaatcgccgatttcaggtaccggttcgccttcaggcacgccgatgtgcaccagcacgccggttttctcgcggccggtgacacggtgggtgtcggtgtccttcttgccgagtttgccggtgatcatcacttcgacgtcgcggccctcgaatgtggcgaggttctcttcggtgatctgctcctgcaacgccaccagtcggtcgaaccggtcctgcaccacgtcgcgcggaatctgttccattgcggcggccggcgtgccggggcgtggcgagtagatgaacgtgaacgccgaggagaagcgcgcctggcgcaccacgtccatggtctgctggaagtcctcctcggtttcgccggggaatccgacgatgatatcggtggaaatttgggcgtcgggcatggcctcgcggatacgaccgaggatatcgaggaacttggcggacctgtaggagcggcgcatcgcgcgcaggatgcggtcggaaccggactgcagcgggaagtgcagttgatgcatgatattcggcgtttcggccatggctgcaatcacatcatcggtgaaggcggccgggtgcggcgaagtgaagcgcacacgttcgagaccgtcgatggttccgcaggcgcgcaacagcttgctgaaagcgtatcgatcgccaataccataaccaaacgagttcacgttctggccgaggagcgtgacctccttggcaccatcggccacacattggcggatctcatcaagaatgtcaccggggcggcggtccttttccttgcctcgcgtggtgggcacaatacagaacgtgcaggtgttattgcagcccacggaaatcgccacccacgagctgatgcgggaggcgcgggcggcgggaagctggctcgggaactgccgcaattgttcagtgacctggacctgcgccttgccggtcgcacgattctgatccaatagcttgggcagatcttcgatgttcttggtaccgaacaccgcggaaacccatggcgcagtatccgcgatcttcttgcggtcaagctgggccatgcagccgccaacggcgatctgcaggttcggccgaaccagtttgacgcgattgaatcggccgatggtgccatacatgcgttcggctgcgttctcgcgtaccgcacaggtattgagcaccagcaaatcgaggtcattgtcattgatctggtcctcggttgcagggacgtagccattggcctccagcacgccggcgatgcgctcggaatcgtgcacgttcatctggcagccgagcgtgtggatatggaatacgcccttgccgcgctcccccaacaagctatcggttccatcggctgcaatcgaggcacgctccgcctcggtcatcatgtcttcattcataacgaccgattctatcggcggggttcgtcatgctccggtcacgtatgccattggttgtcacgatcttaaatatgggttcttggaaagattccccgcgaacatccagattgtctggaatccgccgagtatattggtggacgtgatacttgaccgacatagccgactcaaaacctccgatctgcaagcccgtctcaaagcgctggatcttccgggaggcaccttcactcccgaacaggtcgttaaattcgttgacctcatgcaggtgtatgaaggcgcgatgtacgagatcagcaccaagctggagattctcgacgacgagttccaggtgcggttcagccatgacccgatacatcatatggaacgccgtctgaagtcggtgagttcgatcattggcaagctggagcgcaagaatctgccaatcagtgtcaattcgattaaggacaatctgttcgatgtggccggcatccgcgtgatctgtaattaccgcgacgacgtgtattccgtgtccaactatctgtcgtcgcagtccgatattcaggtgctgcgcgtcaaggactacatcaagaacccgaaacagaacgggtatcgttcattgcacgtaatctacgcggtgcccgtgtttctctcctcgggcgcgcattacacgccggtggaggtgcagttccgtaccatcgccatggattattgggcgtcgctggagcatgcgctgcgctacaagaccgatttgccggacaacaagctcagcgagcattcacagacactgctcgactgcgcccgttcgctgcagaacatcgaagtgcaaatgcagaacatccaccgcgacatcaacggcgcgccgcaagtgggtgaagcgcctaagacctcggactgaggtgctatggaatcggcctgcgtccgattcattcaccgttgcagccacttcggcagcctggccggcgcttgggccagcagggtgccgaggaagatgagggcgcagccgaggtagccgcgcggggtcatcacttcaccgagaagcaacgcaccacctaccgccgagaagaacgattcgaggctcatcagcaggctggctcgcgtcggtggcacccattgctggccgaccacctgcaaggtgtacgcgatgcccaccgagccgatgccggcgtacaggatcggaatccaggaatgagcagcgccggcccagtcgaccgagccttcgatcagcgaacccgcccagctcagcacggcggtggtgcagaactggccgaatgaaagcttgatggcgtccacggtgccgcccaaagtatcgatcaccagaatatgcacggcgaacagcacggccgtgaacacgagcaggatatccgccaggccgatcgaaccgaaaccatcggtgatgcacagcagatagaagccggcgatggacagcaccacggccacgaacaccagcatgccgatgcgccggcgcaggaacacgcaggccagcaacggcaccatcacgatgtacatggcggtcaggaatcccgcgcggccggccgatttgccgtacagaatgccatactgctgcagggtgctggcggtgaacagcacgatgccgcagatcacggaaatgaccaccgggttggcgagcaatcgcgccacggccgaatcgggcttgttcgcattcagcttggcaccggtgatggtaacgacgtcggatgcgccgttcgatgcggcatctgtggagacggccctgggggcctcggtcccaacgacatcgaccccggctgtatcgcccttatccgcgctcccccggccacgctgccacagcagaatcggcaccaaagacagtgctcccagcgtgaagcgcgtggcgttgaagaacatcggcgacatcaaatccatgccctggacctgcgccacgaacgcaaaaccccagatcagcgcggtcaacaacaggctcagcatgcctacgagttcttgtcttttcacggggagacagcctaacgtgcgaatgtgacagacatgaaaaagcccggccacaatgtggtcgggctgtgacgtttgacgagcaggctacatgccgcccaccaatcggctggcgaggctagtccctgttgccgagcagctgcaggatgtacaggaacatgttcacgaagtcgaggtacaggttcagggcacacaggatggagatcttcttgaccatttccgggccctgggcctcgtattcggtcagcagcgcgcgcgtggactgcgcgtcgtagatggccatgccggcgaacaggatcaggccgatggcgcagacgatcttggtcatgccgtcgacctgcacgaaggcgagcacgatctgcgagatgatgagcacgatcaggccgatcatcaggatcgggccggccttgagcatgtcgaacttggtagtcatgccgaacatggtcagcgcgaagaagaacgctgcggtgacaccgagcgccacgccgatcgagccgaggtcgtagaccatgaagatcgagctcaaggtgaagcccatcaatgcggcgtacacatagaacatgacgcgcgcagtggccgacttcatcttggtgacgcgcatgccgagcaccacggccagggcaatctgcaccacgcacaggccgatgaggcccaccatgccggtggccatgaggaagctgtagtaggctccggtgatctggccgagcacggcgaccacggcggtgacgaggatgccgatggtcatctcgccgtacaccttggctacggagacgcggcgggcctcctcatagttgtaggtcatcgtcgtgttgatggtggcggcacccgcgccggcaccggccgcatcctgcggcgcgtactggtaggtgggggcgccctgcgactgggcatagtagttctggccgtaaccggactgtgcgtattgctggccatatccagactgttgggcggcgttgtaatcaggcgtgttgtattgcgggttgtattgcccgttgttctggggctgctgaccgaatgtcataatcgctcctttagcgtttgttccagtaccaatcttagaggaacaaagctgaacattccatgaataggatcgatcggctcgttctgctcatcgcaaagcgtaacgggcgtttccaccatgcgcagtgacatacaccgtaatcggcgaatcgtcttgcagtacatagcccaacgccgaaatcgcctcccgtatgtttatctcggagcgtacggccaaggcgcatctctcctccgcggcggacaagctcaatatgggccgcgtacagatggcgaggctggtggagcgggccgatttgccggcgcgactgtaacacgtccggttatcgagccatatcagtcataatggagaacatgagtgaagcgattattcgaacgttacgtaaagacgattatccggcgctgatcgacctggtgcgccgcacttggtacgccgaatatgatgagcggaccggcttgctggcagccgaggccgattgggagaactgtctggcacgtgtgaccacggcctttgtcgcggagctggaagataaacccgtcgcattgattgtggggcgtatcgacgagctcgaccatcgcagcccgctgaacatgcaccggcgtcattcgttgcgcaagctattgcaactggcgtttgcccacgacggcatggcagctgcgagcgagattctcgggactcttcatgtcgataggcaactgcgtaagcaggcggcgaacattggccatgagtattcggctgaagtggtgctgttcgtacttgatccggcggcgcgcggtcacggtctgggccggcgcatgttcgagacgatgatgagcgcattccacgcagccggcatacgtcagtacttcctattcacggataccacgtgcgatgtcggattctatgtacatcgcggcctgacgcaggtgtgcgagcagtcactgcccgcatccgggccgggagaaaacccgtcttcgttctacttgtacgaggggtcggtgcccgagccggcgtgatgcacccgccgccgggcgaacactggtaggcttgagcacagtcggcacgtcggcataccgtccaaaggccggcgacgaagggattgacatgccaatcagcgcgaaggaactaccactcgggaaagtgttcaccccggatttccggttcacaatcccctcattccagcgggcctacatatggaaggccgagaacatcctgcaactggtaagcgacttggacgacgcctgcaagtcacccggtaccccgtacttcctcggctcgctgattctggtacgcgagggcgacaaccgttatgacgtgatcgacgggcagcagcggctggtatccctgtcgatcatcatcgccgtgctgcgcgatctggagcgagacccggacctcatgcgccaactcgacgcgctgctggtggagcccggcgacaagctgcgcggcatcgtcaccgagcctcgcctcacgttgcgcgagcgcgacgcggcgttcttccgcgaacacgtgcaggaggacaacctcgaatccgtgttcgacatgaacgacgacgatctggcgaccgctgcgcaacgcaacatcgtcgccaacatccgcaagacgtacgacgagatctccaattggtcggcatccgaacgccagcaattcgcgcagtatctggtcaacgaggtgacgctcgtcatcgtgaccaccgacgatctcgacggcgcgcatcgcatcttcgacgtgatgaacatgcgcggcctgccgctcaccccgtccgacgtgttcaaggcgcgcgccacggccagcctgtcgaccgccgaacttgacgtgtacgcagcccgttgggatgacatcattgacccgcttggcgacgatccgcatgactgtgaggaattcttcgcctatctgcatctcgtactcacgcacaagccggccaccgacaagctcatcgaggatttcctggccgacgtgctgcaaccgtacatcgacaaaggcacggtgcccacgttcatcaaccaggtgctggcaccctacgcgatggcgtggcggatcatcgcgcgccccagcgataccgtactgcccgccgaggtgcgtagccggcttgagggattggacgattaccgcagccacgagtggaagcccgtggccatgtgggcgttggtcaattcgtatcgcgggctgggcgacgccgatttgtcgccgtttgtggttcgtgcctcgcgtaccgacagaaccacggccacgctggaatcgttgggtgcccatgacgagcgtcggctgttggaaattctgaccgcattggaacaggtgacgggcatccgtacgctgaatcgcactggagcgttggagcggcgcggttatgcgaacgccgccatccgtgatcttgacaagggctatttggtccagcgcgtgaacgggttgcatgtctcggacggcgaccgtgaaggcgcattggtccgtttgcatggcgagatgcagggtgacggcgatttggtccgtctgctgctgattcgcgccaacgagcagaaggccggcatgcagttggatcgaccacgccggttcagtgcgctgccgattatgccgttggatatcgaacggtcgaaatcgtttgcggactggccgcaggatcagcatgatttctggatgtaccgactcggcaatatggcgctggtgcagggccctgaggatcagttggacaggttgagtgaatatccggcacgtcgcgaccgcatgctgttgcgcgcggattcacgtcgtttcccgctgaccaatcagttgaaggatttcgctgactgcacacctgccctgctggaggcgcggcaggaagagtcggtccgactcatcgtggaatactggggcatccggtatgacaaggacgcccgtgatctgaccaagcagaatgtcgatgagttgtcgaagacctctccacggccgtctcatagttcgcggcgcgtcacgatccggcaggtgattgacgctggtctgctggtgccgggcgagcgtctggtgtgggagcggccgcgcaagggcgagcgctggttcgccacggtcaccgaaaacggtcgtctccgtctggatgacggctccgaatatccgactccgaccgccgcggcccgtgccgccgccggaggacgtcgcggcggcggtctggacgtgtggaagcgcacgcgcaacggtcagaagctcagcgacatctggaagcagttccgtctacaggcgcagtaggctacagtagccggcacatcattggtggctcccctccgtgaggggagccacacgctcatttattccagcgccgccacgatttcagccggtgttttgcaatattcgggaaaatgactgattaattcggcatccgatgtgaccacacagttggcaccggattgttgcgcggcaacgatgatcagatcatcttcaaaatcccgatgccgtttttgcagggaaaaagccctatcacatgtcgactcatcgacagcgacgatgtcacacacctccttcacctgctcgatacaacgccatggcacccgtgacgacagaaagccgcgagtgaaattctccacttccgattcattcggtttgaattccctacgaatcgccgatgatgataggtatgcgatatccttcagcgacaatgacgcgcacaacaacgtaacgttgttcttcgcgccaagttccataaccgcttccgccatcttggcgtgatcatcgcgatggagcaaatagtccaacagtacgttggtatcaagcaaaatacgctgcatggaaacgtcggtcatcaatcggccctcttcatgttgtaatacgcatcaagttgctcgtcgtacattttgtcgcggaactgcttgtaggtaaggccttccatgaggtcggtgccttctgagatcagtccggccttgaccagttccttgtgcacgtatccggcaccttctcgaatcagtttcagcttgcgctgcttttcctcctcgcgggcttgctcttcggcggtcgtttccaatgccggcacttccttgcggtcggcgatgtataaccacagcgaccggattacgtcactcaccgatacgcctttgcccttgaggacttcttcgacctcgttcttcagtttcgcatcaatgcgaacgttcatttggaccatggtcatggcaacctccatttcgaagatgctatacagtatagcattttggcatgcatggaaaaggccggtatccgttggcggataccggccttgctcccctcagtcagcttcgctgacagctcccctcaagagaggggagccaagaaggtggttacttcatgaggttgcgcagcacgtactggaggatgccgccattacggtagtagtcggcctcaccgggcgtgtcgatgcggaccaccgcgtcgaactcggtcttggagccgtcctcgtgggtggcggtgacgtggaccgtcttgggggtcacgccctcgttgagcttctcgacgccggcgatatcgtaggtctcggtgccgttgaggcccagggactcataggattcgcctgccgggaactgcagcggcagcacgcccatgccgatcaggttggagcggtggatgcgctcgaagctttcggtgatcacggccttgacgccgagcatcaccgtgcccttggcggcccagtcgcgcgaggagccggtgccgtattccttgccggcgagcaccacgagcggcaccttgttgtcgatgtagtcgcgggaggcttcgaagatcgtggtcggcttcttggcgaggaagtcgtaggtgaagccgccaggcgtcacctcctcgcccacggaggcgagcagctggttgcgcagacggatgttgccgaacgtgccgcgcaccatgatctcgtggttgcctcggcgagaaccgtaagagttgaagttcttcggctccacgccgcgctcggtcaggtacttgccggccgggctggaggccttgaacgcgcctgccggggagatgtggtcggtggtgaccgagtcgcccaggagggccagcacacgggcgccgtggatatcagcgaccgggtccggcttggccttcatgccgtcgaagaaggtctgcttgcgcacataggtggacttgtcgttccacgcgaacagctcgccttccggcacgtcgaggcccttccagcggtggtcgccgtcgaacacggaggcgtagtccttgaggaacatctcgcggctcacgctgccgtcgaccacggcggcgacctcggcattggtgggccagatgtccttcaagtacacgtcgttgccgtccgcgtcggtgccgagcggctgggtctcgaagtcgaagtccatcgtgccggcgagcgcgtaggcgatgaccagcggcggggaggccaggtagttcatcttgacgtccgggctgatgcggccttcgaagttgcggttgccggaaagcacggcggtgacggtcaggtcgttggcgttgatcgcctcggaaatctcgggcagcagcgggccggagttgccgatgcaggtggcgcagccgaagccgacgagctggtagccgagtgcatcgaggtcgtcctgcagccccgcggccttgaggtagtcggccacgacctgcgagccgggagccagcgaggtcttgacccagggcttgggcttaaggcccctggcatgtgcgttgcgggcgatcaggccggcggcgatcatcacggacgggttggaggtgttggtgcatgaggtgatcgaggcgatggccacgtcgccgttttcgatgtcgaaatcgccacggaagtcggtggacacggccaccggatccttgacggtcttctcggtctcgtaggcgggggcggtcttctcgaacatgctcttggcttcggacagcagaatacggtcctgcgggcgcttcgggccagcgatggacggcaccacggtaccgaggtcgagttcctcgtattcggagtactgcggttccacgtaatccgggtcggaagcgtcgccccacagcttgttggccttggcgtaggcttcgaccaacgcgacctgctcttcggagcggccggtcaggcgcaggtagtcgagcgtgacattgtcaatcgggaagatgccgcaggtggagccgaactcggggcccatgttgccgatggtggcgcggttggccagcggcacggaggcgatgccttcgccgtagaattccacgaacttaccgaccacgccgtgcttgcggagcatgtcggtgatggtcaggaccacatcggtggcggtaacgccctccgggatggagccggtgagcttgaagccgaccacgcgcgggacgagcatggagatcggctggccgagcatggcggcctcggcttcaatgccgccgacgccccagccgagcacgcccagaccgttttcggtggtggtgtgcgagtcggtgcccacgcaggagtcgaggtaggcgagcgtgttgccgttggcctcggccttgctcatgaccaccttggccaagtattcgatgttgacctggtggataatgccggttcccggcggcaccacgcggaagttcttgaatgcctgctgaccccagcgcaggaactggtagcgttcgccgttgcgctggtattcgatgtccatgttttgctggaccgcgtcggcgatgccgtacttgtcgatctgcacggaatggtcgatgaccatatcggactggacctgcgggttgatgacctccgggtcgccgccgaggtccttgaccgcgccacgcatggtggcgaggtccacgatgcagggcacgccggtgaagtcctgcatgatcacgcgggacggcgtgaactggatttcgtggctgggttcggcgttcggatcccagtcgagcagggtcttgacgtgctcgtcggtgatgttggcaccgtcgatgttgcgcaccagattctcgaccagtaccttcagcgagtacggcagatgatcgatgccgtcgagattggcgatgttgtagtaatcgaagtccttgccggctgccttgagggtagccagctggtcgtcgcgtaaggacatgcttcctccgaaatcatgaatcggcttatgatgccgctgattatccgctacacatggtacgggcacgttaccgaggctctggcgtgtcggcttgaagtatgagacaatcgcgccgccgtctcaatgccgacgcgagagcttgcccgtcagtccgcgcacgagcggcgccagccacaggcacagcgcgaagatcagcgcggaaccggccaacgcgatcagcgtggccaccatcgtggcgccggtcggcagaatcagggcgaagaagttcgccacgaacgggacgaacgcgccgatcacgcccgccgccgcgaacaccgccaccagcacgccacgccaaccgttgagtggtctggccacgcgggccagcacgaacacgcccatcgcgaacaggatgatggcgctggtggcgcgcagggcggacaggtccgcggcatcgccggtcacgttccagcccatgaccggcggcagcacccaagcggccagcagcaccgacagcgcggtggcgatgccgcccggcagcgcgaacgtgaccacgcgcttgaggaatcccggaatatagcggcgcgtgttcggcgcgagcgccaggatgaacgcgggcatgccgatggtgagagcgccgatataggtgatatggcgcggcaggtatgggtatgggatttgcgtcagcactacgccgagcgagatcagcgcggagtacacggttttgacgaggaacaggctggccacgcgctccatattggccatgacctgacggccccgcgccacgacgtccggcaggtgcgagaacttggaatccaccagcaccacctgggccacggccttggtggcgggcgccgcgttgcccatggcgatgccgaggtccgcctccttgatggcgagcgcgtcgttgacgccgtcgccggtcatggcaaccacgtggttctgcgtgtgcaacgcctgcacgatggccttcttctggtcaggcagcacgcggccgagcacatcgacgttttcgagcacgcgggccagttcgttcacgtcctcgggcagttcgcgcgcgtccatcgccaccggctcatggtcgcctgtcagtttcactctgcgggcgatggcacccacggtcactggattgtcaccggaaatcacacgacagcgcacaccctgctcacggaaccaagcgagcgtccgctcggcgtcctcgcgaatcttctcagagcacaacaccaacgccaccggctcagcctgcacatccagttgcgggccgtccgagacattggctccctcaactgctcccctcagtccgcttcgcggactgaggggagctgtagaccgcgcaacaagcaacacacggttgccgtcattggcatactcgttaacctgctgcaacaccgacgaatagtcaccctcaagcgcagaaataatcacctccggcgctcccatgtaccaggtctcgccggatttacgcaccgcactccatttgcgcgccgaagagaacgggacacgagactcaaccgcacctgccccatatccttgggccttgagcccggcgagtacggcttggccggtgccgttgggctgctcttcgttgcagcagtcgtagagggcctgcgtggctgcctgttccgcagccgcattggcggaatcgagcatcacgagccggttgaaggcgataccgccatcggtgatcgtgccggttttatcgaggttcagcgcgtccacgcgagccagtgtctccacggattcaagctcctgcaccagcgtattgtgacgggcgagacgcatggcggccaccgcgaagttcagcgaagtcagcagcaccaagccttcgggaatcatgcctactacgccggcgaccgcggaaaccacggcttgccgccattcgccggtggagagtgccgtgccccaaccgccgaccgtatgaatctgcgaaagaatcagcagaatacacagcggtaccacgaggaaggtcatgaatttcagaatcgtgttgatgcccttgttcaggtcggacacggttttcttgtataccttggcctgcgcggtgagcgtggcggcgtaggaatggctgccgaccgcattgaccttgaccaatgccatgccggagaccgcggtggcaccggaatacacctgctcccccaccttgtggcgcacggtacgagattcgccggtgagcatggattcgtcgagttccagtccccaggtctggatgatctgcccgtcggccggcacctgttcgccggcacggatccacagcaggtcgtcgagcacgatctcgttgtggggcacctccacgtccctgccgtcacgatgcacgaggaattcggaggccacaaggatggaaagcttatccaacgtgcgcttggccctgagttcggtgacgatgccgatgcccgtgttgatgatgatgacgaaaccgaacaccgcgtccctccaggaaccggtgatcagcaccagtaccatcgcggcgaagatgatgccgttgaacagcgtgaatacgttggctcgcacgatatcttgaaccgaacgcgaggtggatgttttcaccgcattcgattggccactttcgatacgctgcaccacttctttggaggtaagaccggttgctccgatctcaggcatttccacggctgttgttgcactcatattccccagcctaccgcgtcttgtttcgcaatccgctaaggctcagggatgattcagggtgctttctcagcttcaagggcctgattcggctcaggaaacggtgactttgatctcgcgttcgtggggttcgtcgcgcgtgatggtgagcacggcgtcagtaatagtcattggcttggtatcggcagtgtcgccagaatcggcactgttggtgttgaggtgaaggatgacggcgtacagcagttcatcttcgggcgcatgctttggatcaatgagagcgactggaataccggcttcacgcgcattggtcaacgtctggttccagctctcccggttggcgtcggtaacgtcgatgccgctgataaccacgattttgaccgcgcgagctacgaaatcggcaacaccctgctgtgcggtggccgcattcttgtcgacgccagtatgagcatccatactatcggcaccgttttcgctggtagtgccggcgtcagaagattcggtttcaccggatacgccatcagttgcgtttgccgagcttgcggatgtttcgagcgaggcatagtagacattgagtttgtcatcagacagcgcattgatggcggacttgtctgcggcggtgtcagtcgagcccacaaagccgactgtgacatccgtgggatgtgtggaatcgtgggcgacttccggcatgctgtcttgggtatcgccgaccgccctaccggccggcgtgcaggcggccagggacaacacagccgccatgcaggccagcaatccgagaattcgtcgtgtcatatgctcacctgtcagcgggtaaacagggccaccgtctcaacatggtgggtcatcgggtagatgtcgaaggcacggatgtctttgagctcgtagccttcgccgatgagtgtcgcggtgtcgcgtgcgaggctggtgggatcacaggcgatgtagaccacgctggatgcgccggccgcggcaatctggcggcagaccttggcacgagcaccggcacgcggcggatcaagcactacgacattcggcttggccagatgcgccggcacatggtccagcgtgcgcgagacgtcacccgcgcgggcgtccacgtcgttcaggttcatggcgcgcagattgcgctgggcgttcttgacggccacacgcgcgccttcaacgctgagcatgcgggtgcgttcaccggtcattgtggccagcggcagggtgaacaggccggaaccggaatacaaatcccagattacggcgtccgccgctgactgcagctgcccgttgaccaggttgatcacgtgcgtaccgagggcgatcggcgcttggcgatgcacttgccagaaaccgttggcgtcaacctgatagtcgaaggtcgtgccgttgatggtcacctgttcggtgagtagctgggagccggcgcgcagttcgccgtccacaagtacggcgtaattgtcgtctgctgccgcggtatcgacgatctcgccgcgcggttcgggcacggaaagacgaatctgggagccgggttcaaagccgccttcccacacgtgttcgcgcttggcgacgtccagcagcgtgcgcgtggcaagcggcatggtgtcgatggccacgcggttgtgtgtgccgcgccggcgcatggatggcatgccgttgtcgtcggcaatcatttcgatgcgggtacgccaattgaggccgccggctgccttgtcgccgggcatgcgctcgatgggaacggccacgtcgatatggccgagtcggctcatctgttcggagacggtgatggccttccacttgagctggccgggcaaagagacgtgcacgagatccgcgccgcccactcccccgcccatcgccaagggaccggcaagtggccatgccggggtgactcggtcttcggacggctcgagaacctcgacgacttcgccggtccagaaccggtcgtcccggtcgtggggctcgtcaagttcgactcgcacgagttcgtcgggcaaggcgaagcggacgaacaccacacgaccgtcgatatgggccacgcagcggccttggtcggcgtatcgttcgatacgaacttcagcttgcatcatcgtcctttccggttgcgctcggttcaagttcggcatcaacagcgacttcagtctgtatcttcctagccgcgaccttatgccggtgcatcggcgtggcaataatgaggtaactcacccaaatcgccaatgcccagaacggaatgcccatgagcaggcgggtcacgccgagtgcagctacatggttggtcagatacagcggcacctgcaccaccagccgcagcaggaacagaccgacccacaggccggtgacaatcatataggcgcgtttcagggccttgtcgtccatccagtcatggaaccatgccttgaaatgctcggtgggcaggctacggatgaattcgacgaccaaacccagtccgggcacgcgcgcaatcagcgacacggcaagcaacgcggcatagccggcattggtaatgaatccgaagatgtagtaattgcgggcctcatgagtctgccatgcccaaatcaggcagatgcctaccgccaccagaccagagaccgcgcccattaccgactggcgctgaatcagtcgcacaataacctgcaataccgccaacacggccgaaaccgcaatggtgagattcagattgctcgtggccacgaacagtacgacgaacaccacgccaggcagcatggattcgatgacgccacgcgggccaccgatggcgtcgatgacggagaaatcctcgccttcattgccggcgtcggctagagcggacaggccggtgcgtttgttgtctgccaagtctcttcctataaatcagcgaacttcggagaacatcgggccgcgagacagcgtggtcttcacttcggtctgctggtcctggctcagcggacccttcggcttgttgtccggaatgtccttgaagtgttccttgccgttctcctcgccggcttcggccgcggccttggcggccttacgctcagcgggggcgaccggcggatgcatcgggatcagatcgcgcggcgccaaaggctcctcgccacgctcgacgacgatgtcggcgaagaacttgttcagcgcctcggtctccgggctgtccggatcgatagcagccttgccggagaagatgccacgcagcatccagcgcgggccgtccacaccaacgatgcgcgtgttcacggttttgccgcccttgacattgaccggcagcttcagttcggtgccgaacacaccgtccacttcagaagcggccttgttggcttcaagcaggtcaccgcgaacgtcatcccacagtcccagggtcttgggtgcggcaaaggcttcgatctccaggctggaggagccgaaggtgatggtggagccaagcacttgctgggtggcgcggttggccttgatgcgcagctggatgccctggaggaagggcaggtagtaggcgccgagatccagataatcgtcataatcgggcacgtcctcatcgttgacatcccacgggcctcgctcttcgccgcggccctggtattcgctggccggctcggcgagcacggtctccgcgctctcggcctttgcggcagcgttcgcttctgcggcggccaccttgtcctcatcgacaggctcaacggccggctcggcttccttcttgctcttcttcttgccgaatccgaacagtcccataattcctcgtttcatgtaacggttgcaaccttgctaacactagcactcaggcttagagaaagctgagcatcgcggccgccgatgtccggttcgattcgtagggaggccaaaatagtatggccgcatgaccatcaccattaccacgtctaacgtcaacggcattcgtgcggccaagcgcaagggcatcgaggattgggccggcaagcatgcgccggatgtctggtgcatacaggaggttcgcgcgcctcaggacgatgtcgattctattttcgatgaatttggttttgaatacgccaccgccggcaaaatcgaggcaccggccaacctccataccatgaacgaggtctgccgggtgaaaggccgcgcgggagtcgggctgctcaccgacttggaagtgcttgacaagcgatatggtctgccaggtctgagcgaggatgtggattcggggcgttggatcgaaaccgatgtcaaaacgcctgagggctatacgatcaccgtggcatccgtgtacatacat

SEQ ID NO: 836 - DNA, 13636 bp, Unknown
  R14_18m  MAG No. k141_8758
acgctgaccaccgacatcaaagccctgagcatctccagttcactcagttccctgatcggcaccgacggcaaactggatgccgccacaatcgccgacttcatgctctcccccactgttatcagcgaacgggccgtctacccggtcgcctcctatggttccggcatggcaccgctgttcaccaccctgtctttgtgggtgggcgcgttcgtgctcgtggtcattcccaaactcgaaaccgacgacgagggcatcgacgatctcacgccaacccaaggctatctcggccgtttcctgctgctggccacgctggccgccgtccaaggcctggtcacggccatcggcgatcttgtcatcggcattcaatgcgcgagcgccccggtgtttctgctcacctgcgtcatcacctcactggtgtatatgtcggtgattttcgccctctccaccacgttcatgcacgtgggcaaaggcgtgtgcgtggcgctggtcattctgcaggtgccgggcgcctccggcctgtacccgattgaaatgatgcccgcgttcttccgcgccatctacccgctgctgccgttcacctattcgattgacgcaatgcgtgaaaccatcggcggcttctacgacggccactggttcgcctatatcggcaaattgctggttttcgcggttctggcctttgcgcttggcctcggcgcccggccgaaactggccaatctcaaccgcctgttcgcgcgggaaatcaaggaaagcgacatgattatcggcgagccggtgcacctgcctggcagcgaataccgtgtcactcaggccattgcggcactggccgaccgcgacgaataccgtcatgccatcgaacgtcgggccgccaaattcgcctaccgttatccccggctgctgctgggtgcgcttatcgccggattcgtggtgccggccgcgctcattatcgtgtttgtgctgaccaccagcgagaaaatcgtggtcatgggcacatggctggcatgggtgctcatcatcatgggcttcctgatggtcgtggaattcatgcgcgattccatccgccgccaaaccgagctcggcaacctctccgacgagtcgatccgcgccatgctgtacgggcataaggccaagcgtcgcgacacctccgccgaacgccacgaagaagcggacccgagcgccgccgttaccgcaatcatccccactattccgccgaccaaggaaggcaggcacgcacgatgaacaccatgtggaaactatttaccggcgacatcaaacgcctgaccagcaacgtggtctccatcatcatcgtgatcggcttggtgatgattcccggcctgttcacctggttcaacgtggccgcatgctgggacccgttctcgaatatgaagaacctgaaattcgcggtggcgaatgtggatgaggggtatcgttccgacctgatcccggtgaaagtcacggtcggcgatcaggtggtgaacgcgctgcgcgccaacagtcagatcgattggacgattacgtccaaagccgatgccgtcgagggcgcacgatccggcaaatactacgcggccatcgtaattccgaagtcgttcagcaaagacatgatgaccttcttctccgacgatgtgcagcatgccgaactgacctattaccgcaacgagaagaagaacgcgctggcaccgaatctgctcaacgagggcacggacgaggtggcggcggaaatcaacaccacgttcgccaagaccatcacttcggcagggctggaaatcgcgtcttcgctggccgatcagctgtccaagcccgaagccaaagagcaactgaataccttcaacgccaatatcgccgatttcgccacacggcttgacgatacggcggatttgcttggcacatacagcgcattgaccgatacggccggcgccttgcttgacacctcgaactcgctgatcacgcaggtttcctctgccgccaaacaaggaggcaaggatctcgccagcgccaagcagggagtcaccgacgtggtcggagccctgggcaccaccgctgacgcgatgagcagctcactggacgcgagcgcctccagtttcggcgcggtgtccgattccatagacaagctgtattccgacgcgaatgatggtgccaccacggccgccgacgaattggaccgtcaagccacggccattggcaagcagacggagaaatacactgaaattcgcaacacgttggccggcatactgggcaacgactcatccatcatcacggcgattgaccgttcaatcgcacggcagaacaggctgcggcaagcgctgaatacggcggcgaccgatattcgccaaggtaatcaggacgcgcaggatcagcatgcgcaggtcaaggatctggccgatcaagcgcagaacagtatcgccaatatcaagtcggatttcacggccacggtgaaaccgcaaatcgactccctgtcgtccaccgtctctgacgcctccggcatactgagttccggcgccacccagttggactccacgctcggcgacctgaaaaggacttccgacgacgccagcgatatgctcagcgacgctcgcaccaccttgggcaaggtgtccggcaaactgcgttccgccggtgccgaactggcttcgttcaacagcacactgagcgacgcactaaacagtggcgatatgagcatggtcaaagaggtgctgggcaatgatcccgaaacgctggccagtacgttggccgcgccggtgcagctcaggcgcaaggccgtattcccggtggcgaatttcggttcgtcgatggcgccgttctacacgctgctgccgctgtgggtgggcgcgctgctgatggtggtgacgctgaaaaccaccgtgtctcgccggacacgcaaagcattgggcgagccgcggccgcatcggctcttccttgggcattacggggtgttcgcgctgattgcgctgctgcaatccacggtgtcgctcggtggcgatctgctgttcctgcgcgtgcaggccgtgcatccgctgctgtttatgttgtccggatggctggcctcgctggtgttctcgttcttcacctatacgatggtggtgagtttcggcaatgtgggtaaggcaatcggcgtgcttatgctcatcgtgcagatttcgggtgcgaacgccgcctacccggtgcagatgttgcccgacttcatcgccaaagtcagtccgttcttgccgctcacccatgcggtgacgatgatgcgtgcggccatcgccggcatctacgacatggattactggcgggccgccggaatgctgctggcgttcgtgccgccgctgctgttgcttgggctgttgctcaggaagccactggtgcggttcaaccagtggtatgtggccaaagtcgagagcactaaagtgctgggctagtaggtattatccgggggttgcctacaaacggcatagacttaccaccctcagtctggctttgccagccagctcccgccaacgggagcgtacgggagcatatttcggagagaagagatgacggagatgacaggtacgacggcgacaccgcgcggtgagcgcacgcgcgaggcgacggatcgcaagctcatgcgagccacgctgcagattgcggtggaccgcggcatcagcggcgtgaccatcgaggaggtggcccggcgctccggcgtggccaaaaccacgatttaccgccgataccataatgccgacgagctgctgcgcgagatcagcgcgatgtatctggccatcccggattccgacccagtgcccagccccacgcgtgagcatttcacgcaactattgcagcgattggtcgattgggtgcgcgacaacgacatcgacgtcaagcgcgtgggcattgtattgtccagcgaggccgagttcttccagcacatcgtcgaccaggtggtgaccccgtggctggagcatgtgggggcgttcctcaagcagggagtcgcgcagggcgtgtttcgcgaggacgttgacgagaagttgctgttgtccacgattatcgggtctttggtggcgtatgaggccatcgagggcaaagcgatggacgacgacaccgcctgggcctcgcgcatggccgatctgctgtggccagcattgctgaagtagcggtcttactcctgaatcgaagcctcctggcgggcgacttcgagggctttgttgaaggcgtcggaggtccagctggcaccggcgaccttgtccactttgagtcccttcaggggcttgccgtccactacgccgttgatggctttggcgaagtcgtcctgatggttcttggaaatcgtggtgaacgggtgcccaatgattttgacggtctcgacgttgccgtccttgatggtcagatggacgtcgatggaatcctcgccgaccgggccgtactggccgttgatcgagtagttgccgtccttgtagttgccggtgtccttcttgtcggacgtggtggtggacgggtcgttgtgcgatgagccggaatcggagccgtcggagctatcggagccgttcgactgggattgcgactgctcttcctgcgacttctcggtctcgcccgagttgccggcgtacgcatcgtccatcggcgtggccttggattcgccgcacccggccagcagcgcgccagccacgaccagtccggccgccgccaatgtcgcggatttcttcaacgtattcttttcggtcatattcacgctccttaagccccctctgacgagggggctgtcagcgaagctgactgggggagagaccatcagcttgccatgtattcctcacatactgctcgatgcccctgacggccctactcctcgccgccggttttcgcggccttggtggggtcagcgaaaccaatggcggtctcgccgttctgcgcgccctcgacctgtgcacccgtggaggcgggcttgccgccggccgcctcgtaggccttgcgcgcatcctcgtcattccacttctcaccgacgagcacgccatggttgagcatgatctcgcgctgcgcgcagctggcgacaagcgcatcgtgggtgaccacgataatcgtggtgccctgctcgtgcagcttgcggaacaggtcgagcacgattttctcgttcttctcgtcgaggttgccggtgggctcatcggccagaatcagcttcgggtcgttgatcagcgcgcgggccacgcacacgcgctgctgctcgccgccggagagctggccgggcaggtggtgggcgcggtccttcaggccgaccttttccagcgcctccatggcctgcttctcatcgaccaccgaatggtagtactgggccaccatcacgttttccacggcggtcaggtgcggcaccagatagaacttctggaacaccagtccgatgaggttcttgcgcacgtcggccagctgcgtggcgttcaggtcctccagcttgcggccttccagcttcacggagcccttggagggcgtgtccatgcagccgatcatgttcatcagcgtggtcttgcctgagccggaggagccgacgatggcgagccattcgccttccggcacggtcaaattgaggtcgtccacggcatgcaggtcgccgtagatcttcgagatgtggtcgagttcaagtagcatgacgtttctctttctttattcttcgcgaagcacgacggcggggtcgatgcgggtggcgcggtggacgggcgggatggaggcgacgatggcgaccagcgcgctgaacagcacggagatcagcgccacccaccagttgaatccgatggagcgttcgaacaccgccacgcacagccaactggcgagtccgtagccgattgcggtgccgataagaccgccgatcaggccgtagagcgatgattcgatgtagaactcggtgccgatggcacgcgagctggcaccgagggccttgcgcaggccgatttcgttgcgtcgctgcgagacgatcgagctgattgtggtgccgacgccgacgagcgtcagcaccagcaccaccaacgagacgatccagaacagcgtctgcagcatggtgatgatgcgggtgtcggaggcggtgatcttggtgacctgctgcgccttgacgtgcatggaggtcatgtcgttgatgctggacaccaggcctgcgaggtcactggagccggccgaatactcgatgacgtccacgccgcgcgtgatgccggtgagcttgttgacgtcggcgttggtggcgtagatgatcgagtcttcgctgccgccggtgtccacgatgccggccacgcggaattcggtgccggaggtgtccatgatgtcgctggaaacgcggccgtctttggtttgctggtcgatcgaggagttcgacgaagtgccgttggtgctggcgttatcggatgcacggtagccgatggtgatggcggagccgattctcagaccgatggcgtcggcgatgtcacgtccgaccagcaccttgccgtcggtcggccacgagccgtcgaccacccagtgatggttgaggttcttgacctgcgccgcattcacgccggccatcacgtacggcgaggcgttgacgcgcacgttctcgtagcggtaagtggcgtatttcgcggaacccttggccttgaccatttcagtggtgtgctgcaccatcgccttgtcgatgccggccttgccgtcggcattggtcgattcggtgggtgtgacaatcaggttcgcgccgtacgcacgcatctcctcgttcatctgctgcggcacggcgaggcagatcatcgccaggcagaacagtgtggccgcgccgaccagcgacgccaccacggccatcaccgcgcgcgaacgccggcggaacacggcgctgaacagcattctgaagaacataccggtgttggtcatcggtttcctccttccacacctacgtagataaactcagcggccatggagcacctccgcgggcttgagattcagaatcgaacgaatcgaggaggcggacgccagcagcacggtgacagccagcagcacgaacaccagcacgaacaccatcggccgcatcgtgatgccggaaccgaataccacccggcctatcagctgggccacgccggaaccaagcaacgcgcccacaatcgcgcccagcagcgagattgccgccgtttcggccagcatcaggcgggataccgcggcatcggtggcaccgagcgccttgagcagcgccagctcgccagaccgttcgccgatcgaggcgaccatcaggttggccacggccacggctgcggcgatcaggctcagcacggtcatcagaatcatcacggcctgcgtcttctgcagcacattgccctgcaacgcggcgacctgacgcacctgcttggccaccgcgcccggaatcacctcttcgatctggtaggcgatcgagctcgggtaggcggtgcagtaccaggtctcccattcctcctggctcagcgcggccgggttcgcggcggccttacgggccaggtcgttctccggcgtggtcagggccttgacctcgatcttgtcgaccgaatcgggcaggtcggcgagcacctgggccgtggaggaggcgatgtagagcgagccgttgtcctcgtcgccggaatcgtagacgccggtgagcttgattttctgctcgttcttcttgcccgaggcggtggtcttgttgagggtgatggtgtcgccggtggtcacaccgagttcggaggccagcgtcttgccgatcacgccctggtcggaatcgtccttgggccacttgccgtccagctgccaccacgagcgcatgccttccacgcccacgacggtggtctcgccggtggagatcttgaggtccttgttgaaccacgtgccgacgaccggcacgttggtgccgttcaccatggcgtggatgttgagctgcggcgcgaagttggtgatgttgaacgaccagaagatcgtcttgatcttggccgcgtccgactccttcagaaaggcggtcgggtcgctggtggacgccgcaccgcccgactcggtgttgtacaggtcggaaacgaccgcgtccgccttgggctgcacggtgatgttcgaaccgtaggtggacagctcggcgttgagcttgtcgcccacgtcgaacacgacgcccagcatcgatacggacacggtcgccgacaggcatacggtcagcgcgataagcaggcgccggcgcagctgtcgggtgaacgagcgagtaatcatacgcagaaagaacatgattcttgtctcctgcctgactcactggaagtgggcgctcagcgcgtccagatccgtagtctgaatggtgatcttgccgtggccggtcttgtacgggaatggtatcgggttgcagccacccttgaagccgatggtcgccaggttgatggccacctcgcacttcttgcagatgatcttgccgtccttctcgtagtagccggcgtcgccgcagttctcgcaggcgtccaggccgatgccgtacgcgccaccgttctttcggatgatgatgaagcgcatgacggtgccgtccttggccttgtattcgaaacggtgcaggtggccgtcctcgacctggctgaagggaatggtggccacgccgtccttgagcgagtaggcttccggcggcgaaagagtgatggtctgatgggtcgcggcgacgccgacggtgagggtcagcgtgacgccgatcatggccacgaggctccagatggcggaggccacggcgcggcggcggaacgccttgtgcttgcggccgatggcttcgttcgcgccggtcagcggcatgcggaagccggccaccacggaggcgacggccggaatcaggaacacgaacgcctgggccatgatcatccagtcgttgtggttgatcgaccaggcgagggccacgaatcccgtgtggcccatcgggaaaccgcgtgcctgcaggatctgcatgacaccggtcaggtgccggacgaacagaatcaccagcaccgcgagaacggcggcggtgaacgaggcacgcaccgcggtcgaacgcatcgtgcggaagatcacggccacgatgatcgacatggccaggcccagcgcgaagccgagcgcgcgcagcaacatgtcggacgtgaagatcgggtcgccgggctccacccagatggtcagctgcaggatcacgtccggcagcgcgtagaacagggtgagtgcgatgtcgatggcggccacggcgttcgcaatgtgcatgaacaccttgtgctgctgccaattggtggtgatgcggcgtgcgaacaccaccacgacgatggtcaggatgtcggcaatgatcgcgcaccacagcaccggatagttgacgaacgtgcgctggttgatcacggccgaggcgcgcaggccggcgaatgtgatagcggcgatcaggccgacggtcaggccgatgagacgccaatgcgagcttatcggcttatctcgcccctcgccgaccgtgagcatcacgctcaggctcatcaccagcaatgcgggggccaaggtgcccggcatcactgccacgaattgttcaagcattcgcgtcctttctctgttcatcttaggctcccctccctgaggggagctgtccgcaaagcggactgaggggagtttttagaccgtcctaagaattatctccctaaagcggcgtaaagccccctctgacgagggggctgtctgcttagtcaatcaccactgacgcggggtgtagtcccagttgtcgaaggtgacctcgatgggctcggtccagaacttgtggttcttgacaccggtctccgggtcaacgtggagcatccagccgttcttctcaggggactcgatggagagcttgagttggtaggtgccggccttgtcgagcttgacgttggcgccgtagtgcgggccgtcggaggcgttcatctgcatgaaggtaccggaggtggcctggccgccctcgacttccttgccggtggacttgtcgatgatggtgtagttcacagtcaggtcagggacgaagtcgcccttgccgtagccgtagtcggtgccttcctgggaggcgtggatgtcggcttccaggtggaaggaagcgtcagcagccttcagacccatggaagcagggtacatgtcgatgggctggaagtagacggcacccacggtcagcgggccagcggccttgtcttgctccttggcggtgccggaggggccgaccgggacctcttcgaagccggaggtctcagtcggggcgtcggccttcttggagtcgtctttcttggcggtgtcggaggagctggtcgaggacttggtatcggaagcgttgttggtggaaccgcaagcagccatcgaaacagccatggagccggcgagcagcacgccgagcagagcggcaagcttcttgttcttcatcatttctcttattccttctgttgtggtgaatggattattcacgacttatctgtttttagttgtggcggcgtgggctggaatcgcttccattgccatgtcgcaagttgtgttgcgcgagatggtcgcaccgggcgttgtgctacgcctgcgcgctctcctcgtcagccttcgcgtccgacttgctcgcaccggccgcaagccgggccttggccttacgctgtttggcaaagccaaccacgaacagcgcgatgacggcgatggctgccagtacctgggcgatgatgcattcggcgtacgggtagaatccgagccagtcgttggtgggaacgcccggcagatagttggcgggcagcaggtcgccctcgatgagcgcgtgcacgccgccgccggcgaagacaaccaccagcacggacatgaggatcgaggtgaccaggaagaacgggccaatcggaatctttacggaggtgaagcgaatcaccaggaagatgatcacgagcaccacggcggcggcgagtgcgccgaccaccatgccatgcgtatcctggctcatcgtgtagatggactggtagaagatcacagtttcggcgccctcacggaacacggcgaggaagctcagcatggcgagcgaaatcaccgtgcgggaagccaccttctcgccggattcgacctgcgaggagacagaggccaccgcggcttcggtcttttccctgatgtagcggttccacgcttccaccgaggacttgttgagcatccagttgctggtccacagcagcatgcacatggcgacgagcgcgcacacgccttccatgatctcctgcagcgggccggagccgccgaacgcgagcatgaagatgaccgccacgatgcctgcgccggccagaccggcgagcacgcccacgtagatccacttggtgaagcgcttgttgccggacttgacgaggtaggccaccacagcggcgaccacgagcagggcctcgagaccctcgcggatcagaatcaggaacgcctggccgaccgagctggtgatgaacttgaggaagccaccctcctcatcggccgcgccgccgtcgagcttggcggcatcggtggccagcatgttcttcaggtcgtcgatgtacttcttgacttcggaagcaggcttgccggtgttcatcgaggagcggcacagcttgaactggtattccacctgggagacgcggttgccgctgatggcgctcagcacggtcttctcgaagccgagcttctcgtagtgctggtagtaggcgtcgttcacgagcgtggcgcccttggcggcgtcgccaccctcataggccttgtaggcgttgtccaggatcggaagcatcgcatccgcgacttccttccaagtcttggccgtttcctcggtgcgcttcttcttggcgtcgagctccttgcgctccttggcgatctgcttctggaggtcttcggagtactgcttcgggttggcgaggctggtgttggcgtcgagctgctgggccgtggcgtcgaggtcggtggtcaggtcgttgaccttctgggtaagctgatcggcctggtctgacgtgaacacctggctttgcaggtcctggaaggcctgctgctgcgcggtctgcttgtctgtgccgatggtgtcgctcaccactttgttgaagttggacgtcacgtagacggtggtgtatgcagccccgaaatcggacttggcacccattgggttgccgtccttgtattccttaaggccttcctgcaactgcgcttcgacggccttggcaacgtcggcccaggtcgcgtaatcgacgctggtggtgtcgtcgctcttgacggtggcagcagtggcagtggttgccggcgtcacggcgaacgcggactgcggaatgatggcggaggggaggaaggtcgcggcgatcatcgcaaacagaaaaacgatgaccgcaaatgcacgagccgagaccgtggccgactgcagacgaccggtgctgcccgacttcgcgcgcacgcgagaaacggcaacgcgcgtatcacgttcccgcatcgtgttcatttcagcggactgcgcgcaggcgcgacgaaccatgctgaattcctctcacttcaagtactcgaatggtccaaaaacaactatgaactctatagaaaaaaattcttgaacaacagtcttgattttttgacgggtgcgaggtaatagaaggcgttttagtgcttttcaaccccgcaattatttcactatctgagataactatgctcagagaggatggctttcccggaatgtgaacggcaacaccacaaaaagcggcaacgtgaggaataccggaatcggataccaaaatagtgccacgggtgaggcatacagcgacagcaccgtgaatgccagcaagccgtaagcggccagtgcggggccgtagcgtcgtcgcgcaggccgcaccgccagcgcaagaccagcagccagcggaatccacgtgacgtacagggccatcgaagtcagcggattgcctttgcgaacaccgacgcgaccatccgaacgcacccaccgatgaatcgcccgcaatatgtttttctgccattgcggcttgtcggaggtacccctcagcggcgcaaggtcatgttcgatggcggcaagccgtccggccgccacggtatcggcatctccgtcggaagtatgcttccaagcaccttcagtcaggaaagacgcccattgcctgagatagctaggcgtgaacaggtagtcggaatcagtggggtacgcgaaattgacgcgcgggtcccaccatccgcgagtcaccccggcataggccgtggcatattcaaccggatgcgcgaggccgagctgcgcccagacctgcagggccgcgagttgttgcgccgcggttggcctagggtgctcgcgcagagtgcggaaggtctcatcggtgcggtgcgggttgatgccgacggcggcccagtcgaggtccatgatcgcgttcagccgctgccgctgaatcttgtctatcgcgctgggatcatcgtgcgcgagccgggccactggctgggtgaccaggccccacacctcacgtccgggcgaccgattcgcatgcgtggcggccgcgcttaatggcgtccacacgccctgcgccacaacgatggcaaccgcaagacacgcgaacgcacgacgccgcgcgcctttgggcgtgcagacggcgagcaaacagcagccggcgcatagcacgattatgagcgccgtccgcttggagacgatggtggcgaacaacaggatgacgaacgcgaatgccaccgggcggcgagccagtaccgagccgcgcgtcagacaagcctccacgaacagcacggccaacggcagatagaacacggc

SEQ ID NO: 837 - DNA, 2605 bp, Unknown
  R14_18m  MAG No. k141_8946
acacgccgcctacgcctagctgaaaaatacaccagcactatatcacgcgatgcacgtcgaatcaaaaaggcgggaggcctccggagaggtctcccgccgacgattcggaatcgaatcacttgccttcgttggcgaggcgttcgcgtgccgcgatgatttccttctcggcggcgtcagcaccggtccagtagtctccgggcaggacttccttgcccggctccagagccttgtactgctcgaagaagtgcttgatttcggccttgtggtactcgttgacgtcgtcgatgtccttgatgtcatcgaaacgaacgtcggcgggcacgcacagcaccttgtcgtcgccgccggcctcgtcgaccatgtggtacaggcccacggcgcggcactcgaccacgcagcccgggaacacggagttcggaatcatcacgagagcgtccagcggatcgccgtcctcgcccagggtgccgtcgatgtagccgtagtcatccgggtaacccattgcggtgaacagggtacggtccaggaagacgcgaccggtctcgtgatcgacttcgtacttgttcttggagccgcgcggaatttccacaacgacgttgaaggtttctgccatgtcatttctccttgaaaatcgacagttacgttatcgtctcaccacaataccctgtttgcgcctgcaaaacaggtgcggaactcaagaaaccgtgctgagattatgccgacactatgtctaaacagacgaaatcctcccctcaaggggaggatttctagcggtttacgcacacgataaacccatgcacgtcaacggcatcactgttgcattaccgttgcactaccgcatcactgcacggacaggatgtgagccacatccgcccaaggcgccagagacacgtagttgtcccaaccccactggaattcgcggccggtcagctcgtcgcgcacgttgagcgggcggtcggtgggcagacccagctcgccgagttccaggtgaatcatcgactggtgtgcgttgtgtccatcgaggttcacgaccacaatcagcgtgtccgcttggccggtaccggtcagttcggccggcgtgtggcgtgcgaaagccagaatattctggtcggacgtaggcagcacggtgaggttgtggtagctcaacgcggccgggtgggcgcgacgaatcttgttgagcgcggtgagcatctcggccacgccgtactgcttggccttgctccaatcgcgaaccttgacctcgtacttctcgttgtcgatctgctcttcgaagccggggcgctgcttgttctcgatgagttcgtaaccgttgtagataccccaggacggcgagcccatggctgccagcaccgcacgcacgcagtggccggctacgccgttgtctcgcacgtaagcggtgagaatatccggcgtggtgggccagaaggtgttgtgctggtagtagccgtcgtcgccattggtgatcggcagatactcttccagttcgtccttggtgttgcgccacgggaagtagcagtgggactgggtgaagcccacgtagctcagggcacgcatcatgcccgggcgggtgaatgcctcagccaggaacaggatctccgggtgcttcttggtcacggcggcaatcacgtcctgccagaaacgcaccggcttggtgtgcgggttatcgatgcggaagatggtgacgcccgcctcgatccacagattcatgatgcgttcgacttctttttcgatgccgggcatgtcggcgttgaagtcgatcgggtagatgtcctgatacttcttcggcgggttctcggcgaaggcgatggagccgtctggcttgtgacggaaccagttcgggtgggccttgacccacgggtgatcgggcgagcactgcagtgcgaaatcaagcgcgatttccagacccagttcatgtgcacgctggcacagggccttgaaatcgtccatggtgccgagcagcggatccacggtgtcgtggccgcccagctcggagccgatgccgaacggcgagcccgggtcatcggggccggcgaccagcgtgttgttgcggcccttgcggttggtcacgccaatcgggaagaccggcggcagatagacgatgtcgaagccttcggcagcggcgcgttcgaggccggccatcgaggtcttcagcgtaccctgaatgatcttgccggtgttcggatcgatggtggcgccttcggaacgtgggaagaactggtaccaagccgcgaagctggacttcgggcgttccaccttgaaacgctggggctggctgggggagatgccatcgcgcagcgggtgagtctcgtgcagggcggcgatggtagggttgtcgccggaggcgaggcgatcctcggcgctcagcgtctgatcggccatggtctcagcggccttctccaaggtcttgcgatcgcgtgcggtcaggccggcgtccggggttgcggcccaacgggccagcagctcggcgccggaattgagcgcgttgtccacgtcgtccatcacacgcaccttgatacgggcgtcatgcagccaggagacgtacgtgtcttcccaaccttcgatggtcacggtccattcgccgagctgacgcttgacggccgcgtagcca

SEQ ID NO: 838 - DNA, 11911 bp, Unknown
  R14_18m  MAG No. k141_9150
cgggtagacggcccgttcgctgataacagtgggggagagcatgaagtcggcgattgtggcggcatccagtttgccgtcggtgccgatcagggaactgagtgaactggagatgctcagggctttgatgtcggtggtcagcgtatcgagcttggtttgcacgccggccagcgccttatcggtgtcgtgcagggcggtcaccgtggtggaggcggctttgtcgagttggtcgagggtgtgcttcgactgatcgatgagtgagccttgcgacgtgatgccggtcgacagagtgttggcggtcgagctgagggtgttgaggccggtgttgagctgaggaatggtgccggaggtgatggtgccgcgagcggtattggcctcgcgcaccgtggtttgggtggcggtattgagatgctgcgccaatccggcggtgtctgtggaggcattgccgatagtggtgttcaggctatcgaggttgcccagtgcgccggcaagctcgctattgcggctttccagtgtggcaatggcggattgcagcggttctcgatcggcgttcggcagccctttgagttggtcgatgatgtcggcgttcgcttggttgatgtcttccgccgtattgatcagtccgcctacctgctgattggcggcgctgatggttccggctaccgtgcccacgctttggttggcctgtgctgcggcctggctcagcaggcttgagccttggtcaagcgcttcggacgtggaggtgacgaagccgttcagactggcttgggtagtgccgatcagggtggagacgccggccagaccttccgcggtgtcgatgccaagtgcgcgcgcgtcgtccagcgcctgacgtgcggtgcgtgtctgctccggggtatcggtgagtttggtggtgagcttggcgatggtgctgcgtgtgtgctgcacgtcgccggaggcctcggcaagggccgtgagggccttggctttggtggtgtcttcggtgctgatggctttgccgccaaccgtattgatgacttcggtaagtacttcggatacggtggagacgaatgtggaattgaccgtgcggtccacagtggacgcgcctacgtcggtgactttgggggcgatggcgctggctttttcgttgacgtaatactccagagtgggccgactcttgccgccggtcaccacgccggcgagatcgtcggaaaagtctttggggatgatgatggctgcgtatgccttgccggattccacctggtccatggcctcggcttcggtgacgaaggtccagccgagctggtcgttgcttttcagctgcttgacgatttgatcgccgaggttttgcttgccgatgagcgcgttgtcggtgccgtcgtcattgttggcgatggcgacggtgatgcctttggtattgccgtacgggtcccagaagccgacgatgttgtaccacgaatacagtggcgggataaacaccatgccgaacaggatcacccatgcggccggcaccttgaacaggcgcaggaagtcgcgtttgaggaccttgaagatattgcccactgatacctccggagcttggtgttgcttgattgctacgttttccgtagcgatacgttaatcgtagcgctacggttgtagtagcgtaatacggctgccggagattattggggtgattgatgatggttttggcggaataacgccgctgcccagcggcttatcgtgtgtcgctgggcagtgtgcctaattttttgtggctggggtgctgtgtggccgggtgtgctgtgtgtgttggtgtgaggctgccctccatggggcggtaaaaccttcattgggtggtaagtggcccatggggcggtaaaattcccatggggcggtggcttaaaatggctttattccgcggaatgcggttttgggctaaccgccccatggggtaattaccgcctcatgagagagctaccgccccatgggtaaaccgttgtatcagctttcgatggtgccggattgaccatcaatggccgactgctcgttctggctggatgactggtcggagttggagttaccggaagtatcagaacctgtgccggagctgctgccggtgccggactggccatcagtgccttggctggagcgaaaggcgttctggaacttattgacaagatttctggatggtttttggatgtttcctgaaagcgagcgggctcggtgtccggcaatgtagacagacatgtaccggctatccatcaagttcggcaaaactgcaatcgggtgatagtgtaaggggacgctatgtggggaggaaaccatggttgaattcaaggacgatggcacggccactacccctggcaagccgcgggagaaccgtgacgccgagtccgcagtcgtggctgatctggtggccgtcgaactggacgacgccggcttgaacctgaacgccaagcggttaccgattctggcgcgcatctatggcgcggtcgtgctgctggacggactcgccacattgccgattatggtgatttccatcctctatgccgtgcgcgagattctggatggtcatgtgcacgtcgatgcgatgagcctgactttcatcctgtccgcgattcatgcggtggtgctggtagtcagtgccgcatgcctgattgtgttcggcgtgatgctgctgcgcaatcatcgccggtatgccgcgcgctggacctacgtgctgatgccgttgacgttggccgacggcatgctgtcgctggccctgaccggccttggcttcaacctgctgctgccgctgattcagatgattattctcgtcgtgatttcggtgaccgctgatccctccctgagcgaggaacgccgtttgcagcgcgcgctcaaacgcatggacgatcgcgatgattatgaatcggcggtggcggccggcatgctgggccgcgaccaatccggcaagggctatattgcactggacttcttcaatatcttctggctgtttaccatcgcttcggtgggtggcctgattatggagacgatctaccatatggcgctgtataacggtgaacttcaggaccgcgcgggtttgctgtggggcccgttctcaccgatttacggctgtggtgcggtattggtaaccgtgtgcctgaatcgcctgtggaaggcgaatccgttcttgatcttctgcgcttcggcggtgatcggcggcgcgttcgaatactgcaccagctggttcatggaagtggcgttcggtattaccgcgtgggattacaccggccgttggctgtccatcgacggacgtacttcgggccaattcatgttcttctggggactgattggtgtggtgtgggtcaagtggctgttgccgcgactgctggctctgattaatcgcattccatggaaagtacggtattcgctgactgcggtatgcacggtgctgatggtgatcgacattgccttcacgctgatggccttggattgctggtatgggcgcatggccggccagccgcaggattcaccggtcgcgatgtggttcagcgaacgctacagcgacgcttacatggccaatcgcttccagaccatgcatatcgacccttccaaggccgggcgtatgtgaatggctggcaagtaattacgcttcgcgggcagaaggtgcgtagaacctaagacagccttcgcgtgtggggtggtaagtgggatacactttcaagcgttgaaggaatgattccctccgctgatgtgctgttttgtgacgcgcgtgatgacgatgggacaatcaaacgaaaggcaaggcgcatggccgaagctacagcaaacattggtgtgattggactggccacgatgggctccaatctggcgcgtaatctggcgcaccatggcaacacggtggcgttgttcaaccgtcactactcgcgtaccgagaagctcatgaacgagcatggcgccgaaggcaacttcgtgccggccgaaacgctcgaggaattcgccgcgtccctgaagcgtccgcgtaccgccatcatcatggtcaaggccggtgctccgaccgacgcaactatcgcgcagctggaagaggtgttcgaaccgggcgacatcatcgtcgacggtggcaactccttcttcaaggacaccatcaagcgtgagaaggaagtacgtgccaagggcttccacttcgtgggttgcggcgtgtccggtggtgaggaaggcgcgctcaacggcccgtctctgatgcctggtggcactgtggaatcctggaagaccttgggcccgattcttcagtccatcgccgccaaggtgaacggcgaaccgtgcgtgacccacatcggcaccgatggtgccggtcactttgtcaagatggtgcacaacggcatcgagtatgccgatatgcaggtgattggtgaggcgtatgacattctgcgccgtggactcggcatggataccgaggagattggcgacgtgttcgctgaatggaacaagggcgaccttgactcctacctgatcgagatcaccgctgagattctgcaccacaaggatgccgagaccggcaagccgttcgtggacgtggtcgtggatcatgccggcatgaagggtactggtacttggaccgtgcaggctggtctggaatttggttctcctgtggctgctatcggtgaagccgtgttcactcgtgcactgtcttcgcacggtgagctgcgtgaagacgctcagaaagaaggtctggctggcccgaacaagaccatcgatctggccggagaagacaaggccgcgttcgtcgaggacgtgcgcaaggccctgttcgcttccaaggtcgtggcctatgctcagggcctgaacgagattcaggacggtgctaaggaatacggctgggatatcaacctgtccgaagtggcccgcatttggcgtggcggctgcattattcgcgcccagttcctgctcgaccgcatcaccgaggccttcaagggcgataatttgccggcttccctgttgtttgatccgtacttcgagaagatcatcggcgaatcgcaggatgcatggcgtcgtgtaatcgtgcgtgccgtggaggccggtatcccgaccccggtgttctccagctccctggcgtactacgatggtctgcgctccaagcgtctgcccaccgccctgacccagtcccagcgtgacttcttcggtgcccacacctacggccgcgtcgacaagcccggcgtgttccacaccctctgggcgcaggaaggccagcccgaggaacagcaggcttgagcgtctgcgacaatctgtgggccgggcccctcattcagggtccggcccacaggaggcgccatcacaactcggtgacggtttcttcggtggagaaccaggtgaactcgtccactccgttggcgtaggaggacgggtaatccgggttgttgggccgctcgaagacatgggccagcgattcggctttgccggcaccggcggcgaagaaccatgtacggcgcgagcgggcaatcagcggcgcggtcaacgagacgcgcaacggcggcatcttgggggagtggttcacacccacggtgagcctatcggtaaccttgacctcatcatgacccgggaacagcgatgcatagtgaccgtccggtcccatgccgagaatcatcagatcgatgaccggttccggccccaattcattcaccaactcgcgctcatagtcgctcgcggcatcgtccagcagcgcatcattcgcggcatcggcggcggcgcgaacggaagcgtcatcactatcggcctgatccatcacatcggcgatgtcatcggctgaacgggtatcggccgccatctcatgaatattcgattcaggcagcttgccatccgccaccagctggtcaagcagcaggcgacgggcctccagagcattgcgatcggtgtcgtaagccggcacaaaacgttcgtcgctccaccagaaatgcacgcgcgaccaatcaaccgcatcagccagtggatcgttcagcgccaaacccaacggctgtgcggccgaaccgccagacagcgccacatccacacgtgtgcgatgcgtgccatcaggcaatcgttcggcgagcaaatcgagtagcgccaagacaaaacgttgcgcgccagcctgaatcatcagatctttattcggatacacaatgagttttcgagttgccatgtatggtccttatatggggtatgtgtcgtactttgcaatgtggattgtgttgtcagttgacaacgcataatacgggtggcatgccgggaatccagccatttgcagcaatgaaatgtgttgtcagttgacaacacaatgtacattgtgcgacatcgcatatgtcactttattactccgcggtcatgagcttcggcatcgcatgaggtaggaaacgatgagcaacggcgttggcatggctcgaccacaattgccgaactcatgccaacgccgctgtggcaacggttctaccgacttcagtgacgaatcagatcccagccttcgttgatgacctcggcgtagatctcatcgggatcgatgcggcgcagttcctcggtcagacagtcctcgatggtgcgcatcggcacggacacttcctgcggagtctggccgggcagcgagatcagcgcttggtcctcatacgggcgttccagtgagatcacaccgtcctcacgggtcaggtacacgccggtcacggcctgcgcgtcgggcacgaactcagtttcgactggtacaccgagtttcagacgcagccatgcgcacagcatttccagaggcaggaagtcggccttgccggtcaccttcacggcggtgatgggcaggtgcggcggctgatcgagcatcgaggcgagcattgcgcgccagacggtcagtcgtgtccaggacaagtcgatgtcttccggtgtccaattgcggcgcaaacgctcgatcgtggcctccggattattggagtgcagcgcgtcggtgatgcgactgcgggccatcgcacccatcagatccttggccgggttcgacggcggtgtggtcggccaccacgccactacaggcgcatccggcacaagcagcgggataaccagcgtatccgggtggttgataaggccaccgcgcggacgcaagatgataatctcaccggcaccggcgtccgcgccgaatcgcacttgggcgttcaggttggaatcgttcggatcgttcgggccgtcggtcaaatcgacggccggattatcgcgattcgcgctcacctcggcggccacttcggtctcgttcggttcgccttcgccggactgatcggcaggattggtatccggtactacggcaatcacgcggcacgggtgctcacggctggccgagttcgcgatttccagcgcatgctctaggtccgcgtcctcggtggcgatgagtagcgtcagcacgcggccggtcgccgattcgccgcgctcctcgtgcagctgttcgattttgtgcgcaatctcgcgggtgcgggtgttcggcatatcgatgatcatggcatcctccagtggcggccgtcgcgcgccagcatttcgtcggcctgtgccggaccccacgtaccggcgcggtaggcctgcggctggccaagcgtggaccagaattgttcaatcggatcgaggatctcccagctgaggttcacctcttcggtggtcgggaacaacggcggatcaccgagcagcacgtccagaatcagtcgctcataggcttccggcgagttctcggtgaaggagcggccgtagctgaagtccatgttcacgtcacggacctccatggtggagccgcccggcaccttggctccgaagcgcatggtaacgccctcgtcgggctgcacgcgaatcacgatggcgttcttgccgagttcgcgcacggcggtctgctcgaacggcagatgcggggcgcgcttgaacgccacggcgatttcggttacacgcttgccgaggcgcttgccgcaacgcaggtagaacggcacgccagcccagcggcgggtgtcgatatcgaggcggatggcggcgtacgtttcagtggtgctcttggggtcgatgcctttttcttccaagtagccgaccacttcgtgcgagccctgccagcccttggcgtactgaccgcgcgcggtgttggcggcgaggtccttgggcaggcgcacggcggaaagcaccttggtcttttcggcggtcaggtccttggcggtgaagctcaccggctcctccatggcggtcagagccatgagctgaagcaggtggttctggatgacgtcgcgtgcggcgccgatgccgtcgtaatagccggcgcggccgccgatgccgatgtcctcggccatcgtgatctgcacgtggtccacatagttggcgttccagatcggctcgtacatggcgttggcgaaacgcagggccagcaggttctgcacggtttccttgccgaggtagtggtcgatgcggaacacggagctcgggtcgaacacttcggataccacgctgtcgagttccttggcgctggccagatcatggccgaacggcttctcgatgatcacgcggcgccatgcgccctcggacgagcgcgacaggccggaggcggccaactgcttggcaacctgcgggaaggcgcgcggcggcaccgacatgtagaaggcatggttaccctgcgtgccgcggtcgcggtcaagctcctgcacggtggcgctcagacgctcgaaggcctccggatcgtcgaacgtaccctgcacgaagcggatgccggcggccagattgcgccaagtcgactccttgaacggcgtacggcaatgcgcccggacggcggccttgacgaattcgatgaaccgctcctgtgtccagtctcggcgggcgaagccggtcaggccgaagctcggcggcagtaggccacggttcgccaggtcgtagacggccggcagcagtttcttttgtgccagatcgcccgtgacaccgaaaatgacgaggctgcacgggccggcgatacggggcagtctgaggtcgcgcgaatcgcgcaggggattgctccaattgggggattcactcataatgtacaagggtagtcgccggcggctatctatcgttagaggcgatatgcgatttgggctgcgatttgggccacattgcgtgtgctgtgccgtgcgttgggccaatcgcgtacgcaaacgtgtacgcaacgccgtagttgaaatatcccaaaacggtgtgtattttagaagagttgcccctttagctcaacggttagagcagcgtccttttaagtcgtgggttgtgggttcgaatcccacagggggcacaacaaatccttggaatcgcaatggttccaaggattttttgtttcgaccagcctggctcctagagtggtgccccatgtcatgcaccacgattcttgtcggcaaaaatgccagttacgacggttccaccatcatcgcccgcgatgacgattcgggctcgggccgttacgatcccaagcgcttcgtcgccgtcgcccccgacgaccagccgcgccactaccgcagcgtgctgagccatgtcgaaatcgaactaccggacaatccttgccggtacaccatcgcaccgaacgtgctgaataatcgtggcattctggccgaagccggtgccaacgaacacaacgtggcgatgagcgccaccgaaaccatcgctgtcaacgagcgcgtgctcggtgcggacccgatggtcgagttgcggccggctgtcggcgggccggacagcaccgattatcaggccgagcagcccggcggtatcggtgaggaagacatcatcacccttgtgctgccgtacgtcaccaccgcgcgcgagggcgtcgcgcggttgggcgaactgctcgaaacctacggcacctacgaatcgaacggcgtgattatttcggatgcggacgagatctggtacgtcgagaccatcggcggccatcattggatcgcccgccgagtgcccgacgactgctatgccacgatccccaaccagctcggcatcgacgacttcgacctcgccgatgcgttcggcgagcagcgcgaatacctatgcagcgccgacctgcgcgagttcatggccacgcatcaccttgaccgcacaatgggaacgtcggtctcttccaacggccgtcacgtgcatagcgccggattcggaataaccgttgcccttcccacccgcttcaacccgcgcaaggccttcggcaccgcgacgccgaaggaccatatctacaacacgccgcgtgcctggtacatgcaacgccgcctcaaccccagcgaggactgggattcgccggccgcccgctacacgcccgaatccgacgacatcccgtggtgccgcgtgccggaagacaaggtgagcctcgaagacgttgatttcctgctgtcctcgcacttcgaaggcacgccgtacgacccgtacggcacgaccggcacggcggaatcgcgccaccgttaccgtccgatcggcgtgaaccgcaccggccatatggtggcgattcaggtccgcccgtatgtgccggcggccaatcgcacggtgatgtgggtatcgttcggctccggtccgttcaccgccgccgcgccgttctacgcgaacgtcaacgacacgcctgcctacctgcgcgacaccacgcccgaagtctccaccggcaacctgtattggacgaaccgcctgatcgccgtcgtggccgacgcgcattggtatgagacgaaccggttcatcgagggctatgcggaaggcgtgcgcgcgttcgggcaccggctcatcgagcgcacggatgagcagttgcttgctcgaagcgatgccgaatcgacgggtacgaatgcatggccgctcgatggcggccacggcgatgagaaggatgtgcagggcgtggcggatgtgctcgaagcggccaacgacgagatggccgactacctgcgcgagcatacaaccaagctgctgaacgacgtgctatacacctccagcaacctgatgcacaacagcttcgcaatgtccgaccgttgggccgagtagcaagacctcggctggggaggtaatagggatgccctgctgataacgcgtcagcagggcaaagccgcaatccgaatcagttgaagccgacgatgtgttcggcgatgagatagccgttgcgcacgatccagcggccggttttaccaggcagattgagcgcgcgggacatcagcttcgagcgcacatccttgccgatggccggagaataggcgtcaatcgcatcccacagctcggttttcttaacgtagttggccggatcgcgcgagagaatcaggaacgccgaggtaacgcatgattcgatcgtcaggaagtgaatcatgtaccggtacagcccctccggcaccgtaccacgttcgggcgtggcctcggtcatcagccgattgacgagccgcagctgatccacacgcttaatcatcacgtcggtctgcacgctctgaccctcgcgcccgatgaagtagtggtagaacggcacgtcgagatactggatgcgcttcacccacgggaacggctggtacgagtaatagaaatcgacgtagaacgtatgctccggcagcttcagcccggaatcgcgcaccacctgcgtgcggaaagtgagcgcatgcatgatgatgtactgcgccagaccgaacttgcccaggtcatcccagccgagcacgcggccggcctccatcacatgacggaagttcaccacgatcttgtggcgcttggtcactttgtcatacacatagttggtcaccagcatgtcgatcggctcgctggcctcacgttgcgcgcgcaacgtggccagaaccgtgtcgatggcctgcgggtcgacccaatcatccgcatccaccaccttgacatacatgccggtcgccgccgtgataccggtgttcaccgcgccgccgtggcctttgttctcctggtgaatcgcgcgcacgacacctggattggtgcgttccagtttgcgcgcgtactccagcgtgccgtctttcgaaccgtcgtccacaatcag

SEQ ID NO: 839 - DNA, 7530 bp, Unknown
  R14_18m  MAG No. k141_9295
aaccagggccacgaagccggaaacatgtccgaagccgagcgaggtggccagaccggccttgaccgggcgaccagcggtctcgcgaccgaactcgtcctcgccaccgccgatgcgcaggggcttcctaacccagaccatgtggtcgtcgcgctggagcttcggatccacgcaatcaagcgccgcgttcgccggaatcacgccggacttgaacagctgcgtcagaccgttgacctggaagatgcaggcaccacccttggcgtggccggtaagcgtcttctgcgaaatcacgaacagcgggttgccgtcggagcggccgatggcgtgggccagcgtgttgtgcagctcggattcgttcgggtcgttggcgttggtggacgtgtcgtgcttggagaccacggcgatgtcgtcggctgagacgccgagcttggccaggtcgtgcacgagcttggagtccttgccaccgaggccggcagccagggcaccgaggcccggagccgggatcgaggtgtgggcaccatccgcgtaggagtggatgaagccgaccacggccgcaaccggcaggccgagcttttcggcgatgtcaccgcgggtcacgaggatcgtgccgccgccctgggattccaggaagccgccacggcgacgatcgttcgcgcggctgaagaagcgcgcgtcgatgcccttgccgtacatttcctccgaattggcggtggcgttcatgttgccgaagccgatcacggattccacaccgatgtcgtcgatcgcaccggtgaccacgaagtcggccttgccgagggcgatcttgtcgacgccctcttcaagggagacggccgcggtggcgcaggcggagacgggctggatcatgttgccgtagccgccgatgtaggactgcatcacgtgagccgcgaccacgttcggcagggcttcctgcaggatgtcggtcgggatctcgtggttgaggaagcggtcgaggtacagcttgcgcatcgacatcatgccgccgaagccggtgccctgggtcgaagccaccagcgaggggtggatggactcgaggatttcggccggggtgaagccggcgcccagataggcgtccacagtggtgacgatgttccacagggcgatcttgtcgacgtcgccgaccatcgaggcgggaatgccccatcgggtcgggtcgaagcccttcgggaactggccgccgactgtgcgggtcatggtggcgcggcgcggcacgcggatcatcgagccggcgtggcgggtcacattccattcgccggattcctcatccggggcgatggtggtgtgagcctcgtccaacttgacgtattcggcggcgacttcgcgggtgggcacagagaaggtgacgtcgtggtcgaggaagacctcggcttcttcttcgtcagcaccgtccttgtagtcgttgcccatgccttcctcgaacgggcggatgccggagcgggccacgacctcgtcgtggtagcgctcggcgatgtcctcttcgggcacgaggttgccgtcggtgtcgtaccagccgggcttcgggctgtcggcccaagtcagcagacccatgttccacgcaagttcgagcactgcgccggcgctcaggtcgacggtgccgtccgagtggatgccgagctcggcctgggtgcgcgtacgaccggagccccacgggcccagctcaccgacggaaacgatgacgatttcgtctttcggcttggcggtgacgttggtccagtcgttgaggtcgaccgaagcctgcttggtgacgatcggggtgggcagcgccttgatttgctgcccacgcgaggagtcggacagtccagtggaccgtccggcgacggaaccatccgtctcctgagacgaggccgcagcagcttccttctcgacgtcggccatggcttcggcacgcagggccttgatgtcgatgggctcggagccgaggccaccggtcaggtccacatcgagcggggccttgagggcctgctcgcgcgattcggcagtgcacaggtcgagcagcttggccgcgatctgcgcggtggagtaggtgtggatgccgtgacgctcaacgacggcgaccagcgggtcgttaccgcccatcaggccggtgccacgcacccagccgatcttcgggtgagcgaaggtgacgcggctcgaccacaccttttcagcgcgggcacggttgacgatggcgtcaaaggcgctcttgacttcgccgtaggcaccgtcgccgccgaatacgccgcggttcggggagccgggcagcaccacgtggagcttgtgctgcacgttggtgtcggcaccgatgtggctgaagccgacgatggcgcgttccacgccccacagcatcagtcgcgcctgtgattcgaacaggtcgccggagtcggcgagcgtgccatggaccggcggtgcggcgaacgggaagaacagggtcggctcccacgcgggcttcagaatcgtggtggtggcaccggaggtcttcttctgctcgtggcccacccagtcgaccagagcgtcgacgtcgcggtagctggagaggttggccggaaccagccacagcttggcgttgccggtggcgtgctcgcggtaggcctgcttggcccaagccttgatagacggcttgaagctgtgcgaggtggccaccacagtggcaccgcctgcgagcaggccttcgaccacctgagcggcaatcgagttcgggctcacgccggtgacgatggcgatatcattcgcgtaacgggaggcgttcttgttggaagcgacctgttcgagggcctcggagccggccttctggaaggcggccttaagctcctcgctctccgactcgttggcgaaccactgggcttcggcggcgatggtcttgccaaggccgatgaagctgccgttcaaggcggcggggtcgttgccgtagtaggcgcgggcgaggtcttcacgggcggaggcccaccggtcatcgaagaggatggccttgttggcgtcgaagcgcggagcgacctgcatgggccagtcggagccaagttcggcttcgaccgcggccacgacggcggcgttctcgtcctcggattcttccggagccggagcggccacgccgagctcgttcagcacgaagcgggcggtggcggcgagcacgccgttggaaccggtgaccttctcggcgaaggcgtcgagcgcggcggaatcgaccacagcgccaccaacggcaccaccggcggacggcagggccacggcaacacccttgagctgggcgacgacctcaacggccgcatcgatcagcttgtcggcttccggcttgttctgcacggcggcggtgggcagcttggccaggtcgccgccacgggagctggcaccctcgcgagtgtcgagcagcagtgcggcgagcacgctggccacccagccttcgccgagctgccatacgttggtcacgcggtcgcggatgtgctgctgtttgacgccggcggcaccgaacagcgagcgcaggcggtcgcgcagcgcctcggagagcacagcaccgaacggcttgtagttcggggcggccttgttgacgatttgggcgagcttgtcgagcgtcgcttcagcagcaccgtccacgctggcgactcccagctcggagctgatgtccatgagcagctggttgcggcgagaagagacaccgttggtcagggtgtcggtggtgtcgttgctgccgatctggtcgaggcgcaccttggcggagtaggccatgagtacgccgatggcatcggaagccttgaagggcaggtcggcgacggcagcaccagacggtgcgccagcagcggcctgccctgattgcaggccgcgcgaggagtcggacagtccagtggactgtccggcgacggagccatccgttgtctgagcagcctcagtcacggcatttgccggagcagcacccgatccgagcttggcgacggcggaaccaccggcaggagcggtttcgaccggggccgaggccgcagcctcttccggctcgtcgtcgggaaccagcgaatcggtgtcggtcatgtagacgcggccttcatcgcggccgacgttgtagacgaccgtatcgttgccggcgaactcgggcagacgtagggtcttggtaccgaggttggccagggtcggggcgttgccgaggccgacttcgacgtattcttccacgccgaggccgccctgttcgcgctgaccgaagagcagcgcctgggtttcaatccaacgcaccggggaggcgaactgccaggagagcagttcggtcaagagcagacggccgagcttctggtcgtcggcggcgtaggaatcccacacggccgggtcgtcgagcacggccttgatgcgttcggacggcacggcttcgaggatcttggcggcgaattccttggtcatctcgaacggggtggccaccaggttcgggatgtagcggtccaccagacggccacggtagtcgatgtaagcaggaagcagcgcgtcgagcttgtcgcggaattccggcacgcccttgcgcagtagcgtggagtggaacggcacatcgatgccgggcaccagcatgaacgcgggcttgccaccgaatgcggccacgcggcgggcggaatcggccttcagggccttgagtccggcgatcgtaccggcgatggcgtactgctggccggcgaggttgtagttcacaatctccaggaattcgccggacgccttggccacggattccacatattccttgacgtgcgcgtcgtccacaccgaactggttcggacgaagggcacccatgcggtagttggagcgaccctgtgcgtcacgctcgatgaggtggtgcatggtggaaccacggtggaacacgagctccagcacggtttccagcggaatcacgtcggcgaacgcggacaacgcgttgtattcgccgagcgagtggccggcgaagtaggcgggccagatgtcggcgccggcttcgcgcagacgggcggtctgggcaaaagcaaccgtcgcgagcgccacctgcgtgaactgcgtcaggttgagcaggccttcggggtgacggtaggtcacgccgttggcggtgagttccttcgggttgtcacgcacgaggcccaggatcgagaagccgagcttggagcgggtgagcttgtcggcgcgctcccacacgtcgcgggcggcggcggacttggcgcgctcgtccagaaccatgccctgcttctggatgccctggccggggtagacgaaggcggcgcgcggcgcacggaccagtgcggtgccgcgggagacgagctggccgtcgatacggcaggtgacttcgagggtcatgccgccgtggcgcactttgccgacgcgctcgacggagatttcgacggtgtcgtcaagctggaccatgccgtacatgttgtaggtccagccggcaatctcgtagtgggcacccttctcgtcggtcgcctgcacggcgtgctgggcggtggcggacagccacatgccgtgcacgagcggggcggccaggccggagatgcgagcgccacgagtggaggtgtggatcgggttgaagtcgccggaagtgcgggcgaaggcggtcatgtcgtgtggggcgacgaccttcacgcggcgcagcagacggcgcggagtggcctgcactacttgcaggccgcgcgaggaggcggacagtccagtggactgtccggcgacggagccatccgcttccttattcaggagggcaccaccatactcgggggcgtctgcaggcaaagcatcggagtagacgcggccgcggatcgcgaaacgctcggtttcgcgggcaagcggcgtgccgtcggcggcggtgtgggtcacgtggatggtgaccacgcggccggaggcggactcgaagtaatcctcggcccaagacttcagggtgatggtttcgccggtgtgcttgagcaggtcctcctcgttcacctcaagttcgatgaggtggtcgaggtggacggcgttgagcaggccttcaatcaccgggtagcccttgacgtacacggagccgagcgccgtgtagattgccggccaggcagggccgaccagcgcatcgggggcgatgcggctgggctgcagggtggtcggcagagcggcgccagtggccgcttcgtggtcgaagccgaggttggcggatagggtgtaggttgcggttgcggtaccgaacggacgctcgtcagaggtcttgtcgtcaagctgcggcatctcggtgagcttgtcgccggtgatggcggtgttgccgatgcctgcggtggcggcgagcatcgcgtagacgtccggaatcaggcgttcgcggtccacgaccggcacacggccgggctcggtgccttccacgatgagcgggatgacgatatcgcgcacggcgtgcttggaggtgccgccgtccgggtcgttgtcccagtaggtgtcgaggtggatgtccagatcgtacttgccggccgcggcgtcaaacgcgcggatttcgtagtactggtcgcccagggcggtgccgtaggccgggttgtcggtgatgtggccgacccaggagatgttcggggacttgcggatgaagtcttcggcgctggtggcctcgccaagtgcggcgaaatcgtcgttctcagcggcatcggcggcttgctgttcgtcctgcacgcgcttgatggcggcggtttcgaagcggccgaggatgtcggcgatcggctcgtcgatggtggtgatgccggcaacggagatcgggccggggatggcacgcacggaatcggcggagtagcgctggtcttcggactgccagagctggtcctgaccccaccaacgcagcaggtcgttgtcgatgacgggtacgaacggcatgggcttggggtattcgcgcacgagcaccgggaaccaagccacgtcggtcgggaccaccttgagttcggcggtctgcgggtaggccagtgcgagcttttcgagcgcgggggccgggtcggcgagaatgtcgtcgtgggtcagcaggccagcggcagctgcctcttcagcagaaacgccatcagcggcgaacagcttggaggtgaattcgccggagtccgtgtcgttcacacgggcttcgatgcgctgcagcaggtgctggaagcggtcggcgtaagtcgggtcgacccacgggaaggcgagttcggcgaagcgctgcgcccactcaaggtaggtcatggaggccaggtcgccgaagtaaggcttggcggtcttgttcagggcttcgatgatttccttgcggcgggagtcgagctcttcggggtgcttcatgacgcgcacgagcagacggccgcattcggcggagtcgttctcgagctcgtaaatgtcggcgtgcaggtggctcaggccggaggacatgccaccgacggacttgccggacggcacccagtgggcggcctgcggggcgaacacgtcgtcggacttggcgtcggccgaaataccgggcgtcttgacgagcagctgcttgacttcggggctggtgtgagcctccttggcggtcatcgcggcggtaccgataagcacgccgtcgaccggcatgtcgggcaggccgtaggcgtgggcccactggccggaaat

SEQ ID NO: 840 - DNA, 5945 bp, Unknown
  R14_18m  MAG No. k141_9319
gttgtacgacgtatacgccactgacagcaaggaagggcgtacacgtctgatccgccgtgtgaaagcggcgcagacactggcagccgcgcgcgagcttggtggcctcggcttcgatatggaccgtgtggtcgcattcgtcccgggagacgtttcccaacccggccagacggccaccgcacaggccgtggggcagcaggcccaggcggagtccacaccgctgaccccgcgcaagcccggtcccacaggcgagacgaccgtgatgatcgccgtccaccgtgatggtcaggcacgtcctctcgacctgttgacattggatgactgcgcggccgtcggcacctccatcggagccattcatcgtctgccttcgacttttctggccaatgccaaatatccggtagtcaccaccggtcagattcgttcgcagctgaccgcctggattcgccgcttacgctccgccggccatgttccccaagaaatcaccgacagctgggcgcgcatcatggacaccgagggactatggtcgttctccacctgcacggttcacggcggattctccgacggcgacttcctgttctccggttccaccatcaccacggtgaccaactggcaggatatgcaggtcaacgatccggcacgagaccttgcctggattttcggcaagctcgacgaatcccatcgcaacgccgtgctctccgcatacggccgcatgatgggctctcgacttgacgatctcatcatgctcagggccaacctgtggctgcagatggaacaggtgggcgaattcattcaggcgttgaaccgtgcggacaacaatcgcatcatgcagttcaaggcacaggtcgaacgactcgcacaccagttgggcgtgatcaagcacactccggcaccggccccagccgcagggtcggccgccgcctcgtcgacggagcccggttccccctccacaatcaccgtcggcacattgttgcaagacgaccgtcatcaggcacccgccacgcaggtacccgcacaaccgcagcagtccgaaaccggtaccgcggcggccgaggtctcggacgacacgcccgatccagatcgcaccggttccgctgacatcgtggccgctggcgacgtggatcttaccccggaagtcgaacccgatgctgaccggaccgccaatcacccgcaagcgagtgtctccggcaccgcaaccggtacgggatcgaccaaaccgcagccctcacatggcgcttcccattcttcggtgacgatcacgctgaaggagctcctcagtatgaacgggcatagcggcacgacgtcaaccgacgcttcccctgcatctcaatccgccgccccgaccgacgatgcggtgaatgacgatactccggacagtttcgttcagcacggagcctcgagtgcccaaaccacggtgattccgctgttggagcgggaagaacgcgctctgcgcgatgcccgtgccgggttggacgggtatgacagcgagggcaatccgctggccgaatcatccgcatcatccaaataatgtcgtgtgcggtgttccgcgccacgccgagcgcgtaacaccgcacatgacgacgcagacacgcggcacaatagagtacagaacctcggccggtgacggccacttaccatgatgttcgtcacaaagacggcagaacaaggagccttatatggatatcgaactgggcattcagaacgtggcacgaccggtgaactttagcaccgacgaatcagccgataatgtgagccaggccatcgcgcaggccgtggccgacaacgcgacgatcgatatgaccgatgacaagggccgtcgcatcatcgtgcccgccaaggcactcggttacgcgatcatcggctccgaaaccaagcacgccgtcggtttcggcacgctgtgaccgtgaatcgcgcataagcggccttgagcattttctcgaggacgcttttctattgccgaatcaccgatatagcggaagcacgccgcgatgaacgatctcttcgacagtggcctcatcggtgaggttctcccccagtttgttcggtttgcctttgccatgccagtcagatccgccggtgaccagtagctggtgccggcggcagatggtgagcagccgttctcgttgctccggtgaattgcctcggtgccatacctccagcccgtccaatccctcgctgatcaacgcttcgatctggtcatcggacagcagtctgcggttacggctcacatcaccggcatgggcgatcagaatcacaccgcctgcccctttgacggcggccaccacttcatgagaggtcggcgagggcgtgggaatatagtatttggatgaggcgctgaccgcattcgcaaacgcttccgaacgagtccgatatacgccggcactcaccaaagcatcagcgatgtgaggccgcccaatggtggttttgtcaccctccttgacttgggcgagcacggattgccaggtaatcggataatcacgagacaacaattcgaccatgcgctgcgtgcgttgcaaccgtgcggctcgagtatcggcgaacaagtccgtgatgtgctgattcgtgggatcatactggtagccgagcatgtgtacggagacgttctcatccgtggcggtgatttcggtgccgcggagcaacggcaaaccgaccctatgggatgcggcttcggcctccggccagccggcggtggtgtcatgatcggaaatggccacgcccttgagtcccaatgccttggattgttcggccaatgtggccggcgtttccgtgccatccgagaagacggtatggcagtggatgtcccacccgacggcgggcggctccaaaggcatcacatatccagtcatacctttcatcgtaacctcatctcagcattcccacgcaaggcgcagacaggtcgtcaccttctgccaacggccaagaccagacatccggcactcagctgacaaccgcagaggctaatctggagcgcagcgctatcgaaaggggcatgatgactcgtaacaccgcaaccgacacatcatccagcaccacgaacaccacgccgcttggcttggcggaggcgcgaccgttgattggatggcgccacagtgccacttggacatatctcatcatgctgatcgcctcggcagtggcattgggggcctcgctcattctgtccgccgagactttgcagttggctcggcatccggagtccgcgctcggctgcgatctgaactcggtggtgtcctgttcggcggtggcccagtcctggcaggcggaaatcgtgaagttcggcgggctgagctatccgaacgcgttcttcggcatcgccgccgaatcggtgttcattaccatcgcggtgatcggtttggcgcgtgtgaaggtgccgcgttggttcgcgacctgcacgtggctgggcggactggccgctttggcctactcgtactggctgagcacgcagtcactgttcgtgattcacgcgctgtgcccgtggtgcctgaccctgatgttctccaccaccatccagttcatggcgttgagccatgcgaccgtggccgtgcagggattgccgtcacgtaaggctgtggcggctgatgatggcgacagcgaggccgatgtcgcggcggtgccggccggactcaataagtattaccgcctcaacatcgacctcatggtcgacatactgtggatcgtggcgatcgtggtactcatcatcgtcaccgaaggcgcggccctgttcgctgcctgattcctttacgacaaatcgatatcggcgaccagcgtggctgctccggtcagtttcacgtcgctgtcggtgacgtccacgcgcagggtaccgccacgtacggtgatgtcccagtggctgatgccggtcttggcccgcagcacaacgcctgtggcgcataggccggtgccgcaggacagggtttcgccgcagccacgttcgttgacgcgcatcgtggcttcacccacgccggtgttctgatcgatgtcgtcgacccgcacgaattccacattctggtcggattcgatgaccggagccaccactggtttggtgaccaaatccagtgattcaaccactggcagggacgcgaaggcatcctcgatcaccgcgaccacgtgcgggttgcccatatccacgaacgtgccgcgcgccgagccctcagcgccggggatggtgacctcgtaggcgtcggtttcgccgatcttccactcccccatttcgacctggaacacgttggctccgtacggcctcatattgccgcgtggcgtcagaatcttgacgccggcacgggtgccgaggcggaacggctcggtggagtcggccacgccctcgcgctgagcgaacaaggtgatggcgcgcgtaccgttgccgcacatctccgccaacgatccatccgcattgcgatagtccatgaaccatttcgcgcccccggccagtacgtccgaaagctgatcatcgcttaaatcagacacgaaatcaggccgtgtcaggcgaatcaggccgtcaccgccaatgccgaagtgacggtcgcacaggaatcggacctcatcggcggtgggctcgaatttgccggacttgtcgaggtacaccacgaaatcattgccggttgcgtgtgtcttggttactcgttgcggaagactcatggctttcagagtactctagggagcgaaacaacaccgcaaaacaatcggctttgtgatcggtcgcggcaacatacggttgcaggcatggctatagggaggattcaggcatgagctcttcggctccaatcggcgtattcgattcgggtcttggcggtatttccgtggctcgccaaatcgccaaggatatgccagccgagcatgtgctgtattttggcgattcagccaacgccccgtacggcgtcaagacgcctgagcaggtgagggccctgagtttcgatattgtcgaacggttcgtgcgtcaaggcatcaaggccgtggtcatcgcatgcaacaccgccacttccgccgcggtgaacgatttgcgcgaacactacgatattccgatcatcggcatggagccggccctgaaagtggcgtgcgaccgtggtgacgtgccttccgacccgcatcatattccccagagggtgattgtggcggccactcccctgactttgcgtgagcggaagttcgccaagctgatggatcgattcgattccaacaacacgattttcaaggagccttgccccgacttggtggagattgtggaatccgggcggctcggcgaccatgacctggtgatgcgcacgctgcacggctacttcgaccagtacgacatggagcacatcgactcggtggtgctgggctgcacgcatttcgtgttttaccgcgactacttccgcgaactgctgcccgaacgggccgccgtcatcgacggcaatgagggcaccgtgcgccatctgggcgttgtgctggagtccctgggcaaactggcacccgaagacgcgaccggcggcgtggaactcgccaattccgatctgtccgaacgtgttacacggctttcacgcgacctgctgaatgcgtgatcggatgcatgatgatgaataggaggctgatatggcactgaagaccgcgatgattgatgtgggcggcgggttccgcgcgattttcggctgcggcgttatggaccgcatgctggaggacggcatcgacgtggacatgtgctatggcgtttccgccggggcggccaatatgacctcgttcatcgcccgccaacatggacgcaaccacaccttctacaccaaatacgccttccgcaaggagtatgcgagcgcggagagctatttcaagaaccgcaacttcgccaatctcgactatatctatggcacgctgagcaaccatgacggtgagaatccgttggatttcgaggcctttgaggccaatccgaccggattcaccgtggtggcctgcaatgccgaggacggctcgaccaagtatttcgacaa

SEQ ID NO: 841 - DNA, 10302 bp, Unknown
  R14_18m  MAG No. k141_9597
ccgaacgaaccgccgccggaaccgccgctgctaccgccaaagccgcctgagccaccggatggcgaggccgcattgattgtcgcggtgatatccgcaaatccgtacgacaattgcgtgccgaggtcagagaacccagccgcgaacgacgtgcccccgaacgctggcaccgctccggccaatccgctgtcagccacggaatccgcgaacgccgagccattgtagaaacgcaacccataccagtcgtacggacgataattccaatagaacaccgtgtcggaggcattggcatcaagccattccggatcggatacttgcggataggccatggccagctcccgcatcacccggtcggatatgccaaatgcggcagcgtagaccatataccaatcccacagcgtcaaatccgcgactccacggtacttgaagttcgagaagccttgcatatatcgtttgagacccaagcattgcccggccatctgctgaccatgatcggtcagcacgtaggaattccccatcaggaagcagaatatgccgaccgtcatcaggggaatgccgatgagggccccggccaccagatatccggccaaaccgttgatgaatatgctggcgccaccgatcagcacggtgattgccccgggaatgagccatccgttctcggttttcggcgcgatatccgccgccgcgaattcggtcttgcacgcattggtgaacttttcgagttccttgtagccatctttccaatccttgcaggcgtctttgatgtcatccatgtcaaatgccgtacgacctacgcgctcggaaatcacggtgagcagatagagcaatgcccgctcagaagcactgagatcgggctggtgtgcatcggacacgctagatgcggcagatccagatccgccagatccagatccatcaaatacggattcgacgaatactgattcatcaaatccctcagatacgccgtaatcgtactgccacagcatcacaatcgtgctattggtacgcgcattattgcgcttgtatggatcggacccgattcgctgactgagctccaccggagaaacttgtttcagatccacgccgatatacaggtccgccgaaccggggaacacagcaatgactttcttcacggccagagaaagcaaggtcgcgacgagttggcgctcggaaatgtcgggtttgtcgccggaagtcacgatatcgatgggtttggccgccgatgcggggctcagctcggggcgatcgcgccaatattcgatggagccacggtaacgtgaacgtccggaggagcgtaaggctgcaacaacaccaataatcccgaatatcaggccggccgatatggtggtcatccagttgttcaggcgccttgtggcgcgttggcgttccagattgcgccagaaccgttcgtcgtcggcttcgtcttccttcaactcctgcagatgatcgtcggtctcgacacgagccatatctcccgccttggccgcgtcgaaagcggccaccacgtctaggtactcgccgcttttcacatcatttacggtgaaggtgaagctgccatccttggttcggccggtttccgaggtttgttcagtgtgcagccaagtccacgagttgctcgcggtcacacctttggggaaatgcaccgtgccggtgaccgtaccaatcggcacctgattgttctcaccgaatggctcccattggaaggtcgccacgtccttccacttggtggccacgtcatgcatggtgaagctcaccgtgaacttgatgctgttggtttttacggtggtgggaatattccagccgatctccacggtttggtcttgccatcgtcatccttgcgtttgcgcaacttgatatcgatatgctccgtgctttaagatcgccgtcggcggtggcggtcacatcgtaatcaagcgtgcggtagctcaggtcggcaccatctgtgccgagaatcaaggcaccggcacagagtgcggcaagaatcagcgcaccgacaaggcttaagcccagggcacgaacaatgcgtttcgacataggcatgcgctaccgcccgccgaacgagccgccacctgagccaccgaacgagccgccgaaaccggagccgccgcccgaaccgaagctggagaaatcgccaccggaatcggcggatggtgctgccgcgctgatggtcgagctgatgtccgccagaccggagttcagctgcgagccgaggtcggagaatccgccggcaaacgacgtgcctccgtaagccggagctgggccgccaacgcctaggtccatctgcccggcagcatcgtggtcgaatggaccattatgacggtggctgtaccagccatacgggcggtagttccagtagaacaacgagttggaggcgttggcatccaaccaagccgggtcgttgacctgaggatatgctttggccagttcacgcatcacgcgatcggaaatgccaaacgcggcggcgtagaccatataccaatcccacaaggccaaatcggcggtaccccggtcggtgaagttggagaagtcttccatataacgcttaaggcccagagtccggccggcgatatcctgcccttgatcagtgagcacggtcatcgcgccggccatcgagcagaacagtccgaccaggaatatcggcagcccgataagaccagccaccgggtatccgataaagctgttggccagcagcgaaccaaatcccagcacggcggccaatacgccgggtaggatccattgccagcccacagagcgcgtggcacccagccgctggtattccatgctgcatgcaccggtgaatttgccgagctcaatatagccgtcttgccagttctggcaggtcgccttcatctggttcaggtcgaataccgggctgcccacgcgctgagaaatgacgatgagcaggttcagcagcgcatcttccgattcgctcaatcccaactgttgcgcgttgggtgcctcatcaatggcgagcggcagaatcacgatggtgctggtgatgcctgccgcatactgcttgccttggtcggcggcaatcatttggctcaagcccaccggcgtggcctggctcatgtcgatgccgcgatacatgtccgacggccccggataaatggcgatggccttcttgacggcgagcgacagcatggtggcggtcagctggcggccttcatcggattggcgcgtcgacggatcgaccacgcgaatcagacgggctgcggaagccggactgatgccgggctggtcgcgccagtattcgacgctgccactgtattgcgcacgccggttgctggagatcacagcccagataccccacgcgcacaacgcgatgccgagcacgatgctgacaatccagaacacgagacgagctctggcagcgaatcgttgcttgtcgagccagcgctgctgttgcttatattcgtcctgtttcaggtccttgagatgattgccggttcccttgcgggcgatgcccttggctttggcggcatcgaacgccgcgaccacatcgaggtagtcgccattgtggatgttgtaggccgtgaacgtgtagctgccgtcgctgttgcgcttggtttccgaggtgcgctcggtgtgcagccatgtccatgaggttttgccggtgatgccgttggggaaatggacggtgccggtgaccgtgccgataggcacttggttcttcttgccgaacggctcccattggaaggaggccacgtctttccatttggtggccacatcgtgcatggtgaagcttacatcgaacttcatgctgtcggcctcggtggtgaccggaatattccagccgatctccacggttgtgtcatcttcggtggcggaggcgctgggcttgaggccatcggtaccgggcgtgtatgcctttggatggtcgctgccatcgctcacatcggcgacataccaatggttggcgtagtcgctgttccattccttgtcggaagagacgtcactgggcagcttgggctcgctctgttgtgcgtagtcgatgccgtcggtgacgttgcgcacgctgatatcgctgatatcagtcaaggtgccggagttcagcgtgtattgctggaacagctgcttccacggcttggtgttgtcgtcactgtcggtacgctcacgcatcttgacgtcgatatgctgcgtgaccttcaaatcaccgttcgcggtggcggtcacgtcatagtccagcgtgcggtagctgaggtcggccgaatcgccgaacgcggaagtcccgattatcgccaaggtgataactgccaacaccaccgtggcaacaatgctgatgattccggcgcgaatgaatcgtatccgcatatcttccctctcttaagacaatacgggcccggccggcggcttaccggacgggcctgaagcgggtcagaactggacctgtggcacctgacgggaagcgtcatcggcctcgaagtattgcgcctgctcaaagtggaacagaccggcgatgatgttcgtcggcacggtttcgatggcggtgttgagcttcaggaccacgtcgttgtagaactgacgggcgtaggcgatcttgttctccagttccttgagctggttctgcagatccatgaagttctggttggcttgcagctgcggatatgcctcagccgtggcttgcaggttgaacagggcgcgggacagctggttttcggcggcggcgcgctgagcagtggtcgtgctcgggttgctggccgcagccactacgccggcgcgggcggcggtcacctgagtgaagacttcagactcgtgggatgcgtaccccttgacggtattcaccaggttcgggatgaggtcggcgcgctgcttcaactgcacgtcgatttgcgcccaaccgttcttcacacggttcttcagcgtcaccaggttgttataggcgctgacgccccaaccaatcaagacaacgataataacgacaacgacaatgccgacgatcagaccagtactcacctatgctcctttgctggaccttgctgtgaccattcttccacactcgcaccgtaaacagaagattcatcacagagtattcatcgtgcggacttgtcttgtaccgctttacccgccgttctcccgtcgatcgaccgaagcgggaagtcgccgcccagtccgacgaagtattccagctcgctccgttgcgagaacgataatactcggcaatactcgcgttgaatatgcgaaagcccgccttgcggcgggctttgccgtttctcctacgcacaaatcattacgctgcgcgcaggaaacgatcagccgaagcgaccggagatgtagcgctcggcttcttcgttttgcgggttgttgaacatcgtgatggtgtccgcgaagtactcgaggtgaccgggctggcccactgccttcaggttgaagaaggcggtgtagtcggcgatacgggcggcctgctgcatgttgtgggtcacgatcacgatggtgtagtcgctcttgagctcgttgatcagatcctcgacagccaaggtcgaaatcgggtccaaggcggagcagggctcatccatgagcagcacctgagggtggacggccacggcgcgggcgatgcacagacgctgctgctggccaccggacaagccgatgccagggttgtcaagacggtccttgacctcttcccagaggttggcaccgcgcagagcccactcgaccagatcgtcggcgtcggacttggccaggtggtggttgttcaggcgcacaccggccagcacgttctcacggatggacatggtcgggaacgggttcgggcgctggaagaccatgccgacgtcgcggcgcacggccaccggatccacgtccttgtcgtacaggttcttgccttcgagcagcacctcgccctcgacgtgagcgccggggatgatctcgtgcatacggtccaaggtgcgcagcacggtggacttgccgcagccggacgggccgatgaaggcggtgaccttgttcggctcgatgttgatgttcacatcctccacggccagaaagtcgccgtaatagatgttctcgtggttgacgtcaatacgttgtcccatgatgtttccttatatttccttgtgttcttaaggcttaggcttagcgactggcttagcgctcggtcttgacggcgaagaccttcgccacgattcggccaatgaggttcagcagcagcacgatgacgatcagcacgagagccgcagcccacgcacgttccatcggaatcgtggtcacgcaggtggcgtcggcgttgggcgggcagttcgcgctgagcttcgagtactcctggtagacgaacaccggcagggtggtcatctggccggagaacaggttcacgttggtgctggagatgtagccggcggtcatcagcaacggtgcggtctcaccaatcacgcgggcgatggccagaatggcaccggagacgatgcccggcagagcggtgcgcagcacgatcttggtaatcgtgcgctgcttggtaacgcccagagccaaggaagcctcacgcaaatcgttcggcacgatcttcagcatttcctcgctggacttgaccacggtgggcagcatcagcagggagagagccacggagccttcgaaaccgttgatggtaccggggcccagcagaatcgtgaacatcgagaaggcgaacaggccggccacgatggacgggatgccgctcatcacgtcgacgagcagggagatcgtggtggcgagcttgccgcggttcgagtattcgaccaggtacacggcgcacatcaaaccgatcggaatggagataaccatagcgccagcggtgatttcgagagtaccgatgatggcgtgcagcacaccgccgtaaccaccggacggggtctggctaccaccgaccacaccggtcatgttgtagctcaggaagttcaggttcaggcgcttgatgccgttgacgatagtggtccacagcagggagatcagcgggatgcaggcgatcacaaacgccaccgcgatcagggcccacatgaagcggtccatgatattacggcgctggatggcggaacgggtcgggcggaaacgatcgaagtcgatttcgggcgtgccgtccatcggagtcttttcagtgttctcagcagcagtcatcacgcagtcgctttctcggtaagcttacgggcgatgaagttgaccacgaacgtgatcaggaacagaatcagaccggttccaatcagcgtggagacgcccagatcgttggcttcagggtactgtgcggcaatattcgcggcgatggtctggttctgcgaggcctgcagcagcttgatggagtagttgaggcccggggacaggatcatcaacacggccatcgtctcaccaagcgcgcggccgagagccagcatggaggcggacacaataccggacttgccgaaaggcagcacggccagacgaatcatctcccacttggtggcgccgagcgccagcgcggcctcttcgtgcaggcgcggggtctgcatgaagatatcgcgggacatggaggtgataatcggcaaaatcataacggcgagcaccacagccacggtggcgacggtgcgcgacgggttggcggccgggccctcgaacagtggaatgaagcccaagtggttggcaacccagttccagaacgggtagatggccggcaccagaatcaggccgccccacaaaccgtagataacggacgggatggcagccagcagatcgaccacatagctcagcgcggtggcgagcttcttaggtgcatagtgcgaaatgaacagcgcaatgccgatggacacgaagaaggcaatcagcagtgccagcaaagacacgagcacagtaccgaacaacagcgggagcacgtagccccagaagctgctggccttgccgccggtgaagctggacacggtgtcgctgttggcggcctgatcgccaccgatgagtggccaggcgcggaaaaacaggaacaggaacacagcggcaagtacaaccaggatcaggatgccgcaggcgtatgccacaccgcgaaacaccttgtcggcggtcttgcctccaactggctgcacagccgttttgtcttgcgaactcacggattctccttatatagggtggttatcaagtattcaagtggtgcggttttcgtctgtgactttgccaaaccgttcgggtcctgacccgctttaagccgcagccgtatggtttacgactgcggcttaaagttggcggcgactgctcttactactacagtctatcgttcagttgtcaggtccagtccacacgacccttgcgggccgacgtcatcacttggtcttgatggcctcgatggacttggtgatcttagacttcagggaggagggcagcggagcggtgccggcggcatcctgagcggccttctggccctcgtcggaggtcacgtaggtcagccaagccttggcgaactcagcctgcttggtgtccttgtaggccgggcagacgatgtcgtaggagaccaagacgatcgggtaggcaccctcggcctcggtggcgtggttgatcttgatgacgatgcggttgtcgcccttaacggtgtcgtcctgcttggagtcctcgatgaccttggagccggcctcggcggaaatctcgttgtacttgtcgccgaccttgacggccacggtgcccaggtcgccgacctgggagaagtcagcgtagccgatggtgccgtcggcctgcttgacggtggagatcacgccggaagtgcccttggcgccctggccaacctcgttcggccagttctcggagaggtcgtaggtccagttgtcaggggtgacgtccttgaagtaggagacgaagttctgggtggtgccggacttatcggagcggtgcacgacggtgatggcggtgtcgggcagcttcaggtccttgttctgatcggcgatggccggatcgttccacttggtgatcttgccgtcgaagatcttggcgatggtggcagcgtccatgttgatgtgcttgccggcatcggaaacgcccttgaggttgaagaccacggcgatcggggagatgtagaccgggacatcgaaggcggtgccttcagtgcacacggacttggactgctcaacttcgtcatcggcaagggccttatcggagccggcccaagcggtggcaccggtcaggaaggtctgcacgccagcgccggaaccggacgggttgtaggcgatcttggcttcagggttggtgccctggaagccggcgatccaggcttcaacggcggcctgctgagaggaggcgccggcgcccgagaagttgccggagaccggggtggacttggaagtggaatcggaggaggagctgttgtcggtcgtggtggcggtgttatcgccgcaggcggccacggaagcgagcatcacaatgccggacagagcggcaatggagcgaatgaggatgttcttctgcatgattattacttaatccctctatcaactattcgcgggcggctcagcgctgcccggtcaattcatgacaactacaagcgtattggtggtttcaagggcccaaaaccgaaatcagtaaacagaagatgaacacttggatgtttgtgggctacgttgaggctacgtagtttttggagtggactcgcctgcggcgagcccacaatccacaacaaaaaaggcggcccgaaggccgccttccatttactccgcgggagtatcgatcttgtatccgagaccgcgcacggtagtcagatacttggggtgcgccggatcttcctcgatcttggagcgcacgcgcttgacatgcacgtcgagcgtcttggtgtcgcccacataatccgaaccccagatgcggtcgatcagctggtgacgcgtcatcacacggcccttgttctgcatcaggtattcgagcagttcgaattccttgagcgggaagaacacggtttcgccgcgtacggtgacctgatgctggcctacctgcatggcgatatcgccgcacaccagcggaatatcgtcatccacagtgccggaagcctgggccgtggcctgattgcgacgcatcacggcacggatgcgggccagcagctcacggaaagagtacggcttggtcacataatcgtccgcaccaatctcaaggccaacgaccttatcgatttcggcgctcttggcggtgagcataataatcggcacacggctctgctcacgaatgcgacggcacagtgcagtgccgtcaatgcccggcagcatcaaatcaagcagcaccaaatcgatgccgcccttggtgaacagttccagaccttcctcgccagtggcggcggcggacacgtcgtacccctcgcgtgtgagctggtataccagcggctcgcgataggattcctcgtcttcgacgata

SEQ ID NO: 842 - DNA, 11811 bp, Unknown
  R14_18m  MAG No. k141_9873
acttcgtgttggatgatctgcgcggtccagccggtgaaggtggcgtggcgggcgcggaaccgacggtcctcgtagttgacctcgatacggcggcagcgcagtgtgcggcgttcaccggtcagcgacaaacagccttcctgggtgtcgaaggcaccatccgaagcggtgatcacggggttgagcatcaccgtgatacggccaccgagatcttcgtccacgaagacgatgatgcgcttgctcacgccgatcatgttggcggccatgcccacgcaccgtgaacggttggcctccaacgtatccacgaggtcctgaatagttgcctcgtcgccgggcccagccgcttcagacggtgtgcgcaaaaacgaccgcgaagtcataatagggcgttgcatgttggaatcacgcttcttcgtgccagtggatgttggtgataagcggcagggagatgccggtaccgagcgacatgaccagtcgggcggcgagcagcatcgggaagttgaccgcgagcgcgcccagtaatgtgccggcggtgaaaatcacgatggccatgatgaacagtgttttggtggcgaatttgcgcaccatgaacggcgagctcggaatcgacaccgacagcaagagcagataaccggtgacaagccactgcaccaccgaggcgccgatggagaactcctccatcggcgtggagtaggcgatgttcagtgacgtttccgataggatgccgaggaaggtcaggatcgcgagcgagacgaccgcgatgacgagtttgttggagaccggttgcttgccgccgttaggcagctgtgttgcggaatgagtcacgatcttgttctctcctccattcattcagatattctgactacgacgttggaagtcttcctgcatgagtcgcagagcctcggtcaaggtgcgtaccgtggtttcgcactggtccgaggtcaatccgcccagcagttggctcaaatgcgcgtgatattcctccacatagatgcggcggatatccaagccgcgttcggtgagcgtgagcgtcaccgcacgccgatcggcggcatcggcgtgtttgacgacgagtccgaggtcggccatttcgccgacgagcttggtgatgctcggcgtagtgacgccgaggaatgcgctgacgtcgcccacgcgcgcggtgccggtatcttgcccattcggttcgttgatatgccagacggcgtcgatcacgtggacatagcgcggtttcatacctttcggcaatgccggcatcagttcggtgatggtcttggccttccagcagacatccaggaggctccgcacctcattcaccggaagcaagccggtcttggtatcggttcgggaatcgcacatcgctggcccaacctccaattagttaccaatagtcattaccataagtaactacatgcaggctctagacaaacccaacgacctgcgcgcccgtgtcgagttccgtttcggcataaaaaagccaggggatccctggcttgcaatgcacatatcgctgcaggtttgccgggacctatatgttcccggcaacaacagccgtatatacgttaccgatcagtgctgccctcatcatccttggcacccgccgtggcggcctcagtctccttggcgttccacccggtgacggcattccaaccactccatccgatgaccactagcaagcacagcgagaagacaatagtggcccaattgaacagcgagccatcgttattggcctcgaccagtgactgccagagccagataacgcaggccaagcaggtcaatgcatacatacgggaggtggagcgcgcggtgagtttcatggcggaaaaagtcctttgattacaagaatgacggcagataacagtgtgggatccgcaccagcggcaccggcacgaatcccacatcgaggaggagaaaggggaaggtcagctcttcttgcgcttggatatgatgtccacggcgacggccagcaggagcacgaggcccttgatggtcttcaccacggcggtgtcaacacccataatcgacagaccctggttgataacacccatcacgaatgcaccaatcacagcgcccgggatggtaccaataccaccggtgacggccgtgccaccgatgaagcaggcagcgatggcgtccatctcgaactccataccggcctgagcagttgcggaagccagacgggaaagcatgcagacagcggccactgcggacaggaagcccatgtggacgaacagcaggaagtccacgcggcgggtgttgataccggagaggatggcggccttgcggttgccaccaacggcgtacacgtggcgaccgaacacggtcttggtcaggatgaagttgtagatgaagaccagcacaccgacgatcaccagcatgatcggggtaccaccctgatcagcgttaccggaggaagccagcaggtaggtgacgaaggcgatgacgaccgcgacaagcacaatcttgaggacggtcaggctcatcggctcgggcaccaggccgaccttggccacacgggcgcgcttgcgcagctggctccaggcaaagccgacaatgcacaggatgccgagcacaatggtcagaccgtcgaacggaccccaccagccaaggatgttgggcaggtagttacgggcaatgccacggaattcgagggaggtaatcggcacggattcgccgacgatcacggtggcgagaccacggaagatcaacatgccggccagagtggtaatgaagcccgggatgccgatgacggcgacccagaagccctgccagacgccgacgatcaggccgacgaccagagcgatgacgatggcgagcatccagttgactccggcgcgttccatcagcagtgcacacacaccaccgatgaaggctaccaaggaaccaaccgaaaggtcgatgtgggtggcgatgatgaccatcaccataccaatggccaggatgatcacgtaggcgttctgctggatcagggacacgaaggagttcggcttcagcagcacacctccggtcaggatctcgaaggccacgacgatgatcagcagtgcgccgacaataccgtattgacgggcattgttggcgaccgtggccagcaggccggtcttttcttctttctttgcaggtgttgcagttgcggcgctcatcaggctgccacctccctttccttggtcatacccttcatcaggtattcctgggtaaatccattcttctcgacattgtcggtgacgacaccgtaggacaccgtgtaaatgcggtcgcagataccgatgagctcaggcagctcggaggaaatcacgatgacggccttgcctgcatcggcaagcttatcgatgatttcgtagatctcatacttggcgccgacgtcgatgcctcgggtcggctcatcgaggatgaggatgtccggctgcgagataacccacttggcgagcagcactttctgctggttaccaccggagagggtggagacattcacatcgatgtcatgacacttgatgttgaagtccttgcggtactgttcgacttccttgcgctcaaggttgtcgtccacaaccccgcccttgctgatcttggtcagggaggccagggatgcgttctctcggatgttctgcagcaggttcagaccgttgcccttacgatcctcggtggcgtaggcgagacctgcgtcaatcgcggactgcacgttgggcatcttgacttccttgcccttgacgaacaccttgccggagatgttggaaccgtaagagtggccgaagatggacatggccatttcggtacgacccgcacccatcagacccgccagaccgacgatctcgccggcgtgcacgttgatgttcgcatggtctacgatcacgcgctccgcgtcgagcggatgatgcacggtccaatcctcgacgcgcaggtattcctcgcccggggtattggaggggtggttcgggtacaggttgtgcagcggacgacccaccatcttgcggatgagttcttcctggtcgagcggcgtctccggcgtcacgtacatcacaccgacggtcgaaccgtctcgaatgatggtgacattgtcggcaatggcggcgacctcgttgagtttatgagtgatgatgatgctggtcacgccctgctcgtcacgtagctgacgaaccaggtcaagcaggtgggcggaatcctcatcgttcagtgcagcggtcggctcatcgaggatgagcagcttcacgtccttggacaatgccttggcgatttcgacgagctgctgcttgccgacgccgatgtccataaccctggtatccgggtcttcgggaagtcccacacgatcgagcagcttcttcgcctcggcgcgggtcttgtcccagtcgatcacgccacccttggcctgctcgttgccgatgaagatgttctccgcaatggacaggaacgggctcaacgccagttcctgatgaatgattacgatgccgtcggcctcggaatcattaatagtatggtatttgcattccttgccatcaaaggtgattttgccggaatagctaccgtatgggtacacacccgaaagcacgttcatcagggtcgatttgcctgcaccgttctcgccgcagatggcgtggatctcgccgcgatcgacggaaagattcacatcggtgagggctttgaccggaccgaacgtcttcgtgatgttttccatcgtcaagatggtgtcatttgatgacatgtcatcactcctcgtcacagttctgtgttcatggacatgcggcgcatatcggctatgcgccgcatgtcattgtgtttgtttacggattgcctgatgaggactacttagtcagctcgtcgaatcgatcctgggtgatgtagttggccgtgaccagatcctggaggttgtccttggtgatgttctgggggtcaagcagcttggacgggacgtcgatgttgttgttgttgaacttgccgttcaggccggagacttccttgccctcggcgatctcgacgaccatgtcgtacacggcgtcagccagcttgttcacgtccttgaacacggtctcgccctgcttatccttggcgatgttggcaactgcgatctccatggcgtcctgaccggtgatgtacggccaggagtcggtgcccggcttcatgtcgggacgcttggattcgatggcgttgatcacaccctgggcgatgccgtcgtacggagtgaggaccgcgtcgagcttctcgccgtgggcgtaggtggagtcaaggatggattccatgtccttctgcgcctgctcggtcttccagctcatcacggagatcttctgccaatcctcaacggtgaagtccttggtcacgccaccctgaccgtgctgggacggggagacgagcacgcccttctcgaagtacggctgcagcagatcccaagcgcccttgaagaagtacttggcgttgttgtcatccggggaaccggtgaacagctcgatattgaacgggccggtggcgccatccttaagcttgagctggtcaatgagccacgtggcctcgagcacgccgacctgctccagctggaaggtggcgtagtagtcgacggcgtcggtgttcatgatcagtcgatcgtaggcgatgaccttggcgcctgcatcgcgggccttctcaacggcggggcccactgcggtgccgtccttggaagcgaccacgacgatcttggcgtcgttgttgaccatgttctcgatgtcagcgttctgctgggccggcttatcgtcggcgaaggacaggatgaccttgtatccggccttctccagcttggccttcaggttgttgccgtccttgttccaacgctcttcggacttggtcggcatcgaaatgccgatagtggcgcccttttcgatcttggcatcaccgccagttgcctggccgctacggctgccaccgcaggccgcgaggcccgcgcacatggcaacgcctgccaccacggcgacgatcttcttagtgaacttcatttgttctccttcatcttcgaggggatggcgaaccctccttggtcgcccgaacctgagaataacctcaggttcatctcatagaataccgtattgagttaagttgtcaaactcaagaaagcgaatttcccgtcgtttatgttcaaccaatgaacgcaatggcgatttttcgcgcatcacaaggcgacacgccgaaaaatccacgctctgcgcctcgctgtgcctcatgccggtaacgactacactgaactcttatggcaacaaggcttttcggttcgcagacctcgcttcgcgaggcaaaccgcgccaacttgctggccagcatccacaagttcggcgccatgacacaggtcgaactggcagaggtgacaggactgtccactgcgaccgtgtccacgctcgtccatcagcttgtcgacgaagaccagctggagaccaaaaacaccgttcgcaacggtcgcagagccactctggtgacccttgcacggcatcagggcctcggcgtcgggctttggatcgcgcgacgtcatcttacgctttctatcgttgacttctcgaagtcaatcatcgctgagcacacgctccccctgccgttgggccacaaggcggacacaacgctggaacgcgccatgctgctcatcaatgagaccctgagcagcatcgacgccgaagccagcgagctggtcggcatcggcgtggccgtggccgcaccggtggccaccaacgaccacaccatagcgattcccggcattctgcccggatgggacggcgtcgatatcacggccccgttgcgcacggcgttcaacgttcccgtatacgtcgataatgacgcgaatttcgcggcatacggcgaatcccgtatgggcgtggcggcaggcaaacgcaatttcgtatatatctcagccaacgacggggttggcgcaggcatcgtcatcaacggcgaaatcatgcatggcgtgaccggcctggccggtgaaatcggccatatccaggtcgacccgctgggcgccatctgttcgtgcggtaaccgcggctgccttgacaccgtcgtggcggaaaacaggctggtgcagttgctcagcgtcacacacggcaatatgacgctggatgatctggtgtcctttgccaacgaaggcgaccccggttgccgtcgcatcatcgccgacacggccgtgcgtatcggtcaggtggcggctgatctgtgcatcagcgtggatccggaggtcattgtgctcggcggcaagctggccatgaccggcgacgtattcatccaaccgttcaatgaagcgttgcagcgcatgctgttccctgatgccgtggcacccatcgatgtactcgtgtcatcccacccgaacgacaactgcgcgctaggcggcgcattatgcgccatcgagttctcggttcgcaatgacgtcagccagtgaccggtaccaggagaagagtgagaagaaggaacacaccatgaggaattcgagcacacctcctctgctgcggctggaggacatctgtgtgaagttcggcttcgtcgaggcgttgaaatcggtgaatctgtccatccaacgccaggaggtcgtcgccatcgtgggcgataacggcgcaggaaagtccactctgatcaaggtcatcgcgggatttctgcagccgggattcggccatatctatctcaacggcgaacaggtgatcattccctcgatcagggaggcggaccgcatgggcatcgcatcggtgttccaggggcaggagttctgcgacaacctggacgtggcctcgaacctgttcctcggcaaggagatcaatcagattggcatacgcgatgacgattcgatgaactcgcgtgcccgttccgtgctgaagaccctgagctcggcgattcgggtcggctcccctatcgcatccttatccgtcggccagcgccagaccgtggccatagcacgcacgctgctcaatgacccgcagcttattctgctggacgaaccgaccgccgcactgtcggtgatgcagtcggcggaagtgctcgcatatatcaagagactgcgctccgaaggccggtccgtggtgatggtctgccacgatctgccggatgtgttcgcggtatccgaccgcattgtcgtgatacgtcaggggcacgtcaccggcgtgcatcgaaccgtcgaaacgtcctatgaggagattatcgccgaaatcgccggcgtgaccaccgaacacgagtacgaggaaatcgctgagaacccggaattcgattccatggtcaggcagcggaaactcatcgaccgcactatcagcgcggcagtgagccatggcaccggccatgactcaccattagactaacgtcccgttgccggagcgacatcgtcagcgcagagccaggttggccgcgccgatcagaccggcatcctggcccgcagtggccgcgacgatcttggcatggccgcggtaggcgctgccttccaggaaacgctggtagttgtagcgggccggctccagcaggatgtcgcccacggccaccacgccgccgccgatcacgaacaggtccgggtcaagcacggcggaaacggcggccatggtgcggcccagccattcgccgatcttgccgaacgcatacaggccaagtacgtcaccttcctgagccgcttgggacaccatcggcccctccagtttggtgatgtcgccgccgcacagttccagaagacgcttggcgtcctgaggacgacggcgcacggcggacttggcgaagttctccagcgaggttcccgaagtgtaacgttcggcgcagccgcgcaggccgcagccgcagtggtcgccgtccgggaccatcggcaggtggccgagctcggcggccatgccgaaggagccgcggtagagctggccgttgatcacgatggcaccgccgaggccggtgcccacggtcagcgcgaccatgttggagctaccctggccggcgccgtgcacgaattcgccccatccggcgcagttggcgtcgttttcgacgatgaccggcacggcatggtcgatcagcgcgccgacgtgctcggacagatcgtagttgatccatgccggaatgttggcggagaaggtgagcgtcttgcgatccgcgctcacattgccggcggcggagatgccgacggcctcgatatcggtgtgtccggcggccacagcctcgcggtacacctcggcgatgtgctggttgatggcgtcggcgtccatcggcgtggggacgcgccagcgctggatgatgctgtcattttcatcgcagacggcggcggcgatcttggttcctccgatatcaatggcgagcgtggtcatggcttactccttgaagactttcgtaacatgcgagatagcgaaaatagtagcgagccgccatgacctcccaccgcggtttttccgtggttcgtcatgcgtcgcgaacattccaccgatgcgcttcctcatgcatttcacccgttgcaaacgggcgccccttaacgccggcatcggtgcggacggcgtgtcgaatcggatgcaatcactttcaccgtccttgcggatggcatcgaagaacggcaggaaacaaaaaaactcccgacatgcatcgggagtttggtggcgaccccggccggacttgaaccggtgacctccgccgtgacagggcggcgctctaaccaactgagctacggggccgtgcgtgcctcgctgaggcacaagaggatatgttacagcatcatcggattacgacacgccgtctgatacatcgttccttccaccggcgaaccgaccgcaggtgtggtggacggtatgcggaccatatcgttcgaccgcgcacggccgcactccccataagacagtagccgtcatgcgtcaacgcacgttgtgcgacgacgcggcacgacgcacggccaccgaggccagcaaaccgatgaacagcatgatgccggcgaccagaagcgtccactggccgccttcgacgaaccctgaagtcatcgcatcggcaatcttcggcgcctcgtcgccgaattgggccgccggtccatcaccgctgcggaacacgccgatcactccacccgccgaaccactgaccgcttgggccagaccgtcgccgaccttggcgggcagcccgagggattcgagccgcgccggcaatgttccgttgacggccatggccagcgacgctccggagatggccgaaccgacggcggtgccgagctgtcgaaccgtggactgggtggccgacccttcgccggactgcatgatcggcacttcggagagcaccacgctggtcagctgcgcggaggcgaagcccagacccagaccgtatgcggccatgggaacaagctgccaccacaccgacaatcccacaggcataaggaccgcgaccaaggcgacggcgatgatctcgatcacaagaccgagttgaatcacgccggccggggagagcctggcggccatgacatgggcctgcgcacctgcgacgatggaccccagacccatcacggccagcatcgcaccggcctgcagcgtgttgagcccgcgggcgttgatgaggtacagcggcagcatgaacaccagcgcgaattcgccggcggcgatggccgcagccgccagattaccccacgagaacgtcctgatgcggaacagggtcatgtccagcatgaccggccaaccggctttgccccgcgcggattcgaagacgatgaagacggccatcagaagcgcgccggcgatcaggcagatcggcaccggcgacaaccagtcacgattccagctcaacccgcccagcttcaactgcgttgaggtctgcttccaccagccgtaggtctcgccttcaataagaccgaacaccagcagggccgaggtcagggcagacagcaccacgcccggaatatccacaccgacacgatgggatcgggcatcccgtgcggcatccgcggcgccggcgaccgaggcgttcccaccggtttgcggcaccaggaagatggccgacacaaagaccgcgatgcccagcggcaagttcaccaggaaaatccaacgccatcccaaagtctcggtgaacacgccaccgagcagcggaccaagcgcggcggccgaactcatcaccgcgccccagacaccgaacgccgcggcgcggtacttgccacggaacagggcggacaccgtggacagggtgttcggcatgatcatcgcgcctccgatgccctgcagcacacgggcggcaagcagcatccccgcaccctgcgaggcggcggcgagcgccgaactcgccacgaagatcacggtaccggcttgaaacaccagtttgcgccctctggcgtcgcccaacttgccgaaaggcagcaacaacgcggcaagcacgatgttgtagagcgaggtgacccactgggcgtcggtcaggttaatgccgatgtcgtcgatgatggtggggatggagacattgacgatcgagctgtcgagcacgatcatggccaatcccagggccatcacccacagcgcgccccacggcggcgcctgggtgggcagcggcgacgaggccgtcggattcgttgaagagatcgaagacgcatcggcctgagtctgatgctgagatcgggatgcatgatccataacggggtttcctctcattgccatgattgcggcgaccgacacgcctatgcgccattcacggtacatccgcggcctagaccgtctcgccggatttcgcgggacattccgggcgttcagccatgggcgtaacctcggcggatcactgaagagaggagcaccaaagacggccgcgctattccagatgcgtcatttcgaaatgaaagcccggcagaacgccggaatcgcaacgatcgacaaatcgccagacgatacagggccgggctctcgctcaggaaacagggcatgcccagcg

SEQ ID NO: 843 - DNA, 12039 bp, Unknown
  R14_18m  MAG No. k141_10029
gccttggtggccttggagccggcgtttgcgccgatcaccacgtaatcggtcttcttgctcaccgaaccggccgccttgccgccgcgctcgataatcgcctctttggcggagtcgcgcgaatagccttccaacgaaccggtgaccaccacggttttgccggccagcgtctgcggcagcgaactggtctcggcctcgtcgacgcccacgccggcggcctgccaagcacgcaaagtcgcgccgcgccagtcgccgggctcgcgggcggcggcgaaccagttcaccaccgattcggcgatttccgggcccaccccgtcgatggccgtcagatcttcaatcgtggcgttttcgatggctgccagcgagcccatcgccgaggcgatcaggcgtgcggtaggcggaccgagccggcgaatcgacaacgcgaccagcacacgccacaggtcggcgtgacgggccttgtccatttcgtcgaacatcttgcgcgtgttttcgccgggccgaatgatcaccggcacatccgtgacgccggtgcgcgtggtcttgtggtccacgcgcacgatgaccgcgtcggccggcacgtcatactcgggataggaggctgcggcaaagcccggcatagtaccaagtggagcctcagccccggtaggtgcgccggtcgtctcgctggcggcacctccctgtgttccggcggattcgactgcggcctcttcttgcgcgcgttcggccaactgcttggccgtgagctttttggccggcgtgggcgcggtccagaaggcaggcacctgatgccacaggccagagccgccgacacgcttacgcacctttttcttcttaccgttcgcaccgaccgtctcatgcacttcgacgattgcggcctcacgccacacacgcacgtcgcgcagatcggcggaggtcaggtcgaacaacccggattcgttggacaacaccggcttctgcgcggccggcaattccagcccttccaccggctcatacgggtcaggctcttcgccgggggcgaccagcacctcggtgatgttcggcgcgtaggtcgccaccgaatcaggccggttctcctccgggttggtcagagcgatggccgactgttcacccagatgctcgatgtcgaacgccttgcgtgaggccagcgaaatcacgcgctcggtcaactgggccgggcagctttccacattcgggcagcggatgtccttgtcaccctccttggcgggtgccagtttcgcgccgcatgaagggcagaactcgggcatgacgaattcgcgcagctggccctcacgccctttgcgccgttcaagcaccgggccgaccagttcgggaatcacatcgccggccttgcgcaccaccacggtgtcgccgatcaggatgcccttgcgtttgacttcaaatccgttgtgcagcgtggtacgagccacggtggagccggccacgtagacaggtttgagcacggcgaccggcgtcacacggccggtacgccccacctgcacggtgatgttgagcagttcggtgttgacctcttcgggcgggtatttgtaggcgatggcccagcgcggcgcgcgcgaggtggcaccgagggcgcgctgcaggcccaggtcatcgaccttgacgacaatgccgtcgagcgcgtgctcgatgtcgccgcgatgctcgccgtagtactcgatcatgtccaggatctcctggaatgaggtcaccgcacgattgtgcggggagaccggcacgccccacctggtgtatagatcgtaggcttgcgactggtcggcgaccacatcatgggtgccgcgcggatggtccgccccccaggtgagctgccccagaccatgcgcatagaagctcaggcgacgggtggcggtgatgcgagggtctttttgacgcagcgagccggcggcggcgttgcgcgggttggcgaagggcgctcgtccggcgtcctcctgctcgttgttcagggtgtggaagtcatcccagcgcatgaacacttcgcctcggatttccacgaagtccggaacgtcttccttggggccgccgaggttggcgggaatggagccgatggttcgcacattcagggtgatgtcttcgccggtaacgccgtcgccgcgcgtcaagccctgttcaagcacgccgttgcgatagatgaggttcagggcgaggccgtcgattttgacctcgcagctcatgggcaggggcttggattcgggccaatcgaggtcgcgaatcaccgaatcgtaccaatccttgagctcttcgatggagaagacgtcatcaaggctcatcatgcggctggggtggcgcacggaggcgaagtcgttggagaaggagccgccgacgcgatgggtgggcgactgtggattgtccaatgaggggaacgccgcttcgagtcgttcgaggcaacgcatgcgcgcgtcgtaggcggcgtcggagctgacgggtgagtcgtcgatgtagtaggcgatctgatcggattccacccatgcggccacgcgagcccacaggcgggcggcggcctcagcggtcatcgtgttcacgtcgaaacggtcgaggcgtatcgcgtcgtcgtcagtgggctgcagtgcggctatccattgttcggagccaggggcaaaacgtgcaataccggtatcaggccggacctcggccacatccccatcgtcgaaatcccatgccagttgttcattcgtgctcatggttgtctatcctagcgggctcggctcccctcggccggctataccgtcaactcccctcaggcggctacgcggatagcgagcgcaggaactgggcttggatgatgtcgatgttgtcgccttcaccgtcattcatgcgggccacggccaccgagagcgtgcgggccggcacgaacatgccttcatccacgcacacgcgggcggcgtcacgcacgatgtcggccacttcgatatgcggccagaccggcagatcatgcgtggcaagcacatgggcggccacctccaccgattcaggcaccggtatgcactgcgagtccgcacgggaaaccagttcctgcagttcgctctccagcgaaccaatggccccgggagcgatgtgatcgctcataatgtaggctgcggcggctgtgtcgaaccggtcaagcatccattcggcgtacgcgaaccggtagtaggcgaacgcggcatcgtcgcggtccaaggccacgcgcagagcattcaggcaggcggcgcgtgccgaatcccaatcctcattgcgggccagttggatggcgagcttcagatgtgagagcgggtaggcgggcgcgtacgccaccatacggttgaggtgcgggatggccgcctcggcacccttgatctggctcaacacgtcagccagctccatgtgtgcgtagaacagattgtccgggatgagcaccgtacgctcgtccaatgtggcgaacagtcggttgtagaccacgcgctcggcataggagttgaagtatcgaggtacgccatggcctgccgcatacacctgatccaaatgggccacagccgcttcggccgcttcgatggcccgatcggcttggcccgagaacagcatgtctcgggcgcgcagacgctccttgtcaagatcgtcggcaagcgtgaacgtgaagtccggggtgtccttgccatcgatcaacgcactggtgacctgagaggccaaaccggtcagttcgggatcgcatatcgattcgatgatctgcatggctcgctgggccttttccacggagccgagtgacgtgttcctggcgatatcgtggaattcgttgacgccatgctgcagtaagtccactcgctggatagccagtccggcactattctgtgcgcccagcacgtgagcggtcgccgggctgaattgacggtcggccagttcgggctcctcctgggatccggtgggagagaaccggctgtccgccaagtcgaagtcggcgctgatgggtttcaggccgccttcgccgtccacgtccatcacggcaccgaacatgcggtaggtttcctcgggattgtcaagcccatcggtgtccagtcgcttgaggaaggcatcacgggtgaaggtgacggtgaccatattgcgcacggtgggattgcggcgcagcacgctcatcggatcatcgtccatgccggcggccccatcagcatcgtcagtgccgacgccctcgccgccgataccgcccaggccgtcgcctgcgccggtatcgtccggcatgccgaacgccatttcgtcgatatcgacgcccttcatcaggtcttcgaactgcgaatcgatggacgcggcgccatcggcgtcagcggattcggccgcggcctgatccgtagcatccgcagacggtccggtaccgttgcctgttcccccggccgtgccgcgttcgtcaccggacgccgcctgcccgaacgtctcctcatgggtgatggggcgggtcgggtcgccatggaaatcaccatctttggggtcggctttggaacccacacgccccaaatcgccactgcgcagatgttcgaaggcgcttagggcctcgctcatcatcgcctcgatggcggaatcctgttcggcaatcgcctcttcaagaccaatggaatcgatgtgcaacgacacctggcgcacggattcgctggtgccgaaactcagcgctgccatcatcaggccgacacgcaggttgtaggcggcgctcatcgacgcgcgttcggcgctgctcagcgcacgccacgtacggcgagtggtgtcataccggctatcgggcatcatcgaggtgccggcagtggtgaagccaatggccacttcacccgaatccaagcgcgaccggaactccacatcaaaccgatacggcaaccgtaaccggcgcaacagtgaggagagggtctgacgatacacccattcgtcgctcctcgccggcgaatacgaaggccgagcggcttgagtgttggtgtcgctcttattggtccgctctacagcgccctcaacactctcagtactttcagcgcccgcagcattcgtcacacccgaatccggcacgttctgctgggtcagcacatctcgaggatcagggaattcactgcgaatctgcccagccgtgcgtgcggcgatatcgaccagactcagcacggcccgacgctcctgctcgccatcatacgggtcaagcgccataatcgcagggttctcaatgagtttcatgtcgatttgcgcggcctcggcacgggtcaccgtatcttccgtagggttgcgccccaaggaagcgttgcgctccagccaagcgctcaccgcagcgaatcggttgaggttgccttcgatcttcaaggatttcagcgcctgcccgaatgccaaggacttatcccacgtaaagaaatagccgctcgaatacgtcgaggtgtacaggtgcaacggttcggcgccatgcaccgcttccagtcccggcgtggtgtcgagggcgccggcttcgcgcatcagatcggcgaagtgatcctccagaccggaggcccgcatgccgtgggctcgtgccgccaaagtgtcacgcaccgaacggcgaatcgcaccgattggcgcctcacggttgagacggcggaagatattgccggaaccgaatccgatgagcagaccattgatctgcggcaacatatacgtggcgaagaacgcgatggtaatggcatcgcggtattccaaatcatgacgcatcacaggcggcagattggcacgcatctgctcaagcgtgtaccggttgccggccttgagccatgaggcgagccacgtcatgcgtccggtgtcgtcacgccccaccacgccaccggtaatggccttcacgccgtcagcaccatgaccaaggccacgccccaaaccacgcccatgatgcagcgcacttcccaggccatggcctgcacgggagaaaccggaacgtgaacgcggctcgtcgctttcgcccagccgctcaccgtccggcagagtcacttccttttccttgccgaacatgaatcgcgcctgcatatcctgcacgtccatgttggggtcggtgcccacgaatacgcggccatgcgtatcggcgaacgccacctgcgcaaaatgatcgcggtcggggaaaatgccaagcgaaaagccacggcctctggtggcgggcagctgcgcccatccaagcaccagcccttccggcacgttctccaattcggggaaggtgcgtcgcttgattacaggactcagcgccactgcatggcgagtcagttcgtcgataatgccgcctttacgctcactggtctcccgcaaggcatcgccgaacggattcgtatcgtgcttcttcggcttggacagtcccagatcggccgcgagcgcgttcatcgaatccttcagcccgcccagcagtggcgtgcggttgtgcttcccatggtccgatgtacgttttggcatgattcacattgtctcttgtttgcccgacatcaagcccgaataaagcctatagaataaatgcgtgcattccatagaccacactcgcgcagaccgtccgatgccgtcgaatcatgaacggcacctgcccagccgcccggatacccggcaccggctgcgtttggtgcgcctgctgatcgccttgctggccgccgtcgccgccatcgccgccatggagtgcatcgtgttcaacctgccgttctggcgtacgctcggagcgagcacggatacgaacgccgtgcataacacgctgggttcgggtctcacgcgccggaatgatggcatgttgaccgtcaccgatccggccaaggcctatcttgaactgaccgcggacggcacgtcggattacctacgcatcgataccgagagcagcaaggtcatcgataaggcccgcgagcaggccgaggccgaatccaaagcgaacgacgataaggaagtcttcaaaccgctggcgaccattcatgtgcgcgcggatgtcgatggcatcaccggcaaggcccagtcgatgaatcccgacgctattcgcagccattatgtcaaggcgccgggtgccggcatcgtgcgtatttggattcaggaagagcgcggcgcgatcgtaccggtcaccgacgcccgcgccaacgtgcgcgtaccgttcgtcatcaattggatgcgcgtgctcgccatggccttggtgttgctgatgattgccgcctggaggccgggatcgcgcctgtggcgtatcacgcttgacccgtccagcactcggcaacgacttgctttcgtggggcttctggcgattcctaccctgcttatcggcgtatccatcatccacgaactgtggtacgcgtcttcgctcgtcttccacgtttccggcgattacacctatgatttcgaccagtatgggcatgtggccgatgcgctggtcgccggccggccctggctcgacttgccggttcccgaacaactggccgccaccgagcacccctatgacgtagccacacgtgcccagctactcgccaatggagccagtccgctctactgggattacgcgtattatgacggtcactggtattcctattttggcgtgttgcccgcagtgctgctgttcgtcccctatcgtctgctggccggtcataatctgccgacatccgccgccgagtatattctcgtgctgctgttcatcatcttcttctccttgctggtgctgcgcgtcatccatcgtgtgatgccgaagacttcggtggcggccgcgtcgttagtagtggtctcatcgttggtgagcgcgcaagtggggtatttgctgtatcgcacgaacttctatcagataccgttcgccgcatcgctgacgttgacgtcgctgggactatggctatggctcggcgcggacacgtcccgccgtccgctgagaccatcggaccgatggcaggcgggcgatgccaagcctctctccctgccacgactggccttgggcgccttgtgcattgcggcgaatttcggatgccgaccgacgttcaccttggccgcattgcttgcgttccccctgttctggccgcagattcgcgcgctgggcaccggtctgcgcacacgccgcatcaagccgttgcaggcgttgcgcgcgccgctggcggtaatcattcccgccattctcgtcgtgacgcctctgatggcgtggaacatggttcggttcgattccccgttcaatttcggcaatgcgtatcagttctccatatccgatatgacccggtataccaccccgtccgcggatatgcccgccaacatctggtattacctgttcctgccgctgcgcttcatggatcgtttcccgtggctggcgggctctcccgccccgatgccgcaatggggttattacgaggtgatggtcggcgcgattttcacggccacgccactgaccttgatggctttggcgctgcccctgctgcgcagattggaaacacacggcatgcggccatggctgatgtcttgcttggccgtggcggcggtgctggtcgtattcgacagccgcgtcggcggtttgggatggcggtattccgccgatttcggctggctgatctcgctggcgtccataccggggctactgtggctggtcaatgggcgcgaaccgagccggtcattggcgggggccaacgacgccgcttcaggcgatggcatcgcccgcgtcactccgtggcgttggctgatgcgctgggtcgtggtgctggccgtattgtgggcgctgggcatagccatactgagctgcttcgtgcagtcgcgcagcgatgcgatgatcgacaacaatccgacgctctggcatcaggttcagtcttggttcacgatgctctagtctcgtatcggcgtcggatcagatcctcataaaacgccacagcctcagccggcgctccgtcaaacacgaccgcgtgctcgtccagcaccagtatgcggtcgatggcgtattcgggccggcggatcatatccgtgtcatgcgtggcgaaaatcacctgcttgttgtagctgaacaacgccttggccacatgcgcggtgccaatctcatccaatcccttgctcggctcatccgccacaatcgcactcggctcaaagctcagcgcggccgcaatagccagcaggtgccgtttctcggagtccaattcgccggccttggccttggagacctgcaccaaatcaaaatgcgcgaacagattaccgatgcgcgcatgacgttctgactcgggcaccttgtgctttttcaacgcttcggaaacagcctcggaaatattcgccgcttggtagaaactgttcggaatctcctcgcggcgaactttgccgaccagattatcgatgcgcttcgcgtccttcttcacagccgggtcaagacgttcctcaccgcccgcaatggtcaccgtgccggcgttggccttcaacgaaccgtccagcagacccagcaatgtggatttgcctgcgccgttcagtccgatcacggccacccgccgctcgctgatggtgatgtccgtgggagcaagtcccacgtgcccatcatcatacgtatgcccggcctgttccaaagtgaacgtcagcgatgccgggtgtggcagttctttcggtctaaacaagaatcccatgccgccattgtacgtggagtacaggtgtggtgccggcaaacaccggcctatcgcagcaaagcggcgacggtattgagcacggcgcggatgccacgctcgaattcgtccggttcgggcagcagggaaacggccaggtatccattggaggtcatgtcgaagaagtagccgggctgtccggtgagttggtgctcgtcaatcagccgcaacaccagttcgttctcatcgatgacggaaggcactcgtaacagcacgttccagccgccttcggcccgtagcacgctgaccagcccgttgggatcggcgtcaagcaactcgtgcaacttggccaggttattgcgcacgcgctcccccacccgtctggtctgtgcgggcgcggcgttcaataatgcgggaatccgttcggcgatgatgtcgcccatcggcagataatcgtcggcgatgacgtccagtcgacgctgggcctcggcaacgtcctcggcaggtccggacacctgaatccacccgactttggcgtgcggcgcggccagcattttggagaatccgtctagggcgaaggtgagcacgccgcgctcccccgcgagccgtgcgtcgccggggaaaggttcgagagagtaatcgaagaacacttcatcggcgataagggcgatgccgtgctcacggcacaatgtcacgatacgtgcacgctcggttggttttacgtacgaaccggtcggattgttcgggttgatgagtaccaatgctctgacgcgttcgccaccgggctcgctgagtagccgctcgagttcggcgatgtcgatgaaccaggagccgtcgaattgtaactggtattcgaccgtatcgacgcattcaagccgtgcaatcgactcaatcagcggatagccgggtttgggtgccagcaccgcgtcgccggcatcgcaaagtaacttaatcagccacgaatacgcctcggacgtggagctcagcaggtacagggcgtccgggtcggcgccctcgatggcggtattcacattggtgaaagcggcatggcgctcgttcctgccctcgccggcggcgggcgaagccaactgagggctgcttgcgtctaccacgtttgccgtattgaggaatgcggccaatgattctcgtgccgcacgcggtccacgcgggtcggccgtatacacgctcggcaccaattcgggtgccaacccgtggcgggtcggattggaatcgttgagtttgctgagtgcgatgccgtttgccttggctgccgcctcggccgccgcaatgggattcggcgcagaaatatccacacgagaagagaaatgcacgctcataccctccacgataaaaccacccctgccgagccaggtatatcgaggcctcatatccaccagcatccagcactacgacaatcgtgcggcacggcagcggagtcgtcagacatactatgacttcaatccacatcgaataacggcctagctacattcattaggtcattttcgcgctcattaggtcactactagtcgagcctcacaattgttgatgcttgaaacgccgccattccgagcccattgcaattcaggtttggaatgggagtgacctaatgaacacataatcgacctaatgaacgaattactcattaaaaaaaggccgcccgaaatacttggacggccttacatatggtcaatacggctcctgcgccagcagaaataactcagctcactgctgcttggtgctggcgtagtaggcggcaccgacgatgccagcctggttacgcagcttggcgggcacaatcggggtcttgatatccacgtacggcaggaacttttcgctctgacggctcacgccgccgccgacggtgaacaggtccgggttgaagtacttttccataaggccgtagtacttggtcagacgcttggcccacttcttgtagcccagttcctcgttctcgcgaatcgcggaggaggcatacttctcggcgtccagatgcttggcgctcaggatgatgtgtccgagttcggtgttcgggatgagcacgccgttgtagatcaaggcggtgccgatgccggtgcccagtgtggtggcgatgaccagaccatcctggcccttggcggcaccgaactggacttcggccaggccggcggcgtcggcgtcgttcaccacgacgaccgggcggccgcaggcttcggagaacacttcagtaacgtccacgccaatccaagactggtcgaggttggccatgaagtcgagcttctggccgggcttgatcggcgcggggaaggcgatgccaacgggtgcggattcaggcacttcgaagtggtcgagctgctgcttgacgattttggccacggcctgaggcgtggagacctcgggagtgagaatcttcaatcgcggctcggcgaaatcgcccttggtcagatcgacaggtgcggccttgatgccggaaccgccaatgtcaacaccgaaagcctgtgcagtttcaatcatcgttgaccttcctttccatacgttttcatcagttcgtagggttgcgcccagtctaacgcga

SEQ ID NO: 844 - DNA, 9672 bp, Unknown
  R14_18m  MAG No. k141_10051
accggagacgccggccacgcccaccagttcgcccagcggaatgtcgatgtcaatgttcttcaggttatgcacgcgcgccccgcgcacttcgatcgtctgcggccgctgatcgttgctcatgctcggcactgctccgccgccaccctactgtctgacctattatcaagcgtcacgccgttacctctttctcgacctcgccctagaccgccgccgcacgagcttcatggtctccagtatcatcacgaccaacgacggcagtcgagaggctttcgctattgagcgccgcctctcgcatgctgttcgccgcgtcattaccgagactatccgcgtttagcataatgagttcacgggcggcgggcataatggcaatagaagtccatccacaccgaaggagccccgaggatggaactgcgcgtcctgcgatattttctggcggttgccgaggaaggcaatatcacatgggccgcgcagttgctgcgtatttcccagccgacgctctcccgtcagctcaaacagttggaagaggaattgggcgtcacgctgttcgaacgcggcagtcacaccatcacgctcaccgaggaaggccggatgctgcgcgagtgtgcgcagaccaagtcaatacgagttcctgcgcaccggcattacaaagcactggtcagcgatggttcccggaaaccacccgctggcggaacgcgaatcgttgaccccgcagaatctcaaggatgtgccgctgctgttcccgctgcgcacgcccgtacacaatctgctactgaactggttcgggcaatacgccgatcaaggcggagctcaacgccgggtatcacacgccggaacgcacccatgagcttttcgaggaactggtgagccatcctgttgaccccacgttccggttgaacgcgccattccgcaccgacttcggccgcaacgaacacgacacacagggagccgtcaagcgagggcgtgaaggtggcgaccacaccgaatacggccatgccgatcgcgccgccgcgcagaccggcagcttcgccaaggccggccatcgcctgcatatttccacaccggcggtggccaaacagatcaatacgttcgaaaaagaatacggtctgacgctgttcgaccgatcgcgcagtggagtgcaactcaccaaagccggcaaggagttcgtcgaggacgcgcagatgatcgtgcgccaatgcgaggagattctacgccgtgcgcaacagcgcagcaccgacggcatcgccaccgtccgccttggcgtttccattctgcgacccggccgccgcatcctcgacctatggcagcgcgatgccggcaaacacaccgacatccgcctggaactggtgtcgatgcccgatgactccgaagcgatcaacgacatcgtcacccatctcggcgaagacgtcgatctgatatccacggccttcgacaccggctattgggacgacaccggcaacaccctcgccctcgattccgagccgctgtgcgtggcggtgccgcgcaatcacgcactggcgagacatgcactactcacattgaaagacctcgaaggcacacgcatccgcatcctcaaacgccatcgcggcgccaacgacacggcccgggacctgctggaacaatatccggccatcgatctgatcgacatcgaccattacgacctcgacacgttcaacgactgcgccgaatccggcgacctgctcatctccaaaccgatgtgggccggcattcacccgcagctcgtcaacgtggccgtggactggcccgaaccggtcatcatgcactacggactgctctacccgctcgacgcaagcccggcgattcacacattatggaatttctcgccgcagacggagatctcgaaccgtgaccgtccaacgaaaccgcgccgatgctccggcgtgaagtgcggtaatctctaagaaaaggccattgtgtcgagatggcggggcaacgggcagcgttgcggatttgggctgaggccccgtcgcttgcggtgttgcatattgtgacgatgaggagggcagcatggaggccgcagagagcaggcagccgacgattttcgatgtcgctgcggaggccggagtctccaagtccatggtttcccgcgtgatgcgcggcgaagggggcgtgcgtcaggagaaggtggaccgtgtgctcgccgcggcgaagaagcttggatacgtgccgagcgccatggccagcgggctcgcctcgaagcgcacgaaaacgctgggagtggtggtcaggaacgcgaagctgcctttctatgggttccttcagggcgccatgcagaagcgggcgcgtgagcgcggctatcagatggtgtccatcagcggcgtggaggaactgtccgcggatgatgctcgccaggcgctgcgcgatttgatcgccctgcgcgtcgaggggctgatcgtatgctccgccatgcttgcggtggaggatttcatgccattcatcgaccggatcccgttcgtgatggccgggcacgaggacacgacgcgcaccgtgtcctcggtgttttgcgatgaggaggacggcggccgcaggctcgcgcaatacgtccacgacttcgggcaccgggaggtggcggtgtttctggtgcccagggaatactcggtcagccagtacggccgcggcatggccatgatcgagctgctcgggcagctcggcatccgcgtgaaggtgatggatatgaaaggggccgaagaggttggaacgctggtggacgaggtgctgtgccatcccaggatcaccgcgtatatgtgtccgtccgacgtggtcatgctcaatgtgatggacgagttgcgccggcgcgacgtttccgtgcctcaggatgtgtccgtcaccggctatgacgggtttggcccgctcgcgtcgccgtaccttggattcaccacatatcggcagcctttggaggagatcggttctcgcgctgtggatctggtgctcgagcgtctggatggcggggaccacgccgtggaggcgctgccagtaaagggggaattcatccacgggcgcaccgtggcgctgccacgttggaaagacgggcgatagacgggcaataggcggaacggaagccgcatcccgcgccgcaatcccaggcacccgcgcgtggtggcggcggagcgatagcacccgtcgcccgaggatgcatcacagtggcagcagatcgagcccgttggctgcggcgtagcccaggatccaggccatgggcagggttgccgtccatgcgatgaggatcctgcgcgcctcgccccagcggaccttgcgccagtcgttcgtctggcaggtgccgatgagcgcgcccgatatggactgggtcatgctgaccgggcttcccagcgccgagctgacgagcacggcggcggaggccgcccacagggtgacccagatctgccgggaatccggcacgatggtgccgcgctgcaatgcggctgctcccttgggcatgccggtgagcacgccggccaggaacgtcgcggcgacgattgcggtgatggcggcgctgtgcgtggcagttcccaaatcgactcccatggcggtgccgaacaggacgatcatcttctgcccgtcattgctgccataggcgatgcaggtgagcaggaatccgaggaagaccatggtggtcgaggactgcggggttctggattggaacagcaggtagatggtgcgggagacggcgaacgccaccagaggcgaaagtatcgctatcccgaggacgcgcagcaccagatgccattggggatgtccgccggcgaagccggctccggaggatgctccgaccagggcgagcgtgatcgaggtgggcacgccacctccgttgagcgccagcagggtggccgatgcggcgacgagcaccgtcgccagcaggagcggactttgtccgccggatccttcggaggagaccatggcgacgatggttcctccgactcggctgttggcggccggcagcaaggccaccgccgtcgccagcatcaggaagggggccgccgtgacgcggcgcgcggccttgaggttgatggccaccaggggagacccgtcgttccttcctccaagcaggcagaacaccaatgccaacatgggaataacccacatatctcaccctccttgctgagaacgctcccaatactgtaattattgagtttataaatattagcactgaattcagcgaacgttcatctttagcctgaaatggctgtatatcgtcgattagactttcttatgtcgaaaggatatactatgaatcactgggagcgctccgaagatggagtgacccccccccatacaacaacggatatagatagcagcaaatcagcaactcgatacgccgcgtccgtcatcggaacggctgcggctcacaaccaaaagacgtaaaagggtattacccatggctctcggcaaggcaatgccggagccggagaaagaaaggaagcgcgagatggcgtcatcaacccatttgtcgcaatccccgcacggcgccaagacgcacggcgaacgcacggcgaacgttctcgttgcgaagaatcgcctgaccggtgcggtcatgctggttccggcattggcattgctggtcgtgttcgtgttcggcccgctggtgcgcgtggtgatgatgagcatgcagggcacggacatcttcggttcgccctcaggcttcatcgggctggagaactacaggacggtcttcacggacccggcgtttgtcaaggtgcttatccagacgttcctctacgccgtgctggtcgtggcggggcgcatcgccttgggcgtgctgctggcgattctgctgacgaggcacatcatgggcatcaagatactgcgtgtggccatgacctcgatcgtcagcgtctcggtggcggccgcatcgctgggcttcctggcgttgttcggttcgagcggcgtgatcaattcgatcatcgagaaactgggcatccggccggtcgggttcctcaccgacgcgaagtgggcgttcttcacggtcaccttggtgaccatctggaccggtctcggattcgcgctgatcctgttgtgcgccgcgatcgacggtgtggaccaggagatcctggaggccgcgcgcatcgacggcgcgaacgaagcccgcatccagtggtccatcgtgctgccgctgatcacaccgacgctgttctatatcgccgtgaccacatgcatcgaggccctgcaggcgttcgcccagatcaacatcctgaccaagggcggaccaggccaggcgaccacgaccatcacctacaacatctacaccaccgcgttcaacgcgggcagcgcgaatttcggcatcgcgtccgcactgggcatcgtgctgttcctgttcgtgttcgtcctgacattgctgcagttccgcttcctggaaggcaaggtgaactactgatgatccgcaagacctcccccgtgagccagggcctgtgggccgtgctggccctgatcgtgaccgtgctggtcatgctgccggttctgtacatctacgtcggcgcgttcttcttcgacgccaacggcctgttcaagggcttcaccctgggcaatttcatgcgcgccatgtcccagatgcccctgacccagcagctgggcaacagcatcgttgtgaccgtctgccagaccgcgggccagattgtcaccgcgttcctcgcggcctacgcgatcgtgttctgcaacctgaggcgcccgggcatgtggatgatggtgttcctcatgagcatgatggtccccggcgagaccacgctcctgtcgaactatctgaacatcgccaactggggcctcatggacacgattccggcgatcttcctgccgttcctcgtgcagggcttcaccgtgttcctgttccgccaggcgttccgctccttccccaaggagctgcgcgaggcctccctgattgacggcgccggccacctgaggttcatggtcgacgtgctcctgcccatcgtcaagcccaccatcatcgccgcgaccatcaacgccatggtcgccgcctggaacggctacttctggcccctgctcgtgaccaacaagcccgagcaccgcaccatccaggtcggcatcacccagctgagcggcactgacggctccaacatcggcgtggtcctcgccggagcggccatcgcggtcatcccggccatgatcctcacgctcatgttcaacaagtccctgcgcggcatgagcgtcgcgggcagcatcaagtaacccctggccgcggccgtccacgcgacggctgcggatcgtgggccgatccccatccgtacgacacaagaaaaaccaacaaaaccattttttccggccggcggccgtcgaaggccgtccggcgcaacgagaaaggaaacctatcatgaggaagtcaaccctgctgaaggcggtcgccgtcgcggtcctgcccatgctcgccctgtccgcatgcggatccacgtcggacaccaacgccgacgccaagggcggcgagcagaccgtcacgttctggtactcgaactccggtccggccgtggacgccatcaaccagctcgtctccgagttcaacgacgcccacaagggcaagatcaaggtcgaggcctcctaccagggctcctattctgacgtgcagcagaagttctccgccgccgtccaggccaagtccaccccgtcgatcctgcagatgaacgacacgtccaccggctacatgatcgacagcaagatgaccaccccggtctacaagctcgccaagggcgactccgatttcgacaccgccgacctgcagcccgtggccctcaagtactacagcgacgacaacggcctgctgtccctgccgttcgccatcagccagcccgtgacctacatcaacaacaagctcgcccaggaggccggcctggacgtgtccaacccgccgaccacgttcgacgaggtcgtggactgggccaacaccatccacgagaagaccggcgcgtacggcttctcgatgaacatggtcgactcgtggattctggagatgctctccgccagccacggcgagctcatcgccaccccggacaacggccgcggcggcaaggacgtcaccggtgtgaacatgacctccaagactcagctcgacatgttccagaagatcgttgacatgttcaaggacggcaccgccctgaaccccggcaccgactctagctccatgatgaccgcgttcacctccgacaagctcggcctggtcctgacctcctccgcctcctacacgtccctgctgcccggcgactccacctcgaacgtgaccgtcgcccagttcccgcatgacgcctcgaacaagaaggccggcaccccgatcggcggcaactccctgtggatcgtggccgccgagcactccgaggccgagcagaaggccacctgggaattcggcaagtatatgatggccccgcacgcccaggccgtgttcgccaaggcctccggcaacctgttcgccaacaccaaggccgccgacgagaccgaaggcaaggaggccctggccgacccgaacgtcaaggtcttctacgagcagctcgaggccaacccgtccaccagcgtgtccctgggtgcccgcaccggcgcctacccgtccatccgcaaggacgtgatggcctccttcaacgaggtcgtcagcggctccaaggacctcaagaccgccatgcaggaggcccagacccagtccgctaaggacatcgccacctacaacaaggccgcaggcaagtaaacacccgcgatacccgcaacccaatcggccttcccgccccggtcttctctcccggggcgggaaggcccgtatcacccatagcctcccggcagcagcaaaggagccgacatgaacaccgcagccacccccattcgattcggacgcgaacaatacgcgcagatcaacgccaatctcaaccaggcatgcgcccgctcgccgttcgtcatcgccgcccaccgcggcaccccgcgcggcgacattcgcgagaacacgctcaacagcgtcctcgccaccaagcaagtcaacgcagacatcgccgagatcgacgtaatccgctccaccgacggcgaatacttcgcgttccacgacggcactgaaatggcccgtctacgcatcaccgacgacatcctgtccaagactgccgccgaactcgacgaactgcgctacaccgaataccccggagcctactacggcaacgtcgaacgggtcgcgcacatcctgtccaacgcgcccgacatcctcatcaacatcgaccgctcctggcgctactggggcagcggattcctcgactggctcgaccagttccacctggaaagcaagctcatcctcaaatgccccgtcaccggaggcttccagcaggccctccacgaccacgacgtcaaatacatgttcatgggcatgatccagaacccagacgaactcgatctgttcgtcgacgacgagcagatcaacaccgtcggcgtggaactcgtcgccaccaccgaggacaccccgctcgccgaccccgcgatcttcaacaggatcaacgaactcggcctgtacacgttcgtcaacgccctcgacctgggcaacggatactgcggcctcaagggcatggacgacacccgttccatcctcgaaggcccccaggcaggctggggcgccctcctcgccctcggcgccgacgtcatccagaccgactggcccgagaaactcgacgagtatcgccgggtcatcgcctgattccggcggttctccgcgatttcccctcagcggctcctctgcgtttccggaccagcctgaaacggcgcccgttccgggctggtccggaaacgcagaggccgctgccttcgccgcgacaacgaacgaaagaaggtgccacaatgccgtggttcagcgtcaagaacgcgctcgcagaggatcccgtcatggggctgctccgggaacaggtgacgacaacccgcaaaggagtgtccatcgcgttggacgccgtcgaggggcatctgagcgtcgatgaatccagaaagagcgtcaacgatatcgagcacgagggggacgaggtccgttccaaggtcgttcacgcgttggccaaggcctggaccacgccgttggaccgtgaggatttgttccgtttctcccgatccatcgacgacgtgctcgacaacacccgcgatttcatacgcgagatccatctttggaaaggacatgccggcgaacacgccaatgtcgcgttgacccacgtgaacgtcgccctgcacgatctggaactcgccgtgaccgcggaaggcgccgacatgcgccgatactgcctcgaggccagcaaggaatccgcccgcgtgcggcgcgcctacgaatcggggcttgcagccgtctacaccggcgaaatgagcatggacaccctgaaaacccgagatctgctgcgccgcgtcgacgtcataggcctgaggcttggggagtcctccgacgccatcctcgacgggctcgtcaaacgcgggctgtgactcaccggaataccgcaaagggaaaggcgcgaatatgcgcaggaaactgattcttgatttggatacgggcatcgacgacgcgctggcgatcggatccatcttctcgcgtcacagacagtgggccatatacaacggcagcttgatgcgttctccatccacttcgagttggcggggatgcagaacgtattccttgcccaatcgttgggcataccttttgcggaatttgtcgagcgaagatacgccgtatcg

SEQ ID NO: 845 - DNA, 4845 bp, Unknown
  R14_18m  MAG No. k141_10160
accgagcacgccgagcgcgtccacacgtcgctgtccggcacccagtctgccatcgtgctgaccgacggtcttgaccagtccatcgacgcggccaacgcctacgccgccgaacaccttgagattcagaccaaggatgccgatgctgtcgtcaagcgtatcaagaacgccggtgccatcttccgcggcccgtactccccggtgccgctgggcgactacatgtccggttccaaccacgtgctgcccaccggcggcaccgcccgcttcgccgcaggcctcggcgtgcacacgttcatgaagccggtcgaagtcatcgaatacgacgaggaaggcctcaaggctctcgccgcccgcatcaacgccttcgcggtgtccgaggacctgcccgcccacggcgagtgcgtgctctcccgcttcgtcaaggatccgtatgacaaggccaccctgcgcgagcaggagaggggagccggtctgcgatgagctcgattcccgaaaacctgccgctgcgcaacgacctgatcggtgaggagccgtacggcgctccccagctggacgtgccggtgtgcctgaacgtcaacgagaacccgtatgcgccggacccggccgtatgcgacaccatcgccaagcgtgtgcgtgaaatcgcccccacactcaaccgatacccggaccgtgagcacattgaattgcgtcaggcattctccgattacctggcccgtgaatccggtacccgtctggacgtggacgagctgtggggcgcgaacggctccaacgagatcatgctccagctgttccaggctttcggcggcccgggccgcaccgcactcggtgccgacccgacgtactccatgtacccggagtacgctcgcgacaccttcaccggttggaagctcgcccaccgcaacgccgacttcacgttgaacgtcgacaaggtgcttgaggccatcgccgaggtcaagccctcgatggtgctgctcaccagtccgaacaacccgaccggcaccccgttgccgatggaggatatcgagcgtattctcgccgcctgcgaaaccgccgaagtggccggcgcgggtgagggcgtgcacccgattctcgtcatcgatgaagcgtacgtggaattccgcaagcccggcaccccgagcgccgtgagcctgatcaaggaccacccgaacctggccgtaagccgcaccatgagcaaggcctttgccttcgccggcgcgcgagtcggctacctagccgcatccaagggcatcatcgactgcgtgcgcatcgtacgtatgccgtaccacctgtccgccgtgacccaggccgccgcactggccgccttcgaacacaccgatgaacagctgagccgtgtcgagcatctgcgcgaaacccgcgaggccaccgccgcatggctcaaggaacagacctacaaggaccagccgcttgaagtggccgaatccggctcgaacttcctgctgttcggcgggcacttcgacaagcgcgaagccatcttcgacgagctcctgaagcgcggcgtactcatccgcgtggtcggaccggacggttggctgcgcgtgtgcatgggtaccgacgaggagatggaaaccttccgtaacgcccttgttgaagcgcttcgtatagtggaagcagcataagggacgtttctttccgattgcggcgagacccgaagcgattcgagtcccgccgcaatccaatatgacgaatcacacaggagacatgatggcaagaaccgcgcacatcgtccgcgaaaccagcgaatcacacatcgatctcgaactgaacctcgacggcaccggcaaaaccgatatcgatacatccgtgccgttctacaaccatatgatgaccgcgctcggcaagcattcgctgatcgacctgaccatccacgcccacggcgacaccgacatcgacgtgcaccacaccgtggaagatacggccatcgtgttcggcgaagctctgaagcgggccctcggcgacaagaaaggcatccgccgcttcgccgacgccaccgtgccgctcgacgaggcgctggccaaggccgtggtcgacatttccggccgcccgtactgcgtgtgcagcggcgagcccgaaggctacgaattctgcatgatcggcggccacttcaccggctctctggtccgccacgtcatggaatccatcgccttccacgccggcatctgcctgcacatgcaggtgctcgccggccgtgatccgcatcacatcgccgaagccgaattcaaggcgctggcccgtgcgctgcgcttcgccgtggaaatcgacccgcgtgtagacggcgtgcccagcaccaagggagccctgtgatggccgacgacaagttcgatccggacgaatcgcacttctccgacgaggagcttgaggccgcgctcgccggattcgagaaagaattcgcggacgattcggcatccggcgatgccagtgataccagtgacgccgataaaacggcggacgctgcttcagcgaagtccgattccgacgcgaatgatgatacggctgataaggcttccgctgattccggccagcctatgaccgacgacgtcaccgggtcggtcgctgatgcggtgaacgaggccatggccgacgtggtcgacccctcgctcggcttcgacaacgaactcgctggactgttgggtaacaaggcgaaggtggcgttgatcgtcacccgtcttgcctccgccgaactgttggccgcgttctgccagctgtcagacatctccgccgcatgcatcggtgccaatcagggggccgtcgcggtgctgaagaatctggacggcgacggcccggaagccgcagccaaggacctgaccaccgtggtatccggcatggccgtgattcttgcagtcaatcgtgccgacaagctcgaagtggccatgtacgtgcagggagaggccggacagagtttcgcgccgcccgtgctgttcacctccacgccgcgcttcgtcgaggacctgatgctcggcatcgtaaccctgaaccaactcaagacccaagggttcgaagtggtggattccgctggactcgaccatgaccaggcgatgcagattctcgccaaccataccaagcgtgggcgtggcggacgcggctcccgcatcgaatagacgccaaccaaccagtaggggataggagagaatatgaccacagcggttgttttcgattacggtttcggcaatgtacgttccatggtgcgtgcgctcgccaatcttggcgtcgacaccaccctcacctccgactaccggcagtcgttggaggccgacggtctggtagtgccgggcgtgggcgcgttcgccgcatgcatggaaggactgaagaaggtcgacggcgaccgtgtgatctatgatcgcatccgcgccggccgcccggtgcttggcgtgtgcgtgggcgagcagatcatgttcgaacacggtctggagcacggagcccatgccgcgggcatcgggctgatcggcggaacggtgaacctgctggacgccgacgtggtgcctcacatgggatgggacacgatcgaggccgcccccgattcggtgctgctcaacggcgtggagaatgaacggttttacttcgtgcactcctacgccgcgatggaagtgaagccggcggatacgtcccgcttcgacattgatctgagcggtgcgcccgaacgcgtgagctggtgctcgtacggccggtcgcgtttcgtggccgcctacgaacacggcccgctgtccgccacgcaattccacccggaaaagtccggggacgctggctcccagctcctcaagaactggattgccacgctgtaaaaagcatgaagctcccctctgacgagagagctcaaattatgtataagtaactgaagaaaggctcttcttatgtcgttgactctgctgcccgccgtcgatgtacgcgatggcaaggccgtgcgcctgcgccaaggcgaatccggttccgaaaccgattacggttcgccgtttgaggccgcccgtacctgggttgaggccggtgccgaatggattcacctggtcgaccttgatgccgctttcggtacgggcaacaatcgcgatcagctgcgtgagatcgttcatgagcttggcgaccgggtgaacatcgaactgtccggcggcgtgcgcgatgacgcttcgttggacgcggcccttgaggccggtgccgcccgagtgaacatcggcaccgccgctttggagaacccggattggaccgcttcggtcatcaagaagtacggcgaccgtgtggctgttggtctggatgtgcgcggtcacacactggcggcgcgcggctggacgcgcgaaggcggcgacctgtttgagaccatgaagttccttgactccgtgggctgctcgcgttacgtggtcaccgacgtggccaaggacggcatgatgtccggcccgaacatccaactgctgcgtgaagtcgccgaacgcaccgacgccaaggtcacggcctccggtggtatctccaagctggacgatttgcgcgccatcaaggaactggccgagatcggcgtcgattccgccatcctcggcaagtcgttatacgcacgtgcgttcacgctccaggaggcgctcgcagtcgcgaagtaggcaaaggactcgccttagcgagactgttaagctacctttgctcagctatcgcttcactcaggcctcgcctacggacagcccattgggctgtccgcttaacggctcagcaaggaaggtcgccggatttgaggagctttttgaagacggtgtagtcttcatcattctgttcggcatagctgacggcgaacgaggcaatggcctgatcgaattcgtcggtgccacccatgtaattggcgatcgcgatcgaatcgccggt

SEQ ID NO: 846 - DNA, 9836 bp, Unknown
  R14_18m  MAG No. k141_10249
gggttcatggcgtcggagccggagaaggtggccgacgtcgggaatcggaaatcataggtggtgactttggtaataacgctcacgatgcgcttccttctttggaaaatggttaatctcaaaaagggaggacggccattcggccgccctccctagcagtggcgggcaaccggatgtcagtcggcgtcggtggtgaccttgaagccgttatcctttgcgtaggtcttgagcttctgctgagccttggccatagcgccgaccatgtcaccgccaaccttcatttcaggagtgatgacatccttatatacgactccaacctgagacatgaacggaagatactcccaatcagtattgaccttgtccatggactcgaagtagacggagttcacgtcagtattgacaaagtatccatctgtttccttcatgttgcggatgtcttcgctatcttggtaagcggaagctgccatgaagtagttgccgtggttgttatcctgccaagactgaattgcttccttgtcggaatcaagccagttgatgaaggcaagggctgcagcctgcttgtccttagggcatgccgcggaaacactcatcatggagccgacggaagaagacttgaaatcatcggcagaatcaccgaatgcaggtggcagcgttacctgaatcagacccttaagagatggattctgtcccttgtaggagttgccttgccagttctgagaaatataagtggcataggtgccctcattcgtggcgcggttgaacgcatcggtccagcctggagcggcctccatgaccccatcctgaaggcacttttgcaggaattcaatgaactccttggtagtgccagaagtcatgctcaagctgatgtcatcgacagaattgaccttccaagggcgcgcaccagccgaacgcagcaaatccgtaaagcaggagatatcgttattgatgaggacgcccatgtacttgctgggatcttccttgtgaagtttgacgccttcttcatagaattcctgccaagtggttggcaccttgagattatgctcgtcgagaatgtccttacgcacatacatggccaaaggagtggcgtcagtcggcacgccccacaggccaccagcataatgcacctggctccaagcggtctttgcataaagcttgctccacgccttttcgatatcatcgttggcgaaattcagcagagctccagaaatagcgtactgttcgaatcggtcagcactcatctgcacgacatccggaacatctttattggcagcaacgacattctggaacttggtgaaatggtcgcttgccgcgccggtgttggtgaatttaattttgatgtgcgggtacttcttctggaaagcttcaatcggccctgccatctgcttcccggagaatccccatacgttcagctcgatttttttggaagtatcggtgagagcgttgttaatgtcttctacagtgactgcagttttagtgtccttggcaccagtacttgagccacaagccgcaacgctggctaccatagtaagcgccgccagcgcactgacgattttggtcatcttcttcatgattactcctttgtgtgtcatgaattactgtcttattgttgttcttcaaatggatgtggatgccgcacggtcattagagcaacgaatgggtgatcgccaataaccgtgcggcgaggattcactgcttgactgcaccagccgaaaggccagactgccagtacttctgcaggaacatgaatgcgatgatcaacggggcaactgcaatgaggcatccggtgacaatgtagttgttcggaatctgaccgtccgcggtaccttcggcacccatcttcaaccacatgttcaaaccgaccgtcatcgggtagtcgttggtgtccgagagcatgatcagcggcaggaagtagttgttccagacaccgaccagcgtgaacagcagtacggtgacgaaacctggagacagcagcgggaaggcaaccttccagaagatggtccacgaatttgcaccatcgagcttagccgcttcaaggagagaagtaggcaccgatgtctgcgcataaataatcatcaggtacagtccgaacggcgtggccagctgtggaataatcactgcccatggggtaccaaccagaccaatcttcgagtacatgaggaacagcgggacagagatgaccgtggccggaatggacatgaatgccaaggtgatcgccaacagactattacgtccggggaaccgcattgtggcaatggcgtagcctgcgagtgtggcgatgatagtggcaccaaatccggcgacaactgcatacatcactgtgttaagcaaccaccgtgcgtatgtaccatgctgatatgcaagagtttcctgaacattctgccagaacacattcttgtcatcgaaccacagaccaaaggagctaaacatgccctcgttggtctttgtcgcagagaagaacacccacagcaacggcacgagacagtagatgaccatcaggcccatgataatgtgcagcagccagttaagcacacgctgcttgccggtcagctttggagctgcctcacgctgctgcatacgcttatagcgttggctcgccttgagcgccagcttagcgtctctgcgctgcagcgacttggaacgtggttttgcgattgcttcactcatcacttgttctcccacttattgccaatgaccttcacgactgcgacaagacccataacgatgacaccaatcaccaaggagaccgctgcagcatagttgaggttctggccgttgaacgcaaggttatatgcgtagagattcggcgtgtagttactggtgatcacattcggcgcggaattcatcaagatgctcggttcgttgaacaactgaagcgtgccgatcaccgagaagagcacggtcatcataatggatcccttaatctgcggaatctttaccgaccatgcgatacgcagctcggatgcgccatcgatacgagcggattcgtacagctcgttcggaataccgatcagtgcagaataataaatcagcatgttgtagccaagagaacaccaagtgcagatgtttgcgatggcgaacagcatgagcttttcagaaagcatgttcggcgcagcggccccgatcatagacgcaatctggccgacaaggccatacttgtcgccgtagatatatccccacatcagtgctgcgatgacgcctgggacggcataaggcaggaacagcaggattcgcggcactgcgatatggcggattctctgggaatccagaatgagcgccgccacaagggaaaggatcaaattgagaggaatctgaatcgccgcataaatcagcactcttctgaaaccgctccacagcgcttcatccttaaatgcagctatgaagttgtcgaagcctgcgaatgtggtgccgccaagaagggactgcttgaagaagctgagataaagcgcgtagaacatcgggatgatcatgccgaataggaagaccaccacgtatggaagacaatataacatgcctatgtactcgcgcttcggcttgcgcatcccggaagtatccggtttcgccgttgcatttgtcatagtttttctctttcttcttaacccgtctgaatgagcccgccaacaacatcgttgccattgccgtttcattcatcggtacgttcaatatacaaggttttacaaaaaagagcaaataaaacttcgttgcgcgtggcgaaattttctttatcttgttttttcgccttaaaagggctttattgcaacgatatgcacaaatcgtactcatcgaagaaacagcagccaatccatgtctacaacacccatttccgctatatagacagcaatacgccgataaaaaagctgttttagagtagcgaaaatttcgctactctatatataacgctttttttgcagcgtcgcatacgaaaagagaagagtcatggccacaatcaaaacaacaaacagaccgaaggtctccgacatcgcccaagcggcgggagtatcccccgctaccgtgtccaaggtcatcaacggccgtgatggagtctccgacgagacccgcgatagggtggaactgctcctcgaagaagctggattccgcaaaaaacttcccacaacaaaaaccatacggtcaatcgaactggtcgtcagcgaaatgaccaacaacggcaccgtggaaatggtcaaggagacagcttcatacgccagagattttggcctcggcatcaccgtaagctgcgccggaccggattccggagaatacgcaacaagaaacgaggccagcagctgcctccgtaacgccatcgaacgcaacccactaggcgtcatacttctcttatcgaatatctcatcggccgaggaatcgctgctgcagacgaggaacatcccatatgtgattgtcgatccggtcggccaggtctccgctgacgcattgggagtgggcattgataactggaccgggggaatgctcgccacgcaatatttcatatcattggggcatcgacgaatcgccgtcatcactggccctactaattcacagtcctcgcaggcgcgactgagcggatacatggcggcgctgcagaaaaacggcatcagcgcggatccacatctcatcaaggttggcgactacgtgtctgacaaggcatacaaggcggcatgcgatctcctggaaatgagggagcaggaccgaccgaccgccatcttcgcgttcaacgatctcggcgcgatcaacgtctatcgcgccgcccgacagcacggcatcagtctgcccgaacaattatcgatcatcggtttcgacgatgtctatcctgcggcaagcatgtgtccatccctgacgaccatcaggcagccattcgacctcatcgccagacaatgcatcaacctgattctcaaagcgcgggaaggaaaggtggaacagaattacttcatttttcccacgcagcttgtcgaacgcgaaagctgcgtatcgccagcacgtccgtaactcagcaacggaacacagaatcagcttccacgaagcacccatgcatatgcaatccgtctctggcacaagcatttacttctgtttaccagatgaaaatacaatatcgtgcgattacgggggcgcagccctagcctcagctggaggtcaggaaggtttcgttgcctcgggtgaagtcgaggacggcaccggcgagttggacctcgtctgccagttcggggtcggcagccagaagctgctcggcacgggtgcgggcgtcggcgatcatgtcggcgtccttgaccacgcgcaggagcttcaggctggacttgccgccggattgggcgtcgccgagcacatcgccggcaccgcggaattccaagtcggcttgggcgatttcggcaccgtcgagcgagtggtgaatcacttcgagccgttgctcggccggggagccgggttccgcacgggaaataaggaacgcccacgagttggtgccgccacgccccacgcggccgcgcagctgatgcaactgagagaggccgtatcggtcggcatcaaagatcacgatgcagctggcctgtttcacatccacaccgacttcgatcaccgtggtggacaccagaatcggagtctcgccgccggcaaaatcggccatgacctgggttttgacgtcatccttgtcgcggccggtcagagtcgcaaaccgaatgccttggaattgcgggagtttctgcaaccggtcggcgatttcggccaccgcatgcaatggcgggcgagccacggtttcgccgttttcgtcgaaggtttcgtaggggtcgtcgatgccgatggcgtcggccgccgcgcgcgttgcacggccgcccgcagctgtgcgggcactggaaccagatgctgcggcgcgtccgcgggcagaaccggctgctgccgaaacgccggaaccgccttcgttcccctcatcatccgcatcaatgcgcgggcacacgatataggcccgctcccccgcgtcgactcgcgcgcgaatgtgcgcgaacatacggcccatggtggcggcgtcggcctcattgaccaccacggtgcgaatcggtttgcggccgccaggcaattcggtgagccaggaaatatcgagatcgccaaaccaagtcatggcggcggtgcgcgggatgggcgtggcggtcatcaccaatagatgcggcgtggtgccgtcatcggttttggcgttgagactttcgcgctgttccacaccgaaccggtgctgctcgtcgattaccaccaaggccaagtgcggggcttggaaggtcttggaaaacgccgcgtgcgtggccacgataatgcccggctcgccactggacgccgcagcaagtgctttacgtcgcgcagcaagcttcatgccgcccgtcaacaacgtgactggaatcgctggcttgagttgctccaccatccggccaatggtttcggcatgctgctcggccagcacctgagtcggggcaacaagcacggcctgatagccggcgtctacggcttggagcatggcagcgagcgccactacggttttgccggagcccacctcgccttgcagcagacgctgcattggccagtcatgagccaaatcggcggcaatatcatgaataacctgctgctgccctgcagtgagggagaacggcagggatgcgatgaactgatcgcgcagactgtcggttaccaacgggcaagagtgagccgcggatttatgggcgtgcgacctggctttaagcagcgaggtctgcgaaacgaaagcctcctcatagcgcagggtttcgatggcctccttgaaccgggtcgtggaggccggatcatgaatggccaggaacgcctcagcccgatgcatgaggttcttggccttgcgcaccgattcgggcagcacatctgggatggattgggagagcgcctcagcaccggattcggcggtcgtgccggaattctcttccccgttttggacggcgatggtgtcggtcgtgggagccacaatgccggctgacccagcgccagcgagttgcccgtcaggcgtggatgacgtgcgggcccccatcatccacagcaatcccagaatcgtctcatgaatatgttcggacgagatacgcgaactggcgtgatataccgggcggggccggcagacgcgggtaagcgcctcttgcacggtatcggcgtcgtatttcagcgcggccccggaagaggcagccgcggccggcggatacgcggactgcacactggcatacggatcggtacttcccgcaaacgcaccattgccggatgccgcaccccgagcgtaaccctcaagccccgctcctgctccggccgacccgggcgcgacagtgaggatttcggggtgcgtgaattgcagctgccccatgtattcgctgggcataccggagaccaccacagacgtgccggcgcgcagccgcatgctgacccaatccacatacgatttacgatacgaaaagaacgtgagccgggccgtgctgccgggtacgcgacgcgaacgggcaaagtcggcgtcgtcaaccgtcgcctcgagtcggtagccgcggcgagcgttcatcggcaccacgcgcatgtctcgtatcacggcggcaaatgccatctgctggccgggtgcggcctcgcggatggcgcgaagcggcaccggttcggtgacgcggaagggatagtaggtcagggcgtcgccgacagtgacgattcccagcgatttgagcgcggacacgcgacgcttgttggtgaccagcgaagcgagagtggtgtccatagtgatgctcatattggcctattctattcgcacggcctctttaggccgcagaaacaacaaaacccgctgagccgaagctcaaacgggttttgctccacgttagtacgcgattcacgcggccacgcgctgaaccttgccggccttgaggcacttgacgcacacgcgcagacgagtgttctcgccatcaatcgtggtgcgtacagactgcaggttcgggcggaagctacgcttggtacgacggtgcgaatgggaaacggtgaaaccggtctgcggtcccttgccgcacactgcgcaacgagctgccatgatggactcccttaaccttgatgtgtcaagtctttcacgcattcgaccgccggtttcacccgacatgccgaacacacaacttcacaaatatatagcccaataccgacaaccgcaactcttgcgtgtatcatgggcgaacttcggcggttcacgcgcggttcgagcgtaacttgcgagtgggccatcagcggttcgcgagcggttcggcattggttcgccagcggtccgcaagtagttcgccagcagttcgccagcggcgaattacgctgcaaatcgtagcgtttacccgataaaacacgccggactgcctattccgcatccaacaaactctcatataatctcggtataagagacggcaagggacgaaggggtcctcgtgcaacttacgacgaaggaggctgtcatgttgaatctcaggcgaggtatcggcactcacgagcccagcgtgatttcactgggtcaagtctgggtggacatcatgctcaatgtggacgaggtgccggcacagggcggattcgccgtggccgatcatccgaagccctccattggcggcagctatcgcgtactgcaggcggccagccgcatgggcgtgccgaccgagcacgccggcattctgggcaacggcctgtgggcgcatttcatccgccagtcattccaggacaacggcattacgcatatcggccaggatcgtcttgatgaggattccggtttccgcgtggtgctgagctccggcgcgccgaagaagacgttcatcgcttcctatggcgccgaggctcatggcgacgcggacacgttcaacacgctggagccgcagcccaaagacgtggtgcacatcagcggcaacacactgatggaccacacggccaccggcgtggacggattcctactcaaggccggtaccgacccggctgcacgcgactacacgctggtgatcaatcccaccaatacgttgcgtctggtcaatgaccatatgctcgaggacctggtgctcgcacgcccggtctggtcctgcaaccgtcaggaggccatgacgctggccgagcgcctgggcgcgccgatcgacgacagcaaggtcaccatcggcggtggactcgacgacttcatgcaccagttgtgtgacggcttgggcactacactgcgcgcgccgctggtggtgcgtgtcggcgcccgcggcgcttggattcgtgagccaggtggcgagacgattcatatcgagggatacccgaccaaggccgtacacacccgttcggcgggcggttgccacaccggcgtgatgtgcgcgatgctggcaaagggccatagtctggccgaatcggtaaagatcgccaacgcggcggcatccatcgccatccagcgcagcctcaacggcgtgccgcaatgccccgattatgacgaggccatcgcgctgatcggtgaatagtttccggacgattgagtggatttcctcatctgggggaatccacgatcggctcccttcagtccgcttcgcggccagctcccctcagcgaggggagctatttttttgctctggctcccctaagaaaggggcccggcattattcacccgccgttcaactttggcggttttctaccctagtccgcgcttctacgatagattgagttgaatactgtcgaggagtgcatatgactgatcccgcaaatgtccacgaaccggtgccgcaaagcgccaaactgaccgcccgcgagaagaagtggatcatctacgacgtcggcaactcggcattcgtgctgctgtccaccgccgtcatccccatttacgccaaatcgctgatgccggcgga

SEQ ID NO: 847 - DNA, 9324 bp, Unknown
  R14_18m  MAG No. k141_10283
gatacacaaagccccgtgacgaatcccgtcacggggcttttaccgttttaagccccgcctagtacactcgtcaccatgcgagtgatcggacagcgaatcaaaagaatggcaaccatagcagtgactgccatcctttccgtatccctggcctcgtgcgggcaggccacggacgacaaccgtacggagatcagcgtatggagctgggaaccgagcatgggggaggtcatccgccgtttcgaaaaagccaatccggacatccgcgtgaaatggaccaatatctccggctacggcaatcttaataccgccattcaagacggttacggcacgccggacgtggctcaaatcgaatactatgcactgttgcagtacgcggtctccggccaattgcttgatctgaccgacaaaatcggctcggattattccaacttctttaccctcggcacatggtcgtccgtgcagctcgccggccgtacctatggactgcccatggattcgggcccgatgggcttcttctacaacgaagacgtgttccgccaagccggcgtggacgccaccaagatcaagacttgggatgactattacgaggccgccgaaaagctcaaggagatcggcgcgtatatcgccgccgactcgggcgacggcagtttctatgacgcgatggtctggctcgccggtggtcagccgttccacacgtcggccgacggcaaaaccgtgaccatcgatttggatgaggatgccggcacccaacggttcaccgaattctggcagaaaatgatcgatgaggggcttgttgacactacctccgccacatggtcggatcggtggaaaagcagagtgggcaccggcaccatcgcctccgtgttctctggggcttggatgccgtcgttgctgctgtccaatgtgccgggcgcggccggtctgtggcgcgtggctcccatgcccacctatggtgggcagcctgccaacgccgaaaatggcggctcggcgctgaccgtgttgcaactgacccgtaagccggatgcggcctatcgtttcgtggactttgtggcgcatgacgcccaaggcattagcgcgcgtgtagacggcggtgccttcccggccgattacgccaccctgaattccgctgattttctggataaaaccacgattaccaatgaccgtggcattgaaatcccgtatttcggcgggcagaagttcaaccgggtactgtcggaggccgccgaggatgtgtcggtcggataccagtatctgccattcgaagtgtatgcgcgcagtgacttcaaatcgacggtgggccaggcatacgagtggtccggcagtttccacgcctatcagcagcgacaggaagccattgagatgggcatgaaggacgaggaaggcaacccgctcgaaccattggagaagcccggcaagaaagtcagtctctccgacggcctggcccaatggcagaaagacctccgagaatacggcctcaatcagggctttacgattaagtagggttttgagtaggtttttcggggagggacggaatcgactgcgctatgcgcggccgatgcctgcacaccgcgttacttcacattgcgcgagtagatgtatgccatgcctttgaagatcaggtctgaatcgtagacgtcgatcatgtcggtgtcgttcttgaaaatgcggctgagccctcccgtggctaccacttggaacggctcatcgatttccttgcggaactgctgaatcgtgcgctcaatgccaccgaggaacgtgtaatacagtccggcctgcatagcagtgcgcgtattggtggccagaatcgactgcggttgcgtgatctccacttccggcagctgggcggtctgcccccacaacgcctcggccccggtgcggatgcccgtggtgatgaagccggagcgaatcgtgccggaaccgtccacatagttgaacgtggtggcggtgccgaagtcggccaccagcaccgggccgccataggtgtggtaggcgccggcgcagtcggcgatgcagtcagagcccaaggttttggggtcgtcgagacgaatgttcatgccggtcttgacgccagggcccaccaccatcggttccaatccgaggaatttgatcagcgaggcgcggaaggaatacatcaccttcggcaccaccgagcagacgatcacatcgtccacatcgtcggccgtgtaatcgctcaaagccaggaactgcgtgatcatcagaccgtattcgtctgaggtgtgcgtcgccttggtggtgatgcggtaggagccgacgatgcggtcgacctccagaaaaccgatcacgatattcgtattgccgatatcgaccgccatcagcatgggtcaggcctccttgttctcgtcatcgacattgctcgcgccgccggaacgcaacgctgcgagccgcagcaacagtcgttgcgcaagcacggttttgtccatcttgtcccaatgctcgatcttcggggtgccggcatcctccgctccggacgtgagcacggtgacaacgttggtgtcggtgccgaacccggcaccggcgtcgcgcagattgttggccaccagcatgtcgcaatgcttggacgtcagcttcttctccgcattacgaatcagatgctcggtctccatcgcgaatccgcacaggatctgcgagccgtcgtcgcgcttgcgttcgccggcccacgccagaatatccgggttggaaaccagctccacggtgatgctgctgcggccggccttcttgattttctccggcgcaatctcggtcacgcggaaatcgcccacggcggcggccataatcgtgatatccgccgccgggaaggcgtcggccaccgcatcgaacatatcctgcgcggtcgtgacgcgcaccacatccaccgcatcgggcgcggtcaaggcgactggaccggagaccagcgttacgtcggcaccaaattcggctgcggccgaggcaatcgcataccccatcttgccggtggaatggttcgtcagatagcggaccgggtctagcggctcctgcgttggcccggcagtgaccagcacgcgcagccccttgagcggggaagatgagggagcctggtcatcctgcgcatccgccagcagccgagcggccacttcctcgatgcgcgccggctcttccatacggcctcgtcccacgtcgccgcaagccagattgccttcctccggctccacaatctgccagcccaattcggcgcaggttttcagattgcgctgcgtggccggattgttgtacatatgcacgttcatcgccgggcataggatcttcggcccctcataggccagaatggtggacgtcagcgtatcgttcgccaatccacaggcgatgcgggcgatgacgtcggcgctcgccggggccaccaccagcagattggcccaggccgcatcggccacatgattgatggtcgttggcacggtcggattggccgtcacgtcgccgtgcgcggccggataagcggggaacatcgtggtacgggtgggctgatgggtcagcgcggtgaatgtcaggggagtgacgaagccttcggccgctgtggtttcgataacccgcacctcgtggccggccttggtccaatcggatgccagatgacaggccttgaatgcggcgatgctgccggtgacgcccagaagaatatgtgccatagctgcctcccggccttatgccaaggccgcacgtgtgcccacgccagcgcttcccgcgtcgttgcccgacgatgcgccgcgtgttgtggtcgccgcggaccctccgtcggcgccgcaatccagtatagccattgcctccggcgtgtccggggatatagtagaacgtggtgatcgacccgaatgggcggtcaaccacgcaagataacaacgaaaccatattcgggcgtaagcatgcccgaatgcatcagggagtatccatgtcccagaacaatggtgtgcacggcgagtctggcgcaaccgaagacaggaacatcgacggcgcgaatcaagccgccagcaccgacgcgagcctgaacgcgcgcgcgaaatcatcaaacaagaagaacggcggcccgaaatggtggctgtggacgctgatcgcggtcgtcgtggccgcggcgctcatcgtgggcgtcaccgtcttcggcgggaaaggcaagggcaaggacgcgaacgcctccgtctcggccagccgatccgacaccgtggccgtcggcctcaaactcgccccggtcaatcttgacatccgccaccagtcgggttcggcccttgagcagatcctcatcggcaacgtgtacgagggcctcgtctcgcgcggctcggacaacaaggtccaccccggtctggccaagagctgggagatctccaaggatggcctgacctacacgttccacctcaacgagaagatgaacttctccaacggcgacaagctcgacgccgaggacgtggcgtggtccatcaacgagctcaaggcccagaagtactacgactacgagcaggtcaagagcctggacaaggccgaggccgtggacgccaacacggtcaggctcaccctctccgcgcccaactcgaacatgctgtggtacctcaccagccgtcccggcctggtctacgacaaggacgccacctgggatcagaagaacggcgcgttgggctcgggtccgtacaccgtggtctccttcgacccgaacgacaagatcgtgctcaaggcgaaccccaagtattggggcaccgagcacaaggcgaggaccgagaacgtgatcgtccggttcctgccggacgagaacgccagcatcaacgccctcaagagcggcgacgtgcaggtgctttcgcccatctccgccacccttgccgatccgttccgcaaggatccgaactatgtggtcaagtccggtgatggttccgacaagttcgtgctcgccttcaacatggccaacgacaagctctccgacaagcgcgtccgccaggccatccgatacgccatcgaccataagcagatcatcgcctcgcgcggcggcgtggacgcccccctcggcggtccgatccccaaggtcgatcccggttacgaggatctgagcggcctgtacccgcatgacgtggccaaggccaagaagctcatggagcaggccggatactccgagtcgaagccgctggacctgaccctcacctacgccaacgtgtacggcaccgagctcggcgaccagctcaagagccagctcaagcccatcggcatcgacctgaagatcaactacgtggagttctccacttggctgcaggacgtgcacgccaacggcaactacgatctttcgctcgtggaccatgccgaaagccacgacttctacggatggaccacgccgagctactacttccactacgacaacaaggacgtgcaggccctgtacgccaaggcgctggaggccacctccgatgacgaggcctcgaagtatctggccaaggccgcgaagatcgtctccgaggacgcgccggccgactggctgttcagctggaaggtcaccatcgcctacgccaagggcgtggacggcttcccgcagaacctgagccagaccgtgctgcccctctggcggatcacctacaccaagtagtcccggaacccatcgctcgggcgcggcgcgggagcgattccgctgcgcgcccgaccgtggacggcccatccggccggtgacgccacgggcggtggcgagggaatcgataagggaggcgttatgcggttcttgatgcaacgcttgctgctgttcgcggcggcgctgttcggcatttcggtgctggtgttcgcgatgctgcgcatcctgccgggcgacgtggcggtcgtgatggccggcatgaacgcatcgccggcgcgtgtggcggccctgcgcgccgaattcggccttgatcggccgtatgtcgtgcagtatctcgactgggccggagggctgttgcacggcgacctcggcgtgtcggcgctgaccgggcgggcggtgacctcccaggtcggccaacgtgcgacgatcacgttcccgctgatcgtgatgagcctggccatcgcgctcaccctcggcttgtccatgggcgccgccgccgtgatctcccggtcgccggccgtgcgcggtttcctgcgcgtgctgtccatcgtgggcggcgccgtgccggccctgtggagcggcctgctgctcatcctcctgttcgcacggggcgtgggccttgtcggtctgctgccctcgcaggggttccccgccgctgggtggggcgctcccgggcgggcggtctcgtccctgatcctgccggcgcttgccaccggattcgtgtccggtgcgggcatcatgcgttacacgcgctccattctggaaggcatcgccgatgagggaggtccgatcgatatggccatgtcctgcggcatgacccgcacccaggcgttggtgcgcgtgggattgcggttggcggctccgcaactcgtctcggtggtggggctggcgttcgcctcgatgatcaccggcgtgatggtggtggagaacctgttcgccctgcccggtctgggcgccctgctggtgggcgatgtcggcaaccgcgatctggtggccgtgcaaagcgagctgttcctgctcgccgcgttcttcctgctgatcggcctggcggtggatctgctgcacgcgctgcttgacccgcgtctggccgccggaaaggaggaatgatggttgatcgcaatggtcgatggcgtcgttcgggcgtggttctgggcaccatctggtcccgtggcaccggccgctactcgctgatcgtgctggggttgtggatggtcgtcgccctggtgtcgttgttctggaccccgcagtcgctgctggccaccgacggctaccacgtgtgggacaagccgtcgtccgcgcattggctgggcaccgacggcaccggcgcggacgtgctgagctggctgatggccggatcgcgtacgaaccttgccatcgccctgctgaccgttgtctgctcggctgccatcggcatcctactggtcgggctgatggtcgcccgttcttcggcgctcgcttcggcgtcggtcgccgtggtcgacgcgctgatctccatccccaccgtgctcatcgccctgctgctcgccgtgccgttcggcgcatccgcggccgtggtgatcggcgcgtgctccatcggctacgggctgcatctggcgcgcgtcgcccgtccggccgccctgctcgccgcccgctcgggatacgtgcagtcggcccgggcgaacggtgccagtgggttcggcgtactggtcagacacatcgtgccgaacatcacgccggtgctgatggtgcaatcgtcgatgtcggcgggcacctcggtgctggccgaggcgggcctgacctatctgggcgtgggcgtcggcgcgggggtgccgagctggggccattcgctggccacctcggtcaaactcatcaacgtgtttccgttgacggtggtgtggcccggtctgatcgtcaccctggtggtggtcgcgctgaacctgttcggcgacgcgttgcgcgacgccaccgacccggtggctaatcccgcgttgcggcagatgactgtgcccggtgcggttgtgccggtggctaggggagccggtgacactgcggcgcagtccgcagtggcagcgccgaaggagacggatgatgagcgttgaaattcacgggctgaatattgctatcggcggcaaaccgattgtcacggatgtcgatctgtccatcgcggacggcgaacgggtcggcctgatcggttcctccggctccggcaaatcgatgatcgccaagtcattgctcggcctgttgccgcgcgaggccgtgctgtccggcaccatcacgatgggagaaaccgccatcctgtccggagaaaccgccgagtcgcggcatgggcaggaagatgactcaggatctgacgaagaacgcggcgcggcagataggcaccatgttgccggtgaacgcagggttgccacctcgggccacgattccgctgcgtacgccgacgagcatacgcttgccgatctgcgcggccggtatgtgggtacggtattccagaatccggcccatgcgctgaacccggtgatgaccgtggcgcagcagattgcgttgccgttgagactgcattacgatctgaccaaggccgaacgtgctgagcgagtgaataccatgctggacaaggtcggactggaccgtgacgtggccggcacatacccgcacgaactgtccggcggccaacagcagcgcgtgggcatcgccacggcgctgatcacctcaccgcgattcatcatcgcggacgaacccaccaccgcgctcgactccatcacgcaacgtcagatcgtggacctgctgacctcgttggtggacgacgccggcgcatccatgctgttcatcacccatgatttctccgtactcgcgcgtgccaccacccgctgctacgtgctggacgccggccgcatcgtcgaatccggacccaccgccgacctgcttgctgcaccgaccacgccgcaagcccaacgcttggtcgccgccgcccaaaccctcaccctccacacccccaaggaggattcgcatgagtaacagcagtgtgccactcctctccgcccactccatcaccaaatccttcggaccgcgcaccgcacgccaccaagtcctcttcgacgtctccgccgacgtccacgccggcgaatgtctggccgtgatcggcggctccggatccggcaaatccacgctgacccgcattatgctgggcttggaatccgcggactccggcagcgtggaatacgagagccaatccattgtcggcggccgaaaatcgccgggattcgcgaccctgcgccgcgaatcgggactggtgttccaggacccgttctcatcactcgacccgcgttggcaagtcgccaaatcggtggctgaaccgctgagtctgcagcgacgtgatctgaacaacaccgatatcgacgagcgggtggtcgcggctctgaccatggcgggtcttgaaccggcggacttcctgaaccggtacccaatcgacctgtctggtggccaggcgcagcgcgtggtcatcgcccgcgccatcatcaacgagcccaaggtaatcctcgccgacgaaccaatgagcgccatcgacgtggccgcgcgcatccagatcctcgacaccttcgccgctatccgtgaggcccggccgagcaccgccatcatcatggtctcccacgatctcggcgtggtgcagcacatcgccaaccgcatcctcgtgcttcacgacgggcgcgtcgaagagacgggtcccaccgccgaagtgctcggcaacccccaatccgattacacccgtcagctcatcgaggcagcctcgttataga

SEQ ID NO: 848 - DNA, 7627 bp, Unknown
  R14_18m  MAG No. k141_10935
attcgacgaggttgttcgtggacggcactgggccggctgccgcgagcccctcgtcgaggaacatgaacggttggccctcccggatgcgcctgcggatcatgcgccgcgccttgacgagcctttggtgcatgtcgttcacgccatgaccgacgtgcaacgaatgtccggcacgttcgacccgcctacggacgacggcgaatacgccgtcatcgcaggcggggcaccggtgagcgagatgcgcgactacgcgatggacgtgaacgcgtatacgcacggccgtgggcgcttctccgcctcgttcggcggctaccggccctgccacgacgaacggcgcgtgatcgaggaggccgcgtacgatccggaagccaatctggagaacacgtccgattctgtgttctgcgcctacggcgccggctacccggtcaagtggtacaaagtgcccgaattcgcgcacgtggagtacgtgacggcgtgaggggccatctgactgtcgcggatatgcgtccggcatatcgggaccgtgccggtggatgtcgattgtaatcgacacctcatcccgatgggatacgaagtgtccgggtatgcctgatacctcgtgcctcatcggaatgagacagaatgaggcaagtgacggattcgggatatccgtccgagttcattgtgaaccattggaataaactcgttttgagtccgtctgcatgtcctgtgttgacaacgtcttgggtcgtgtgtattctgaatacatcagaacataaacgtttaggacttcaatgatgaaacgacacgacgttactatcaccgatatcgcaaagcggatgggactgtccgtttatacggtttctcgcgctcttaacggtctcagcggtgtatccgagagcacccgtgcatcggtgcgcgaaacagccaacgaggtgggctacatccccaacgtcaatgcgcgtgacctgcgcacgggcacgcaccggttcatcaccctgctcaccgcgggaatgtcgaactcctattatctcgatctgatcgacggcatcgagagcgtcctgcaggacaagaaggagagcctgttcattgccgatatggccgtcaacggccggtacagcaaggagaacgaggcgtatctgttgcgtcaggtcgtggagaaccgtcctggcggcatcatctccaccttgggactcagcgaatacagcaggaaccagctgaagaactggaacattcccgtcgtattcgtcgattccactcccggatacggtgatgatgaggaaataaaagatggtttctcgtatgtagccaccgacaacgtggatgccgccgccaagcttgggcgtcatctgaaactccatcatttccatcgttggctgcttgccatctatccggacacctggaacagcaggttcgctcgcgagagcggcctgagggccgccgccgaggagtgtggggcggagattcgcgtgctggaatgcggtaacaacgatgtggaagcgtgcaccgaagtcatccgttttcttgaccagaacgattattatccggatgtgatcatcgccggcaacaatcccatcctgttgggcgtcatgtcggctcttaatcggaaatccgtcgacattcccggggatatggcgctggtcgcgttcgatgacttcgcctggtcggacctggtatcgccgaagataacacttgtcgccgaagacagccgattcatcggtgccaaggcggcgaactacctgcttggacagatggaaggaaaggaggaggtgaataaaaacccggatggggcgacgatgaggccgaatcccatccacgacatgatcgagacatccctgaagatcagggagtcatgcggatgcggtgggcaataggccgcatccgaacgcaagacagctatttccaatggagaaaacaaccatgaacatcaagaagatcgcttccgccgcttccaccctgctcgcagcgtcgctgctgctgtccggctgcagcgcggtgagtaatggcgacaacgatgccgccgaggtctccaagcccacggaaatcaagagcatcggcctgatggtgcaggatatgtccaacccgttcttcaccgccatggacaaagaagccaaggctcaagccaagaagatcggtgcaacgctcaatgtccaggacgcccagctcgatttggccacccaggacaaccagatctcctcgttcattcagcagaaggtcgatctgatcatcgtctccgccgtcgatgagagtggtttgaagcccgcaatcgagcgtgccaaggccgccggcatcatcgtggtcgccgtggacactcctgcgaagggcgctgatgcggtcgtaacgaccgatggcgtgcaggcgggtgaactgtcgtgctcttacctggccgagcagctcggcggcaagggcaacatccttatcgtggacggaaccccgatccagaccatcaccgaccgtatcaagggttgcaaggcggccctggagaaggactatcctgacatcaaggtcgtcggacagcaatcctccaagaacgatcgtgccaccggcctgtccgtgaccaccgacatgctcaccgccaataaggacgtgcagggcatcttcggtatgaacgatccgtccgctctgggcgccgcgctcgccgtcgagcaggccggcaggaccgatgaaatcatcgtgaccggcatcgacggaagtcccgaaggcgtcgacgagctgaagcgcgccggctccccgttcgtggggacctccacgcagaaccccggcgagatggtcaagcaggccgtcgcctacgcccagaaggtcgccaagggcgatacccccaagaagtccacgattctcattccgagtgtcatggtcactcgtgagaacgtcaacgattacaagggatggtgagcatgcctcagttgctgcccctattgcagctcgagaacattgtcaagagcttttccggagtggtcgtactcgacaacattaacctaaacctttatgaacatgaggtgcttgccctcatgggtgagaacggtgccggaaaatcgacgatgatgaacatcctttcgggcaatctgaaaagggactccggacgcattctcattgatggcaaagaggtagacgtctccacgccgaagcaggccgacgacctcggcatcgccatcatccatcaggaactcaatgtggtgcccaccatgacggtggcgcagaacctcgcactcggcaacgaaccgttgcagaagtcggggctgctggacaagaagcgcatgcgggaggacgccgtacgtaaactcgatgtcatcaaggcggacatcgacccggacacattcctcggtgatctgggcaccggtgagcagcagatggtcgaaatcgccaaggccatcgcgcaggacgcgaggatcctcatcctcgacgaacccacggcatcgctgtcccgagccgaatcggagcacctcttcacgctggtgaacatgctgcgggagaagggcacgggcctgatttacatctcccaccgcatggaggaggtgtggcggctcgccgacagaatcaccgtgctcagggacgggcatacggtgatgaccaccgacatcgagcatgccgaccagaatgacatcgtcgccaagatggtgggacgcaaagtcgagaaactttacgaccatggcaagcgtcatccgggggagggcgtgctcgagatcaagaatctcaggctttcgccggactctccgccggtatccttcaccgtgcatgcgggcgaggtgctgggcatgtccgggctggtgggcgccggcagaaccgaaatcgccagagcgatcatcggagcagacaagcatgattccggtgagatccggctccgtggcaaggcggtgtcgttcaaatccccgaaggccgccatcggtcatggggtcgcgtatcttcccgaaagcaggaaaacgcagagcatcttccctgtcagaagcgtcgaagacaacatctccgtctcttcgctgggcgaatacgagaggctgggtctgcttcagaagcaccgcatccgcaaggatgtgcaggaatcgatgaaactggtcaacatcgcgcaacgtctgttgaccacttccatcatcaacctgtccggcggcaaccaacagaaggccgtgttcgcccgatggatgatgaagaactccgacgtgctgattcttgacgagccgacccgtggcgtcgacgttggcgcgaagcaggagatctacgagctgatcagttcccaggcagcgcaaggcaaggcgattctcgtaatctcctccgatctgcccgaggtgctgggcatcagcgacagaatcctcgttgtcaggcaggggggcatcgctgcctgtatccccgaggatgaagctaccgaggagaaagtcatggggtacgcaacgggcgtgctgaaggcgcaatccgaggattccgaaacgcgcgacggagcgcaacgataaagaggagcttccaatgaaagaaaagaaaaagatgaacctggcggcgacctgggagaaggtcggcatgccgttcgtattgctggtgctggtcgtattcatgctgatcaaggccccgaacttcggcacggtgagcaacctgttcaacgtggcgaggtccatctccatcagcgcgattcttgccgcgggcatgacattcgtcatcattaccaccggcatcgatctgtccgttggttcgaccatcgccgtcagcggttgcatcgccgttctggccgcccagcaggggctcaaccccctgctcgccatccttctcggcatggtgatcggtgcgctcatcggcttgatcaacggattcctgatcgcctactgcaatctcgccgcgttcatcgtcaccctcggcaccatgaccttcatgcgaggattggcatacaccatcaccggcggtctgccgatcgtagacaacggtttgaacttccgcgccctcggcaacggatacctgttccatgtgccgattccgttcatcgtgatgataatcgtttatgtagtcatgtggatcgttctcgacaaaaccaagtatggctcgcatgtctacgccgtgggcggcaatgccgaagccgcaaggcttgccggcatcaatgtcaagggcgtactgctatccgtctatgtgattgcaggactgtgcgccggtctcgccggctgcatcttcgcggcgcgtgtggtctccgcgcagccgactgccggcgacggttatgagatggatgccatcgcagcggccgtcctgggcggtacctccctgatgggcggcaagggcaagatcccgggcactctgatcggtgccatcatcttcggcgtgctcaccaccggcctcgtgctcatgaatgtcccgttcttcacccagcagcttgtcaagggcatcgtcatcatcatcgccgtgctcatcgatggtctcaaggagaactcgttctcgttcgggttcctcaaaggcataggtgccacacaagccaaggctgcgaactgaaacaggagaacgacaatgacgcacgaatatccacgattcaccatcaccaatagccaccaccatcctacaaagccacagccggtcacggtgaccgtgccggaaaaagttgaggccgatctgattctcggtaccaccgatttgggacagtcttcgccgttccagaaggtgctgggggattccgacggttcctcgacgacgttcatcggcattctggtgccgcatgacggagaggtcctgtccctacatgacccggacccgggggagacgtttgaaggaggcatcgtcgccgacgacaacacgctcgaaagcgatgcggtctgccaccttgatacgggatatttcgacattgaactatgtcgtggcaccggcaagggcgagggcgcctccaaatggggcatccgccatttcctcaccaaggacgagggattcgatctgctcaagagcgggaacaacgccattggcgggttctacggccctttcttcactccggaaaacggtctgatcaacccgcccgaacatgccatcgccgatgtccgtcttatcgagttcggccccgtcatgcgccgttacctgcttgaggggcgcatccctgatggtcttcgacctgaactgcagggcaagaccttctccatcgagttcacgttctactggaacgtcgatttcttcgatcgtgtctaccatgtggattcgtttgtgacggaggtcgatggcagaagcgtcgtgaaccgtatcacggtcggtgacgagttcgaaagcggcgaaggaaaccttgtcttcaaccgattcgacacctaccagcctgttcctttccgcggaggggacccctacgccggcttcctcaaggatgaagtgcggaacgtgctatcggagcggacggaaacgacatcaaggttcgcctatttctccactctgcttgacagggatctggagaacgctcactgggatctctactggcgtttgttctcgcgatgggaaaatgcccttacccccaaggggctcgatgagaggctcgggcatgtgcgggcgcttgcccaccgcgcagctgatgagacctcccgtccttggcagttccccgagggggcggtcgatgtgtcggcacaggaggaggagaccatcttccccgggccgtctgcctgcagcgccgaatacgacaccaataccaaccggtgcatgatctggatcacctcggaggcgtcctcggcgttccagatcgtgcagaggcctcaatccggctgggtcaactggggtacgaacggcgaaaacgaatgcccggcattgcctgtcggagtcaacatcaggacgatttatggtccgtatgggaacgggtggcgtgatcgcgccgatgagtcccgattcggtgtcgtgaacgttgaacgataggctctgagcacccgtatgccggtggttccgacggttttcctcctctttcccgtcggggccaccggcatcgtcattattcggctcctgattcccgctcctcatcgaactgcaagatatccaatgtaccgacgacgattatgccaagcatgccgttgacatacttatcgaccgcatcgaaggatactcaggcccggcccgtacgtacaccaccgatttcacattggtggaacgtgcctcaactcgacttgcccactagcctccaacaagttcgcatcggcttcgtgaggagtgtgtgtctactcgaacaatgcggcgtcagtcgctgggtagccaagttggaacgcggtgtaggcgtgcttggcggccagtgcggcgaggatgagcagcgtatcgctctcggtggaagatttcgattcggtcacggccttgatctgcgcgcgggtgcagtccatttcgatggcggcggcggtcggtacggtctggccgcttgccttgtcggcgatggtggtggggttggccagtagttggtcgatggcatagaccttttggcgggggtcgctttggccggaagaactggattgtgcgccggaatcatcaaaattgccgtttgccagcgcaaccagctgctgcccggcggtcttatgcatatcgctcaacgccaacgtagccccagcggtcgctcctcgtgcggccaagacctcgatagcgaatccggcgcgatcctcggccacggccatcgcatccaataccggtcggtcaacgttggcggacgtgacgccatcaagacgcgccggcgtcacctcaggcgcggactgcccga

SEQ ID NO: 849 - DNA, 15804 bp, Unknown
  R14_18m  MAG No. k141_11088
cagggaggtgaggccggtgtcggggtccttgtaggtcacgtaggccttggtggagacctcgaggatttcaccggtcttgctttccggggcggagacgatgacctggaatccgaggcgcggcagcaccgtgagggcgcgctgcgtgtaacggccgtcggccttgatgagcgcctcgtcgaggaacagcgtggtgtacgagggctcgctggtcaggccgccgccaagcaggtagatgagcgccgcgccgtatacgaacgaggtgagctcctgcaaggcgccgcccgaacggccgccggtggaggtgatgcgttcgtccggaccgtcggcatgatgcacgatggcgtagaaggacgagcggcagcgcgggtcgaggttgcgggcgccgtagcttttcacgccgttcgtgtccttgacctgcgcgagttcggcgcgcagcagcccgaccatcggcgcgcaggccgcgaaagccttgcgcgaggcgtcggaatcgttgacgtcggcggatttccaatcgttcagggtgccgatgacgcggatgagctgcgtccagaaggtgcgctcgggacggcgcacgtccgcgtgcagggacaggctgccgtgcttggggccgaactgttggcccttgagcatggcgttgatgcggtcaagctggtcgtggatgtcgctggcatccgtgtcgatggcgcgtttgatggtcaggaagctcctgagcagctgttcgaggcagcgccggtattcggcgtcggtggcggcaaccgcggccagctgggtgaggctggcgagttcgtcgagatagtaccggtagtcctccacgctggcggtcagcgaatcatcgtcggccgcgtagagcgcgatgtaggtgctcattttcgattcgacgccggtgcgcgcggcgtcggcctggccgttcagcagattgatgcgggagaccatgtccttgccgatgccggcgatggtgcgttcggggaagctctcccccggcgcctgcgttcctgccgcgcccgcgccgatgatcatgtgcgcgcgcatggccgcgtccgccaatccggcgaatcggttgtcgtaggattcggcgagcgccgccgtgacttcgtccggcagcgggccggaagcggcgtcatcgtcattgtcggcggtggcaccggcggcgtccgtcgtgccggtgtcggcatggtcgcgcagccagatgagcgccgcttcgacggcgctgccggcgcgggccgcggcctggtcggattcgatgcgctggcgttccgcacggtcgagttcggcgttcagttcgtcgcgctgtttggcgagttcggcgagtttgggatcgtttttgatggatgcgatggcgtcctgcgtgtccgtgatggtccgttgcgcgccggcgatgtcgatgcgttcccatgacgtgtaggcgagctggttggctagttcgagttcgcggtggaggttatcggactgtgttttggcggccgtgtagtcggtgtcggcttggctgagcgcgttgcgggcggcgtcgacctgcgctgcgagcgcgttgaggtaggtttcgttgacgaatccgatgacctgggcgcggtctttggtgccgtgctggccgcgtgcgccggatttgatctgaccgtcggcctgcacctgacggttggcgcggtcggtgtcgtcgatggcggtgacgcatagggcgtcgaatcgttcgtcctgggtctgcgagcgcagccagtcggcgaagggcgagtcgtcacggtagcgcagtttgccggacagccagtcgccgtcctgttctccggtgagtatgttcgcgtgcgcgccggtgtcgtcgtagtggcgtgcggtgtccacgaactgccaggtgcgtcggggcatggtgcgcgggtcgatggtgctgactttggcggcgaagccctgttcgtggcgcttgtcgacgaggatggtctgggcgatgggcgcgtaggcgacgttcatggcgagacgccagtcttcctcgtgttcgttcacgtccatgagttcggccacgtacggcagttcggcgggggcgagtccggtggcgcggcagagcatggcgcgggtttcgtccatctgctgggagatgcgggtgcgctgggagcgttgccggtcgaagtcgcgttgcagtcgttcgaggtcgccgcgtgcgccggcccgtgcgttgatggcggcggtgagggcttcctcgcattcgccgtctcgtttgttgtattcgcgtttgaagttcacggcgttgatgcggcgttcgttccaggactgttcgttgccgggcagcgtctcgccgatggatgcgaacgtttgttcgattcgtgttcggttggcttgcatgtcttcgagggtgcggcgggcctggtcgagttcgagttcgagtcgggtcaggttgccgccgtccagaccctgcatctggcctcggatcatgtcgaggcgggtgcgcaggtcttcggttcggcggcgcagcagcttggcttccgcctcgctgttctgttgttcggcgcggtcggcgggcagttggacggcgacttcgccgcgcatgcgggccaatgcccagtcgcgcagcacggccggcaccgtgccgtcgacggccggcttgaccggttcgaaggcgcgggccttgccgcgtgcggcggcgtattcgccgtaggcctgttggatgccgcgcagcgtgtccatgcggcgggtcttctcgtccatggcgtggaagttctcgtcgtaacgttcgtagtcctcgaccgtggtgcgggccaggtccagggcttcgggcacgccgagcacgccttgtttgaagatgtcgtcgagccgggagggcgcgtcggcggactggatcttgtgcagcagtcggcaggcggcctcgctcaggcccattgcgctccagatgtgtgtgtggaacgcttcggcgctggggaatgtgaggcagtcggggtaggtggctttgagctgggctggcgtgaacggggcgtcacggtattggtccatgcgcctggggtccacgggcttgccccagaccacgtactggcggcgcacgtcgccgcggccgtcgccgggcatcaggtagaggaatttggcgcaggaaagcacctggccggtggtctggttgcgataggtgtccacgatggcgccccacacgggttgcggcgcgccgttctcgtcgcgaccgcgcaggtagagcggctcgtcgccggtttcggtgctgcccacgccgaccatgccgcgcaggtaggtgtagtcgctgcgttcggagcggccggagttcgaggccttgttgaacggcgtgccggtcgggtacagcagggagatctgcgcgtcgaccagcgtggatttgccggattcgctggcgccggcgagcagggtcaccggcagcttgtggtccgtggaggggcggaattcgtggtagccctcataggagccccagttgatgagtcggcgggattccagcatccaccggtccgcgatcatctgcacgtctgtcgcctgcatcattcggctcccttctcgtcgtcatcgccatcttccgtgtcgccgtcgccgtgttccgcgacgtcgagccaggtgtcggccagttcgcggtcgagcaccacgggcacgagcggcgtgatctggtacatggcttcgtcgtccaggcgcgccaaatacccgtaggtgatcatcgcggagacgatggcgccgatctgctttgccacgccttcctcgtcattgcgggctgccaggtaaccggcgccggtggcgagcgcggcgcggatctcctcaaagctgacgagccagtcggcggggtcggcgtgcacgttctcgtattcgaggacgcggatgcgcaggaaggcgagcagcgcggcctcctcgcgtttgaggctgacacgggttttgagcgagcgcagggtcacgtcgtcgccggccacgggcgtggcgtacatgatgcggtagcgttcgttgatcaccaagtcgagcaggtcgttgttcagggagcgtacgacggcgtcgcggttgtcgagcacggtgtcgtaggtgggcccgctgatatagcggtcgcgtttgagggcgatggcggccatgcgtgcctcggccggcatgtcgccggtgtcgccttcgaacagggcgtacgggttggcgttgtccatgtgctcctcgtgttcctcggccacggtcatccttcctccacaatgatgttcagctcgtccatgtcggccagcaccggtctagtgatccagtgccggggctcgccgtcgatcgatacgcaatgccaagtcgcggtatcgccgcgctgcgccggggccggctcggtggcgatgtcgctgtcgatgccgacgccgtcagtggacggctcgtcggcgatggcgctgccgcttacggctcccagcccgcccaggaagccgacgatctcgctttcgcggcgttcgctttcgggcagccggttgaagctggcggcgatgtccacgagggttgcgttggacctgtcatcggacctgtcaacggtcaccgggttgcgccggatgaggctgaccatgcgcaggagtcgggggccgccgctgttgaccatatcccgcagatcggccaccggagtcgcctgcggggcttcggcggcgaggtcgctcaggccgggtgcggtggcgcgggtcatggatttggccgggcgcatcggcaatggcgcgaacagcgcgtccgcggtggccgtgtcgtacgggcgcgaggcgtctcccatatgggttttcgcatccgcgttgaggcgcgcgtacagtcggttcaagcgggtgagcatcgtacggtagcgagtgtcggtttgctggcgcacgagccggctgatcgcctcgtcggagacgcgcatctggcggcgcacggcttcgatgccgtcgtagatgcgggccagttcgtcgcggatctggccgagcagcacgccggattcgccggccagatacggggttttggcgatggcgcgcagggcttcgtcgatttgctggcggccctcgtcggtgatgatcacctggaaggcgtcctcgaagcggcggccgctgtccgattcgctgaacgagcggcggtattcgtcgtggtagcgggtcaggttctcgtccacgctgatgtcgccggtctgcatgcgccggcgcaaggcgtcgccgttgtcccgctcgtcgagcacgagttcgcgcaggtcgatgggcacgccgcgcagcgtgttgtggatcacggcgatcacgtcctccacttgggcttcgctcagcgtggcgtgctgcttgccctgttggatgcgtttgatctcgtgcttgcgttccttgatttcacggttgagaagtttgatgcgctcgccggggtcggcggtcagctgcatgcgcgcgtgttcgatttccatgatgatgctgttggcctgcgcgccggacagggcgcgtgattcgtcttcgagcctgctcagcgcctcgatggcgcggtgggcgcgggccgtcaaacggtagaggaatcggtgtgtggccgcatcatgcgagttggcgagccaggcgtagtcgccttcgccttcacgggtcaggtcggcgaggatctgatgggcggcctcggcgaaggtctggtcctcgcgcggcgcatattcgccggcgtcggccagagcgttcagactttgcgcgaaccgctcctccacggtctcgcgcggcagctcgccggtgagcgggtcgaacgtggaacgcagcagcgacacgtacagcatcgcgttctggcgcaacagcaaccgcaggacgcccgtctcatacaccggtcgcagccgttccagctcccgcatcacatcggccacagcatgcctccctctgtcgtgaccgcaccatactagccgatagccgcgaaccacaccccgcccgcgccacgcgtgctctctcccgcccagcaccaatatgtcacttttactgcacatgtcatcatgtgcagtaaaagtgacattgaggctgcgcactcatggtgatcgttcactccagccgtcgcccctattcgccgcgcagggcctcggtcggggtgagacgggcggcgcgggaggccgggtagaggccggcgaggatgccgaccaggatggcggcggcccaggcgagcggcagggaggtccagtcgagggcgatcggctggccggcactggcggcgacgccgatggcagcgccggcgccgagcgcgatgccggcgaatccgccgagtgtggacaggagggccgcttcggtgacgaattgcatgcggatgttgccgggcgtggcgccgagcgcgcgtctcaggccgatttcgccgcgacgttccatcacggtgacaatcatcatgttggcgatgctcatgccgcccacggccagcgcgatcacgccgatcatcaggccgagcgtggtcagtgaatcgttggtggtgttgcgcgctttggataggtcggcggacgcggtgacggacacgttgccgccggccgggttggcggcgtgggcgagcgtgcggcgggtgccttcggcgtcgccgggcgtggtgcgcacgtagatggcgctgatccgtccgatggtgtcggtctggtcggggtaccggccgagcgcccattgctcgccgatgatgacggcggcgttcaggttttcagcctgcggcgtggggttcaggatgccgatgacgccgtaccatgcgttgtcgatgaggatgcggtcgccgggctcgttgacgccgagccggtaggcggcgtccgagccgagcacggcgacgggcaggtgctcgttgttcgcgtcgatgccatgaccttgggcgaggcttgctccgacggcgtcgagtgcgccgggccgcatgatggcgagggccagcgcgttgccgttggttttggggcacagcccgttcttgaagatctgcaccttctctggcgcggtgtcgaagacaccgacccgttcgacctgcggctgacgggcgatggttgtgggcgcgtaatccggcagcggaaccttctgctgggcggcgtccacgccgggggcgaccaccgacagattcgcgccaagcgcgtcgagttgggcgaggagcgctgcctggttcgatgcggcgatgccggacaacgccacatatgcggccacgccaagcgcgatgcccagcgatgccagcaccgtgcgggacgcccgcccggcggccccaacccaagccgcatgcatcaaatccgcaattcgcgtgcgtattggtttactcataggagtacgttcactcatatctctcccccagtcagcctttggctgacagcccctcgtcagagggggcttgattcggcttgtcgagttcggtgactaggccgtcttggatgtgcagacgcctggggaaacgtgcggcgatggtctggtcgtgggtgaccatgaccaggcttgcgccggaatcggccgccgtgagcagcaggtcgacgatggtgtggccggtttcgcagtccagcgcgccggtcggctcgtcggcgaagatgatgtccggccgtttggccagggcgcgggcgatggccacacgctgctgttcgccgcccgacaactgggccggccggtgatgcaggcggttccccaatccgacctgttccaacgcctcggcggcccgttgccgacgttcgccgcgcggcagggttgtgtattgcaggcctgtcatcacgttctccaaggcggatacggtggcgatcagatggaactgctggaacacgaagccgatgcgcgcggcccgcaggacgctgcgctgccgctcacccatcgcattcacatccccgccgtcgtatcgcaatattcccgaggtcggcatgtccagcgtgcccagtaacgacagcagcgtgcttttgcccgagccggacggcccgacgatggccacgagctcgccgcgatcgatggccagcgatgtatcatgcaatatctccagcaagctcccgtccttgcctggaaacgccttcgtcacatgctccaacgtcagcaatgccccatgctctgggccagcgggggcaaactcgatgtcgttcatgagaccaccaccttgtctcccgccttgaggccgtcggacttggtgatttgcacttgcgcgtcggacaccagcccgattgacaccggcacacgcaccaacttgccgccgcgtaccgcttcgaccgcatacgcgctgccggcgctggcgatcagtgcggtcaccggcacgatcagcgcctccccggtcgaggcatcggcgttcgggatgatgacttgcacggccgtcggcccgaaagccgccacctgcgactggtccgggaagtcgatgcgcgccgatggctgtgtggcttgcccgttgtcgccggtcttctgcccgccctgatcgaccgaggcgagcgtcgtttcgacggtggtgttgtccggcagcacgacctgcgccttgtctccggctttgaacatcgccgcctgcgtggcggtcaacgtggcctgcgcatgcagggtgacgcccgtatagcttgccgggctgacctgtgattggccgagtttcgcgttcaccgccgtgatgcggattggtgcggccgcggccagggccaccgtattcgggtcgaatgtgccggtgaccgcgtcgccggtcaggccgagcgagcgctgccattgccggatcgcctcgcgggtcagccagttgaaatgcggtccgacctcgccgccatagaatccgagttcctgcaggttctgctccagttgcgtgacgtccgggccgtcggagacgccatcgccgatcgtccgccagaacgggcggtcgccatggaacagcggcacgggcgcgccgtccatctcgtacacctgttcgccggtgttgatctgtttgccggccaccggcagttgggtgattgtgccggaagcggccgcgaaatcggaggcgtcatcgtattgcagactcgcgccgagccgggtctcggcgttgagtacgcccttggtcacctcctgcgtgcgcagcgtggacacatccacctgctgcgatcggccagtctgcccggtcgcggtgacgtgcccggccaacgtccacggcctcaccgccacgcacaccgcggccagtccgatcacggcgatcgccgcgataatcatcgtcacgattctgcggtgtttcccgaatctgcgcgcttccgtccgtgtcatgattgctcctttgtccgttatcggatggccgtctcattgctggggcgcggcttcggtggacgcgctgccggaggtgaattcggagaggactttgttgtagtcatagccgaattcctcggtggtgccagcgaaggcataggagatgttcgcgccatcggtcgggcattccttgaggaatcggcgcagttcggattcgcttacggtgccgggaatcgtgattgaggtgggcgtatcggcgtccgggtccttgacccagtcgaagcccttcttacgcgcggcctgggcgtaggcgagcgccgcctgcttgtcttccccggaatactggtgttgcggccccatgtccggaatgggctgggtgaagtcggggttcttggcctcgcagtcggcgtattcccgctgtttggatccgtagggtgagccggcgagcgccttggcgtccttgaacaccacccaggtgctgtcgtcttccatcgacgtgtaggcagcgttcgggtagagttgcgggccgtcgtcggatgcgctgaggctgttgccttgggaggcgaccggcttgccgtcggtgccgatcatgcgcagtgcgaccgcgtttttggtcggggcttgtttgcccgagccggagccggacgacacgccagcagccgtacgcgcgtcgaatcctttgccggtcaggcaggcggcgaatcgcttcgccgtggcgtcggtggtggtcgtcgcatcggaccgatcgtcggcacctgagcctgttccgactgccgccagcggtgacgagcaggcgcccagcatcgaagccagcgagagtgcggacgtaagcattgcgattcgccgtaccaggcgcgtatgagtagtggacattaccgtctccattccgtgagtcgattgtgacgacttccatccaatcgccctcaccgtggagcgtcggtaagcggacggattactttcgccttaccgtagaatcgggaaaatgttgggtgatgccattggttcgggaaggctcggaaggggacatgatgcggattctgatcgtcgaggacgaccgcgaactggccgccgcgttggacgacgcgctgcgctacgaggggtacgcgaccagtctggcaaccaccggcgtcgaagcgttgaagatccttgccggcacgaacgtggacatcatgctgctcgaccgtgatctgccggtattgtccggtgacgcggtgatggccaccgtcgccgcgaaccgcattcccgtggccgtaatcatgctgacggccgccgccgaggtcagcgaccgcgtgagcgggctggacctaggggccgacgattacctgaccaaaccgttcgcctatcccgaactgctggcccgtatccgcgccctgcaacggcgcagcgggaccagcaacgcgaccgcagccgtgctcacgcgcggcgacatcaccctcgattccacacgccggctcgtgttccgcgaccacgggcgcacgctcgtcaaactcacacccaaggagtacggcatattgctggagctcatgcgtgcggaaggcggatacgtgaccgcgcacgaactctacgatgcggtttgggatgagccgaccgccgccgacccgaccgacgtgatcaaaaccaccatctattcgctacggcgcaaactcaccgatcgcgaggccatcgtctcgacacgcggggaaggataccggctgcaatgaaggcgacgaacacggcgaaagcatcaggtcgtatacaggcgcttgccggcaaactgcggcccaaatcattccgcgccaaactgacgttggccatcagtctcgtgttcctcatcgccatgggatcggcgaccctcgtgcagaccattgtggtcaacagcatgttcacgtacgccacgacggtcaccgccaaaaaccctgagatgcaggtcgaaagccagcacagcggttccggcaccggcaaacgcccggattccgacccgcgaatgttttcccggggaagcggcacaggtctgaacgatatcactggaacatccagcgtcggcggcgatatgggcgacggtgactatcaggtggaatggggcaaggacgggtcgtataccatcaacaccccgtatggcgtctccgtgtggaaccaggacaacatcgccaccggattgcgcatcagcgcggccatcatcttcgtgttcttcgggatcaccagcattctgatcatctggctggtcacctcgcgcatgtcccggcaactgacctccatcagcgcgcaggcggcggcattggacccggccaaacttgatacgcgcatcgacgtgaatgggccgccatctcgccgtaggccccagttccggcgtgcgggcagacgcgggaccgaggattgggatcatagcacggacagccgcacggacggtcgagctgccggccaatcctccgaagtcacgcagctcggtgacgccatcaacggcatgctcgaccggattcaggccgcatccgaagcggagcggcggttcgtgtccaatgcctcgcacgagctgcgcacgccgattgccgcggtggagaccaatctggacgcgccgttggcccaggggcggttccccgaggatgtgcgaccgtcggtacagcgcgcactggatgccaatcggcgcggcgcgcaactggtgcaggcgctgctgaccttgtcccgtattcaaagcgggaccatcggcggcaagcaggcgggcgatgtgacacagatgagtcccgcatcaacggcacgcacatccacagatttgtacggatgcgtcggcaactcccttgcggatatcgacgatgccgccaccaagcgtcgcatcaccataaccgtgaacaaggccggcggcgacgcggacatgtttctcatcgccgccgacccggcgttgctggaactggcggtcggcaacctgctgcgcaatgccgtcgtgcacaacacggatgatgggtcgatcgacgtgaccgtcgtatcggatgaggatggaagcggaccccgtctgaccgtcacgaacaccacggatgagatgctgccggacgatctgaacgagctgacccaaccgttccatcgcggcgagaactcgcgtatcagcgccgtgcccggcgtggggctcggcctgtccatcgccagtgcggcatgcgaggcgatgggagccaggctggaactcggccaaccggccgaaggcgagttccgggcgagcattcggttttgatggaacactcaggctccccttcaaagaggggagctctattgtttcgcacgcaaaaatcacagacagactattgccttgcggaaaatcatcgttagattggcgagaggaatattgtcaatgcatacgaaacggaaaacatcgtgaccgcaccgaacatgcccgccgaaacctctgaccagctcaacaagcccgccaaatccggcaaactggaggtctccgacctcatcaccatcggcgtgtttgcggccctgtacttcgtgatggtgtgcatcgccacactggtgagcaccctgttcaccagcggcttcggctccatcttcctgcccgccggacgctcgatccgcgcgcgagactcttccttctgctggtggcgaacctcatgctgttcttccatgtagggctcgccacgcaaatcgtcatggtcgtgctgttcctgttgcccctgctggcggccgcccgatggcgaaccgcgttgaacttcggcgtgacctatgccgtactcaccgcgctgggaatgctcgaccccgatgccctgggactgccgtggctgcatgtggtctccgcgctggccgtggacgtcacgatgatgctgccctgtttcatcaccgactcgcatggctcaacggcgtggccgaccggtacgtggtattcgacggcggacatatcgtgcaggattacgaggccgatgaattcctgtccctctccccggctgcgtggccgccatgggattgcgggcgtttgacttggaaccgtatcggcaccggattgcggccctggcttcaagcccggccgccgaatccggctccacggacaatgcctcgctcgccatcgaatggttcgccgaggacgacaccagcctcgacacttacgaatacgccatcgaccatgtcatcgagcacgggctcgaaagctcccccaccttcgtgctccgcaccgctgatccggccgccgaagacagcccgttccgctggctgctggccatcaaccctctgccttcgcgcaaggcgttcgccgagggcgggctgcccagccacctgcatttccagtacgccaacgatctgcacacgctcgtcgccacggatgaggccaccggcgccgagaccttgcgcaatccgcgttggtacgcacaccatgtgctccaacgagggaaccaccgaggaccgttgcgccatcatccgtgcgttgcaccacttgcagtagatctggcaacatacggcggtatgacggctccccgctagtgaaacagcatcgcttcagtagccatgcgagtgcagatactcatcatcgaagccggaataatggccgatctcgtgcaacacggttttgcggatctgttggcgcagctcggcccgtgttgagcatacgcgttcatgcggtcccttgaacagggtgatggcgtcccggcatcacgccgctgtagcccgtggttcgctttgtgatgggtatgccctcatacagtccgagcagctcaccgcacggattgctcattgtggccagttcgcgctcattgggctcgtccgcaacgacgatgccgacattctccagcacccgcgcaaaccgttcaggcaaatcatccaacacctgttcaatggcccgttcaaactcatcgtcaccgatgtgcatactcaatccttcacctgttgcttggctcccacgataacagacatattccgggttccggcttcttgcgggtgccataacgttgcgcggaacgcttccaatcattcattaggtcgattcttcattcattaggtcatgaggctgcgattgtcggtgttggaatggcaccattccagtggtgactgtcagagctcaccgacctaatgaatgaagaatcgacctaatgaatgcgtccggtcatatctcattgtgaaaatgacccggtattgcggtattccgcaattgcacttccaacgattctgaagtattcatccagattctgcgtggtagcgaacgttcttcttgtggcgggaaaagtcttatagcccgcgaaggagaggttgttccttttctcgatatctccttcccatcggtttcggtcatagtggtaccgtccgtcgtattccagaatcacatgatcattcggatacaccatgtccacaatcacttctttgttctgcaatgggaggtatatcggagcattcacctccaattcgggtaatccacgttttaccgattcaaggcgaaggatgctttcctgcggcgaatcggtgttctctctgcacaacgagagcgctttgcgaaataatctgatacctgggaatctacctatatcggcgaggaacaacgatatcttgtctttcgttgtctgtttcaaatgctcattacggcaggtggcccaatccaaggcaatgaccatactttccacatcgacgaactgtgcgatctgacacagcgcctgttccactgaaaccacggcgataagatcatcaatcatcgtctggtcaatgccatgaccccaataatggcattgcgtttcggtgagattcgacaatctttcagccccggacaccgtaacgtgcagtttgttggggtcatagttgggcttgtaattcagcgtggccgtcatgccagcaagctgtagcctggtgccatggctgaagcaaagctcctgtgaagtgcgcatcgatctggcacggcattgttccagtgttttctgggcgaggtctcgcgcctcatcaagtgtgaagaacgtgttgtatgcataggactccatgccatccccctgatggttgtatccgtgaaccgcgttattcacggatacaactcacgatggcataaccaacttctgcgcgcaaccagctcggccgaatcggtggatatgtgtataacctgccagctcagctgttgcggttgatctcgatgtcggtgacggtgaggttggcctcgttgatcaggttgaagaggatgacttcggccagcggaccgggctgcatgaaggtgtgctgcttggcttcggacacgtaatcgtggctatcacggtagaaggcggtgtcgatgccgcccggatagacggcgaccaccttgacgctggtgcccttgtatgcggcctgcagactcttggtatagcccttctcgccccacttggcggcgcagtacacgctttcgttcgcgttgccgcgcgtggcggcggtgctcatgatctgggcgattttcacgtcgcgctctccacaggccttgagggtttccaccgtccacagaatcatgcctttgagccccttgaggcatttgtcaatgtcagcggcttcataggcggtgggcaccttgaacgaaggctggccggcgttgttgatgagcaggtcgatgtggccgagcgcggcgatgctcgccacggattccttgacaaatgcttcgtcggtgatgtcgcctacgaaggcgcggtaggattcggctggccactgcgcgctcagctcggcctgacgttcggcgttgaagtcgatgccggccaccagccagcccttggcgatgagttggctggcgagctcgtagcccaaacccagcgcgctgccggtgacgatggcgatcttctggcctgttgtggttggcatggttgattcctttgcatgcttgcgagactcccctcag

SEQ ID NO: 850 - DNA, 3705 bp, Unknown
  R14_18m  MAG No. k141_11094
cggacggccgctatcgctcacagtcgcacgtttccaatagcggcggatacgccatgcggacaccatgcccagcacgctcagcaccgcgctggtcaggaacggcaccgcatgtcccacggtcatcagcagaccgcccaacggcccgcctgccagcgtgaccgtcgaatccctggcgtcgttcaacgccatcgcgtgaggcagctgctcatccggcaccacgccacgcagcatggcattcgacgtattctccaacagcccatcgcgcaccgaaaacagcacgacgatacacagcagcgcgatcggaagcacgtgggcatacggtccgccgaatgccggagcgtttgccccgttaaccccatggccgctcgtcttcggcgcattgccgaacagcatcaccgctgccgccgccaccgccgagagcaccacaccggacgcaccccagatcagcatgagcgtacggcgatcataccggtcctgaatcacgccgccggcaaggcccagcaccgtctgcaccaccacgcagatgctttccgtcgtggtggcggcggcagaggatcctgtcgtggcgagcatgatcagcggcaccgcgaacgcgatcaggctggcaccgaccgcgccggacgtgtccgcagccagccaccatccgtaatcagttccccgccataaatccgtatcacttgccatcgttgccctccctgggattggtccttatggacgccaccatagggagccgccgccgagccgaacacccgcaatcctcggttatggggacatggctgcggtcgtcgtcctcatttgtgaggacagggcacaatcagcgccggacgccggacatcgcagcttctgccccatcagccccgcacgcacgggatacgcacgtaaatcatccacgtgccatcatccgaacgggtggtcaattcaccgcccaactcctgcacacgggtgcgatgcatggccagcccacgccccgaccgctcctgcgcggacaggccactctgcgcgtcggcatcgtcacggatatcgttggtctcacgaatctcaatccattcgggagacagcgtgacgaacagcagataggaatcatctcccgccggtgcatggcggcggatattcgtgccgatctccgtcatcagcgacagcgcctcggccgccgcctcggggtccacgaccatgacgatgccgttgaccgcggccgtcccccgatagccctgcgcctccagaaactcctcggtatcggtgatctgcgccttcacacgcgtgacgaaggattgcggcatgcccgctgtggattgcgtacggtcatcgccaccggcgttctcgggcacggcattgtcaaccacctcattcgcaatcgctggacagctcccggcacctaccgggtcacgagccagggcggattctttcgtcggcgaatcaacctgccctgattctgcagtcgccacctcagatgtcccggtgccaccgaccggcaaggactcgtcccggaagccggcgtccattccgctctgctcggtcagaaaatcgatgatgccatgcacttccgcaaaggcacgttggctgcgatccagcacgcgctgccagtcgccaccatcgatgccggctggcgcggccagattattccgggcgatggtcgagatatacgtcagatcgttggacagcgtgtcgtgcagttcgatcgcgagctggttgccgtggcgcagatcggccagcgccgattccatctgctcgttttcgttctcctgattcaccacgcgcttgcgccagcgcaacgcaatgcccagtaataccagcagcacgcttgccgtcagcgccgccgacgccgtgaccagccacgacccggtcaccgcatagacgatggccgccaccgcaagcacaccgatcgggccgaacatcgccagcggatgattgagttctatatcgatatcaatctgatgatgcttcttgccgtcggcgtgaccatacgaatacgacgaatgccgcgaaatgataatcggacgtttcaccggcccgctccccttatgcgccttgcgcttcttctaccgtgtccccacacacccatcggcgccttcatcagtgcaggttcatgcgaatccatgcgccgataagttccttgagattgccggcgccgagcttgtcggccgcacgcatcagatgcgtgcgcacggtggtttcggtgatggacagttcggcggcgatctgcggcatagtccggccgcgggaccacagttccgcaacctccatctcacgcgcgctcagccggttgtccttctcggccttgatgcgcgcggacgcaacggccgcggtctcgaaccgcacgtcgccaccatcgccccatattttgacggtctgcacctggcggatagccacggcctgcaatcgcacatcatcgttcttgctcatgatgccctgtgcgccggcccgggccatctcctgggcatgtcggcccacaatcgaggcggtaatggccagtatcgccgtggtcgcgttttccctgcggattgcacgcaccacatccggaccattgatgtcgttcatcgcgatatcggccaatagcacagcaggcgggtgtttggtggccgtgcacagctgaatggctttgctgccttcgctcaccggcggaaacaattcgaagtctggcagggccttcgacaaaatcgactgtaatgccatcagggccatgcggtcgttgtccatgatgagcatggtgggccttggcccatcctgcccgctgatatccggcatatgcctacgtgcgcttagctcttcttcggcttcagcgctgagggcatgggcatcggaatcggcttgcgtggggccggcttcggcttgggcgcggccggcgcggaggccgggaactcgccgctggtcgcctttgcggcggcttcggctgcccacttggcgtactcgtcgaggtcgtcctcctgcgcggcgggcgagaccttggcggcgtcggcgtcagcagcagaatccacatccttgtccgcatactgatcatcaatatcggcgaacgggtcaggagagcccgttcccggctcctgctcgctcagctcttttgccagctcatcgtaatcggtatcggtggtcaggtacttgagctttcgggcaattttctgctgttttgctttttgacgtccgcggcccatctgaccccctgcgattactgtgctgttcgattcatcaacaatagagagtaccactaatagtggcttgttcgttgtcggctcacacttttaccataaaaagcgtttatctgagccctatttaaaggattttcgcatgaccgacgagcagcaactgacagcggcaggcaatgagataagcgcgagcttcctcgcggccaaaaagcgttcggacgaaacgctcgccaagctggaggccaagccgtcgtccttcaccatgttgaccggcgaccgcccgaccggccggctgcacctcggccactacttcggctcgatccgtgagcgtgtcgccatgcaggagcgcggcgtcaacacgaacatcatcatcgccgactaccaagtgatcaccgaccgcgacaccaccgagcacatccaagacaacgtactgaacctggtgctcgactacatggccgccggcatcgatccgaacaagaccatgatgttcacccactccgccgtgccggccgagaaccagctgctgctgccgttcctgtccctggtcaccgaggctgagctgcaccgcaac

SEQ ID NO: 851 - DNA, 11840 bp, Unknown
  R14_18m  MAG No. k141_11095
aataccgggcgtcttgacgagcagctgcttgacttcggggctggtgtgagcctccttggcggtcatcgcggcggtaccgataagcacgccgtcgaccggcatgtcgggcaggccgtaggcgtgggcccactggccggaaatgtagtcggccgcgcgttcgggggtgccgatgccgccgccggcgaccagcacgaggttgtcgcaggcgcgcacttcggcgtaggtggcggcaagcaggtcgtccagcgcttcccagctgtggtggccgccggcttcaccgccctcgacctgaaccatgatggtggtgggggacacggccttggcgatgcgcacgacctggcgaatctggtccacggtgccgggcttgaagctcacgtacggcagaccgtccgcctgcagcgactcgatcagggccacggcttcgtccagctcggggatgccggcggagacgaccacgccgtcgatcggcgcgccggaagcacgcttcttgggcacgatgcgggaggagccgaactgcaggttccacaggtaacggtccatgaacatcgcgttgaattcgaccgtgcggccttcctccagctcgtcttcgagggcggcgatgtggcggtcgaacacttcggcggtcacctggccgccgccggcgagctcggcccagtagccggcgttggccgcggcggccacgatttccggttccacggtggtgggggtcatgccgggcagcagtaccggcggcttgccggtgagcttggagaacttggtgaccagcttggcgccggccggggtgttgatgacgcgcggggcgaacgccttccagttctgggtgcgctcaggctcgctttccagcgtggagagcgtggagcgttcggacagcgtggtggcttcgaccacgccgatgccggtgccctgcaccacgttgccgatcagcttgccgagcgtgttgccggggccgaggtccacgatccacagcttggccgggtcggcggcgttgaacagcgccttgacgcgggcgttccagtccacatggttgagcagcacttccgcagcgagtgcgcgggtgcgatcctggtcgaagccgcaggcgccggcccaggccacggtctgctcgacggcttcggccatgagcggagagtggaagggcagggtgacttcgaggtattcgagggtcgggttgaacacggtgccgccgtggagcttctgctcgcgcagcttggcttgatgctggtgttcgcgctcggcttcgagggcgaaggcagacaggtcctccgggtagccggaaagcacgtggtggttgtcggagttggtgacggcgatggagatcgggcctcgggcgttgttcacgcgcttgaccagagcctcaacctgttcgcgggtggtgcccttgacggagagcatcgggctggcctcgccgtacttggggttcaggcccagttcgcgcacgcggcgggttccggcggcgccgatcagggcggcgacggccagaatctcgtcgagggtcttgccggcggcctcgatggagccggcggcctcgatggcgcgggccatgtgcacggcgagcacgccctgggagtggccgagcacggcgagcggcttggcctgggccacgctgtagccaaggtgttcgaggtcgagcagggcgccgagctgggtcagtgccacgccttccacggacgcggtggcgtcggctgcggcgccgaggcgggccgggttcggagtgaagccgaacaggtcgaccggacggccggtggtggtcagcaggtcggcggcgaccggggtgagcagtcggttggctgcggcgatatggccgcgcagggcctcgtcaaggctgggatcggtggtctggtctgccagggctaccggccacggggtggactggccggcgaaggcgagcgcatggggctcggtggccaggcgattgaggaagaaggtggtcattgctttccttacttgtgtttggttgatgtcttcagaaatcagaggggctggttgccgtggtgtttggtggtgcgcttgacgcgccgcttggtggcgagcgtggccagcgattcgacgatcacctcacgggtctgttcggggtcgatcatgccgtcgatctgcccgatttccagcgacaggttcgcgttgacggtgctggtctcgtactccttgatgtacttggcccgcagcgcatcgacgtcctgcccggaggctttggccttggccaggtcgtggcggtggatgatgttcaccgcgccggccgcgccgagcaccgcgatctgggaggagggccacgcgaagttcaggtccgcgccgatggctttggagcccatcacgatgtacgcgccgccgaacgccttgcgcaacaccacggtcaccatcggcacttgcgcgttggcgtaggcgtagatcaccttggcgccgcggcggatgatgccggcgtgttcctggtcggagccgggcttgtagccgggcacatccacgagggtgaccacgggcaggttgaacgcgtcgcacaggcgtacgaatcgggcgaccttctcggacgagtcgacgtccaggatgccggcgagcacgttcggctggttcgccacgatgccgaccggcttgccgtcgatgcaggcgaagccgacgagcgcggaggcgccgaacagttcctgcacctgcacgaattcgccgtaatcgacgatgcaacgaatcacttcgagcatgtcgtagggctgacgttcgttggcgggcacgatggtggcgagtcgcttggcggtctcgcgttcggcgcgggtgacggcgtaggcgtagaccggcggcttgctttcgctgttggacggcaggtaggcgagcacggtgcgcgcatagtcgatggcgtcggattcgtcctcgccgaggtagtgggccacgccggacacccggttatgcacttcgccgccaccaaggtcggccatggagatggtctcgccggtcgaggccttgaccacgtccggcccggtgacgaacatgttcgagttctcacgggtcatgatgatgaggtccgtcagagccgggcagtagacggcaccgccggcgcaggggccgagaatcaggctcagctggggcacgaagccgctggcctcgcaagtcttgcggaagatgcggccgtactgggtcagagcggccacgccctcctgtatgcgggcgccgccggagtccacgatggccacgatcggcactttgaggtcgatagccatgtccatcagtcggcagatcttctcgccttcggcggtgccgagggtgccgcccttgacggagaagtcctgggcgtagacggccactttgcggccgtagacctggccgaagccggtgatgacagctgcaccggcgttgccgccggcgatgttgccgccctggaagcggccgatctcctcgaacgtgccggtgtcgaagagcaggtcgaggcgttcgcgcgcggttttcttgcctttagcgtgctgcttgtcgcgggcgcgctcttcggcggcgcgggccagttcggcggccttgaccacggcggtgcgcagcggctggtgggccgaggtctgggcggcgttggcggccgaggccgcagccgcggccttcacggccggcgaatccatgatgtcagtcattgccgccctccttcttggcgtcggcggccttggccttgccggcgttcacgtccagcgtgaccagcgtgtcgccggcctccacgccatcggccgggccaacgaaaatcttcttcacttcgccggcggccggcgcgtacacgtagttctccatcttcatggattcgagcaccaccagaaggtcgcccttggccacttgctggccttcggacacgttgatgcgcgtgaccacggcctgcatcggggaggcgatgacgccggatttggcaccgtcgttggccgtggcggcaccggaggccacgttgtgcaagcctgcgccgcgcaacggctgggtggggcgcttggcaccgcgggcgcgggccgagccggtgatgttctccacgatgtcgagtggcacggtgagcttgacgcggcggttgttcatctcgatgacgaacgtctccgacttggacttgtcgggcgcggccagggcagcggcacccggggcggtggccaaggaggccggctggccggaggcggcggaagccggtgtgcggttcaggtacgtgcgctccagccacttggtggacacggcgaacggatggccatgctcggcggtgaagtcgtcgttgcggaagatctccttgaacagcggaatcggcgtgggcacgccttcgatcacgagctcgtcgagcacgcggcgcacacgggccacggcatcgagacggttctgggcagtgacgatgaccttgcccatcatcgaatcgaacttcggggagatggtgtcgccctgttccacaccggtatcgatgcgcacgccggggccggccggccactggatcttctccaaggtgccggagccgggggtcaggttggtggccgggtcttcgctggtgatgcgcagttcgaagctgtggccgcgcggttcgggggcgcgggtgagctcgccaccggcggcgatattgagctgttcgcgcaccaggtcgaggccgctgacctcttcggagacggtgtgctccacctgcagacgcgggttgacttccaggaagtacactttgccgttcggggtcaccatgaattcgcaggtgcccaggcccacgtagccgaccgtggtgaacaggcggcgggagtattcctccagcgtgctgacgatttcctcggacaggaagggcgcgggcgcctcttccacgagtttctggttgcggcgctgcagcgagcagtcacgggtggagtacacggtgaagttgccgtgcgagtcgcgcccggactgggtctcgacgtggcgtgccttgtccacgaacttctcgatgaagtattccttcagatcgccgccttgcagcgcgtcgtggttcatgtagaagcggcgcagctcctcgtcgtcatgcaccacggtgatgccgtggccgccaccgccatcagtgcgcttcatcatgatcgggtagccgtgggtgtgtgcgaagtcgagcagcgttcgcacgtcggtcaccggttcggacaggccaggcaccggcggcactttggcgcgcaaggccactcggcgggcggtgatcttgtcgcccaaatccaccagcgcggtgtggtgcggacccacccagatggcaccggcatcctcgaccttctgcgcgaagctcggcacttcggaaaggaatccgtagccggggtgcacggcgtccgcaccggttttgtgcaggatgtcgatcagcagatcctcgttgaggtacgtgtccttgtaggtgtcgccggagagcaggtatgcctcgtcggccatgtccacatagcggctattgcggtcttgttcggagtagacggccacggtggagatacccatctccttggccgtgcgcaccacgcgcagagcgatctcacctcggttcgcaatcagcagttttttgacagtatgagccatagtgtcaaattgtgctctccatatagaggagagggcaagccacgttcgcacaaaagctttcacgcccttttgtaggctacgaacaaacgcgcgcgtaggttccggcaacgtaaccgttggcgccggctatcaaaaacgttgcaaatccgtcgattgcacatccttgcgcgccggttcaagaagttgacgttacggttgcgttcgtcaacttatgacaaatcgaaatcgacaattttgtaagttggtacgaaaccgcacgaaatcgaacacctctacgatggcaaccgtaagttcgggggaaggctcatctgcgggcgaacggaaggcgaccggaccggcatcggtccatcgccgcacgattcgcccgcacagggccggattcatttgggaccgtccaccatatggacggttcgggctgtcggggataccgcacggcccgccggaacctcccctcatccatcgcataccgcccgccgttcacggcgatatcacacaacataggggttattgatatgcagacttcacacaccaccgcatccgcagcggccaccacgccgctcgcccgtcgtatcgtcgccgcatcctggaagccggtgctgttcgccgtgctgatgtggctgtccgcggccgccggcgagattccgattccgggcacgccggtgccgatcacgctgcagacgttcgtggtgatgctcgccggtctcatgctgccgtggcgtcaggccggtgccgccgtcgccacctatctggcggccggtgcggtcggcctgccggtgttcgccggcggcacctccacgctggccctggtcggcccgagcgccggcttcctcttcggcttcctgccgggtgtggtggtcatcgccctgctgcgcggcaagtccgacacttcgtccttcgcggccgccgcgcgcaccgcgggccgctacctgctggccgcgctggtcggcggcgtcgtggtggtgtacgccttcggcttcatcatccagtccgcgttgaccggtgcgccgctcgccgccgtggccctggcctccatgggcttcgtcgtcggcgacgccatcaaggccgtggtggcctctctggccgccgccggcctgtccaagctcggtcgctgacctgagctactagctagctactggccggctattacagcactcccacatcggcggtgcggaccgtatggtccgtgccgtcttgtgttctcaggatcagtgaggcgtcttcgttgaggccgatggcttcgccggtcagcgtggtgccgtccgtgaaatgcgcctcgacctgacggccgcgcgcccagcacaccgccttcatttcctcgcgcaacgactcggcctggcccttcgggtcggcgatgaacttcgccagtcgttcacggaagccctcgacctgacgttcggccaccgcatcgcgcatctcgccaaacgacggcaagcccgtgacatgcagctgcagcgaagtcgactgcggcgtgggcagccaacaggcacccagcgccagattcaggcctacgccgaacacgatgacgacgtcgtcatcggcatcggcatcagtaccggacgacggcggaatcaccagttccgagagcagcccgcccagcttgagcccgtggcagaacacgtcgttcggccatttgagttccagcaagcagtccggctggttcggcgcggcaccgtattcctcgatcatgccgttcagggcgtccagcgtgaccagtccggcgatcatctgcagccagccattgacggattcgtcggtggcgatcgcgcgcggaatgcgcacggcataggacatcgtcgagcaacggccgggctgactgatccacttgtgaccattgcggccacggccggcggtctgccggtcggcggccaccacggccaccgccagttcgccatcctggtggtcgggcagcgtcaacgacccgtcgccgatcatctgcgcggccagcgcgttggtcgaatcggtttcgtccacggcgaccacatgatccgcgacggctgtagttctgggtagctgcggcgttgcagctttcaatgcaatcatcatggacactacgttacctcggttgcgccgttttttgcccgcgatattccacggaaaagcgcacaaaatcaaccattttgggccggacagcccgtgttagcgttcacaacttcggaaattccgcattcgccgagcccacgcatgcccccggccgtcgtattggcttgcgaacaatggcgatgcccggcagacatcgaatatcaaccgttgacctgtgcggctaccatatattgtcatgacgtcaccagccaccgcgaagcttgccgccgtatccagccgccagtcccacccgcatcttgcgcgcgtgggcgctgccgcgcgctggacactggccgtgctggcctgcctgtggcttgcactgtgctcggcggtcggcccgctgtaccgggacgaggagaacggcaccctcgcccattggaactgggccaataccgcaatattcgtcgtgtcgttcctgatatatctcggaatcatcacgctgatggcgcgattcgcagcaggccagcgcatactgccgaagaccatcggcgagcgcctacgccaccatcagcagaatagcgaaacatcacggcccaccgccgatcagcaggccagccaaccagccaagacccgtcgtaccgttcgcgctatcgtcacgtccaccgtcactgttctggaccgctggatcacacgcggcacgaaccggttctggaagcttatgctggtgttttttgtcggctggctctgggtgccgaccactctgctggccgcattcggcgcggacctccgctcacagatccgcgaattcagctgggcctggaaccagtggaccggcctgaaacagccctatatcggcttcttctccttcgtgccgatggacatctaccccaccgcgcactacatgtggccgtccgatcccacgtatctgaccgaccagcacaatgtggtactcactgtgttctatggcgcgatagtcacgtttgcgaggcatctgaccggctcaaacgatgccggcatcgtgacgttggctgccctgcagacgctgttcgccgtgttctgctgcgctgccgccgccaatcgattcctgaaccggccttggataggaaaaacggcaacggattccgccgttcccccacaggccggaggattggccagattcctgattctgctgttcttcatggtctgcccgctggccgtgttttccactatctccatcaccaaatcgccgctgttcgcgttctcgttcgtctggtggttcagcgtctggtatgaactcgtccagacctggcaccccgccggcacccgcaaacatcctcagacccctgccatcgccacgcccgtccacttgccgtgccacagcttcatcgccttcatcctggccacgtcggtgatgctgatttccgcgaaatatgcgtggtacatcatcgctctgcaaatcgtgctggctctgatcgccgaccgcaaacgctgggcgacttacgtcgtggcgctgctcatccccaccgtactgattcacggcggcatctccttcgccatctcctctggtgcgatcatcggcggcgatccaatcgaaagccgcggcgtacagctgcaaatgatcgcccgcgtggctcagcgcaatccggacggtatttcagacgaagccaaaaagaacctcgcgcccgtcttcaatctcgatcagatggccgacgcttactcccagcaggatgccgacccggtgaaatcctccggtattcaggccaagaaggtcagctacaagtggcgcacggtgacgcccgaggatatgaccaatttcaacaaggcatggttcgaaatcgtcaaggacaatccgatcatcgcgctggatgcgttgctggccaaatgcttcggatacttcaatgtgaacgatcagccgtacgtatcgatggattattacgtggccagcgattacgtgcagaaaaactccacatggatcaaggattacaaccatgactggcgtgagcacatcgccggcttcactcgcgtatggggcagtattcccgtgctcggctggcttacgcacggcaatttctacgtggtgatgacattgctgatcggcgcggccgaggtgattcgccgacgttggctcaccctcatgacccatattccgctgctactgctgatgggcgtgatgattaccgcgccggccaataatttcgagcggcacatgttgccggttgcgtttgtattcggattcgtggtgctgacgtattggcgagagtctttggctgaaaggcaacgccaatcagcgacgctacactagtgactatgtcagattttctcgaacttcttgctgccgacgttgccgattcgtccggtgcatccggtatgccgggtgcgcccgattcatccgattcggccgcacccggcatcaccgcgaccaaccgcgtacgcaccgtgctgttcgagtgcctgttcaatcatctggccgacgaacgagtggagtccctgttcaccatcctcggtttcgagcatgacttcgattgttacaccatcgccggataccctgcccggtccgccgcacgtacggccaaggaaatcgagaaaatcgtggccgatttcggcggtgtgtgtctgaccgccaagcgcccgatcggcaacagcaccgccgtagtggcgttgattcgtccggtcggtgcggccacgccggaaatcatctgcaataccatcgccccgtcgttcgccgccgatcggccaatcgccttgggtccacagcgcaccggtgccgatggcgcgatgcgttcgattcaggccacgctctactgtcttcaggccgcgccggccctggccgccaccgtgcagccattgccgcgcccgttacgcaccgacgacgccctgcccgaacgtgcgttgatcggcgacgcggacgcccgtgacgaactggtccgcgtggtctacggaagcctgacagcagcaggcccggatgatccgacgctgctcaccgtctccacattcctgaagttcggcggttcgctcgagaccacggccaaggagctcaacgtacatcccaatacgatccgctaccgtttgaagcgcgccgccgaatccaccggctgggatgccaccgacccgcgcgaggcgtacgtgctgatcaccgccatcgcgttgggtcgtgtggccgaagcgtaacggaccgcagcgtagtcgggcagaagcataaccagcagaaccgtagccggcaaaggccatagctgaccggacataaccgtccagcccgacagcctagcgggccgaatcaggctgcctgaatttcgcgtacgccatcgcgcagtaacgcggccaaggattcttgagtggctaacacttcgtccacgaatccaccggcggacaggctggcgatcacgcgaccggactcgttgtccacaatcggtacaccgacggcaccgacacccaacgtcacatcctcatccgacagtgcatatccacgttcgcgagtcaagcgaatatcctcgcgcaactgttccacactgaccagcgtgttctcgttatatgccggaaacggcactcctgcaagatagcgttcgacatcggcatcctcgaaatacgccaaggccacgcggccggccgcgccagcatgcagaggcagcacgcggcccgggcgcaggatcagcgaatcgatggcatgaccttgcgcacattccacgcataccaattcagtgccggagaccacactgaggaatgaggtcatgccggtttgcgcggtgatggcatgcatgaccgcaatcgcaggctgccattcggtacgagacgtgcgagcggcatcagccaatcgcagccagtccagtgataatgagtagttaccatccgtatccgttacggcccaccccacatcgaccagtccatccagcacgcggtatacggaggatcgcgggatatcacaggcgtcggcgatatctgccggcgacaggccattctccgccgccaatgcgtccatcacacgactcgccttgtctaaagcgcgggtcggttcacgtttgtcttccgccatcgtcgacgttccttcccctgacttatccctgactcatcatattcaactgttcaggccaagatgatcaccactgtatccaaggcctcgcgacacctcacggccggcagtccgcaccaatcgcaccatgtcttgagccgatgccgttgccggttgcccatctaccagacaggccagctcaggttccaaggagcgggaaagaccactcagggcgattgccgcttgaatctctccggcgtgattgaataccggtacgctgatagtcacggagccggccatggtctggccgacgtcataggtgaagccgcattcgcgtatatgacgagcctgtcccattgctgtg

SEQ ID NO: 852 - DNA, 26449 bp, Unknown
  R14_18m  MAG No. k141_11210
gacggggtgataatcgcgtgcaccaccataaagccgataatcagtaccgccacgacggcgacggcgatgatgcgatgcaccacgcgctttttcttgcgcgtctcacgttcgcgcattaatcggttgaattcggcgacttcctcgttctccgcctcgccttgggcaagggcgtcgacacttgattccacggtgtcggtagcgtccaacgattgtatgattgcggtctgctgctgatccttctgcatgtgctctcccccatggctggctccgagcctcgcgcccggatactggttccaagcctatggaggaatggcgtggtttccatcatgcgcaggattgaattgatggggagttgtcatccttaaggattagttggggtggggaatttatgggctgttttcagtcttagctctcgccttcgcttccgcttttctctcccccagtcatgcttcgcatgacagcctcctcgtcagagggggcttatgaataagcaaagggctcgggacgaatcccgagccctttggcgttagcgaactaacaacaccgtggaggtgttatcactcgttgtcgccagcggtagcggcggtagcggtgacggcacccttcttgtcggtgttcacgccggagtacacccagtcggtgtagtccgggtggtcgtagcccttgtcgacggcgaactggaaggcctcatcacggaacttctcgagctcgtcgatcttgtcggcgtacttgtcggcgtcgatcatgcgcagggcctcagcggtcagctcgtagcggtcgatgcggttgacacgaaccatgtcgtacggggtggtggtggagccctcctcctcgtagccgtggacgttgaagttgtcgtggttcggacggtcgtagatcaggccgcgcacgtcgtgagcgtaggagtggtacgcgaacagcaccggcttgtcggcggtgaagatgtcggcgaactcctcgtcggtcagagcctcgtcgttctccttggcggactgcagggagagcaggtcggcaacgttcacaaccttgaacttgacgcccagttccttcagcttgtcggaagcagccatgatctcctgagtcgggacatcgccggcggcggcaagcacgacctcggcctcatcgttgttcttggcggtggaagcccaatcccaagcggcggcacccttctcgagctcggcacgagcctcgtccagggtcagccaggtggcagcaggctgcttgccggcgatgatggcgttgatcttgttggtggacttgtagcacttctcggcgatggccagcagcatgttcgcatcggtggcgaagtagatgccgatgacgtggtcgttgtggaagcacttgttcagcaggacggaggtgacacccgggtcctggtgggagaagccgttgtggtcctgacgccaaacgtgggaggagaccagcaggttcatggaggcgatcggcttgcgccacggaatctcgcggacggtagcctcaagccacttggcgtgctggttcagcatggagtcgatcacgtggacgaaggactcgtaggagctccagatgccgtgacgaccggtcagcaggtaggcctcgaggaagccttccatctggtgctcggacagctgctcaacgacctggccggagacgtgcatgtgctcgtcgacctcgtcggagatgtagccggcatcccactgcttgttggtgacttcgtaggaagcctgcagacggttggaagcggtctcatccggtccgaagatgcggaagtcgcgcgggttgttcttgatgatgtcgcgagtgtagacacccagacgacgggtggcctcgagctggccccagccgtggccgtactcagccacttccttgacctcgtagtcctcgaggttcggcagcttcaggtcgtcgcgaatcacaccaccgttggcgttcgggttggcaccgatacgcagctcgcccttcggcatgaaggcaaggacgtcgtccttgacagcgccgttggcgtcgaacagctcttccggcttgtaggactcgagccagttcttgaggacctcgaagtgggcctcggtgtcgcgggcggaagccagcggcacctggtgagcgcgccaggagccctcggtcttcttgccgtcgatgtacttcgggcaggtccagcccttcggggtgcggaagatcagcatcgggtagaacggacggtgcacgttgtcggtctgagcggcggccttgatgtcgcagatctcgtcccagatggtctcccacagctcggcgaagcgacggtggatggacatgtggtcctcatcgtcgaagccagcgacgaactcgtagggctcgtaacccatgccgtggaagaactcgtggagctcttcgtcggagatgcgggacaggatggtcgggttggcgatcttgtagccgttgaggtgcaggatcggcagcacgataccgtcggtgcgcgggttcacgagcttgttggactgccaaccggtagccagcgggccggtctcggcctcgccgtcgccgacgatggccgggacgaacaggctcgggttgtccatgatggcaccgtaagcgtgggacagagcgtaacccagctcaccaccctcgtggatggagcccggggtctccggagcgaagtgggacggaataccgcccgggtaagagaactgacggaagaacttctgcagaccagcttcgtccttggtgatcttcgggaaggtctcagtgtaggtgccgtccaggtaggactgggaggtaccggccgggccaccgtggcccgggcccatgatgatcacggtgttctggccgtggtcagcaatgaaacggttgatgtggccgatgaggaagttcaggccaggggtagtgccccagtggcccaccagacggtgcttcacatcttcgcgggtgaagggctccttcatcagcgggttggaacgcagataaatctggccgatggaaaggtagttggcaacgcgccagtacttgtcaacgccttcgagggcttcctcggaaaccggagcgttgagcttcttccaaggggtgccaataacaggactcgtcatgtgtactcctgtactcctgcacgtgatcgtgcgattgattatttctgttcggtcacggttcctgacccttgcggtgccaaggttttccgttcccaatcaatcgtcatggtacgaggacaacgcgacttttgaacgatttcttgcgggtgtgttcgaaattgttgcggaaatttcagtatttgtgcggttcacctgaccgtttgtcaacattagttttttcaacatactttttcagaacggcggaagcatgcggaaatctagcatctggctagaacagcgcacgttcgatttcccatgttcgaaatcggcgtgttgtccgactacaggcatgtagtttgttcgatttgcgcacatagtccctgcgtgtcggccttgtcgccttgaccagtgataatcaggggtgttcagcccacgtaaaattccaatgaacgttaggggaatatcaatggcaaacggtcctgtgcttgtcgtcgacttcggcgcccagtacgcccagctcatcgcccgccgcgtgcgcgaggcaggcgtgtactccgagctggtccctcattccatgccggtcgacgagatcctggccaaggatccgaaggcgattattctgtccggcggcccggcctccgtgttcgagcccggcgcgccgaccatagataccaaggtattcgaatccggtgttccggtgcttggtatctgctacggcttccaggtcatggcctatgagctcggcggcaaggtggataaggccgctctcggcgaatacggcaagacctcagccaccatcgacgacgccgacggcatcctcgccgactcccccgccgagcagaccacgtggatgagccacggtgtggcggtcgaacaggccccggccggcttcgaagtgctggcccacaccgaaggcgcgcccgtggccgccatggcggacgaatcccgcaagctctacggtgtgcagtggcacccggaagtcaagcactccccgcttggccagaagcttatcgaaaacttcctgcaccgttgcgccgcgctgcccaacgactgggacgcctcctcgattatcgaggatcaagtcaagaagatccgcgagaaggtcggcgacgccgaggtgatctgcggcctgtccggcggcgtggactccgccgtggccgccgctctggtgcacaaggccatcggtgaccagctcacctgcgtgttcgtggaccacggcctgctgcgcaagggcgaggtcgagcaggtcaagcacgacttcgttgccgccaccggcatcaagctcatcaccgtggacgcggccgacgacttccttgaggccctgaagggagtctccgagccggagcgcaagcgcaagatcatcggtgagaagttcatccgcacgttcgagaaggcccagcgccaagtgcttgaagaggccggcgcgcgcggcaaggaagtcaagttcctcgtgcagggcaccctctaccccgacgtcgtcgaatccggcggcggcgacggtgccgccaacatcaagtcccaccacaacgtcggcggcctgcccaaggacatcaagttccagctcatcgaaccgctgcgcactctgttcaaggatgaggtgcgcgccatcggcaccgagctcggtctgcccgacgaaatcgtctggcgtcagcctttcccgggcccgggtctgggcatccgcatcatcggcgagatcaccaaggagcgcctcgacctgctgcgcgaggccgacgccatcgcccgcgaggagctctccaaggccggtctcgaccgtgacatctggcagtgcccagtcgtgctgctcgccgacgttcactcggtgggcgtccaaggcgacgagcgcacctacggctcccccatcgtgctgcgtccggtgagctcggaggacgccatgaccgccgactggtctcgcgtgccctacgatgtgctcgccacgatctccacgcgcatcaccaacgagtgccgacagatcaaccgcgtcgttctcgattgcacgagcaagcctccggccacaattgaatgggagtaattgctctctgtgacgaatgggattctccatcggggaatcccttttttgttgccgacgatgcccggtataatttttccgcttacgacgtcgtccggaaagggatgccgacctctttgcgccagggattcgacaacgaaaaatacatcgaactgcaagccgccaacatctcaacagcgtgaaccgacgcttgcactcggatgaaacgctgattgcattgtcaatcaccagcgccaccagtcctgtggccgctcgcgtcatcgacgggctcaaacagttgcagggctgcgacgcctttttctccgttatcatctcatccacggacgaggcgttgtatcgcaaactcggcatcaacgtgtgctgcgaaccgaagtacgaacgggtgagtctgtatcaccggtaaacgccaccgataagcgcggtatgccgcgaatcgtcaagccggtaatcatgcagcatgcggcctgacgattcgctgctgtcgcattgtctctcccctcgaccatgctgggcttgttttccgtttgttggagagaacgggggatgccattagcactacggtgagagaaggattatccgtgaatcggttcgtgggtctagacggtattaaaggactggcgctgatagccattgtgctgtaccactgcatgcagcaactgctgccaggcggattctacggagtcgacgtgttcttcaccgtctctggattcctgattgccgtcagtttgattcgttctctggcgaaaaccggatcgctgaatctcgtgcgatatatccccaagcgtgcagtacgtctctatccggcgctgtttctgctgattccggtcaccgtctccgtcggctggctgctcgatcacgacattctagtttccatccgcgaccaagtcatcaccgtgctgctgggctgctacaactggtacgccattgccggaggccaaagctatttcgaccaaatgaacccgcaggtgtttcgccatctgtggttcattggcgtgctcatgcagttctacgtcatcgtgccgttcatcgtctggctgatgtggaagctccgccagacgaaactgccctcactcatcccactgggactcgcggcgttcagcagtatcgccatgtgggcgatgtatgtgcccaagggcgaccccacccgcgtctacttcggcaccgatacccacagcatgggcctgatgctgggtgtggctctcgcctggtgggtcaccgctcctcagttgggccacgctcgtcagggagctgtgccgatgccccgcaccattagatcgagcgcttcggccgccacgtaccgggctccgttacctcagattcctgtaaagcatcgcatctggaatgcgacggcaccggtattggcattcctcagcctgattgccttggtcaccatgacggttatcggcaaacaggatgcattcgccttccgcggcggcatcatattgtccagcctgttgtccgtgctgctgattgccggtaccatctccgacgattcctggatgcaaagcctcatggtgttcaagccattggccgccctcggcaagtattcgtacggcatttacctgtggcactggccgttgtggattctttccagcgcccttgccccgaagatcttcaaggcagcagggccttggcctctcatcatgaccgcgttgctcaccgccattgcggtgatgatttcctggctgatggtggagaaaccggcggcaatgcactcggtgatatccgtcgtggtgccccttcgcacgaacaagaagaatcatgcggcccgggttattgccgttgacgttatcctggcgctgtcgttggtcggctgcgcgcagggcattactcatgcacctgcgaaaaccgccatgcagatccagctggagcaacaggccgcacaactggaacgcatacagaaaaccgaacacgtgctgctgcgccatgccgtgccggcaccgcccaagcccaagcatgagatgcccaccggcgatcagattaccgccataggcgattcggtgatgctggcctcatcacagggcctttcggaagtcttccccggcattcagaccgacgcgagcgtttcccgctccatcatggtcgcccccgaactcatcggcaatgatctgtccgccggcagtctgcggcaatgggtgctgatcggccttggcaccaattcggcaatcacccctgatcagctggaccagattcgtaatatgatcggccccgaccgcgtgctggtactggtcaatgcccacggagaccgtacgtggattccacctaccaaccaggtgcttgccgactatgcggccgcacatccggacaatgtggtgctggtggattggaatgccacagccaacgcgaacgcgcaggtgctcggctccgacggcatccacccgagcatggatagcgatatctatgcaaaggcggtcaaacaggccatcgaacaatggatcgcaagcggcaggtgaacggcaggcaacgctgagttgtccaaccggtcgtgaagaacggctatgctgaagactgcatcaacgagaccacacgttgggagacatggtgagcgcaatccttgaagggaagcccgataagaatcttattctcgttacgggaaggattcatccgaaattggctgaggatgtcgccgagcagctcggcatcgacgtccttgaaaccaccgcatacgatttcgccaacggcgagatgtacgtgcgctacaccgaatcggtgcgtggcgccgatgtgttcgtgctgcaaagccactacaaacccatcaacaaggcgatcatggagcagctcatcatgatcgacgcattgaagcgcgcctcggcccgttccattacggcggtctgcccgttgctcggctactcccgtcaggacaagaagcaccgcggccgcgagcccatctcctgccgtctggtgttcgacctgctgaagaccgccggtgccgaccgcatcatgtcggtcgatctgcatgccgcgcagtcccaaggcttcttcgacggcccggtcgatcatctggtggccatgccggtgctggtcgactacatccgtgatcgtttccaaggccatctcgacaacgtcgccgtcgtctcccccgacgccggccgcattcgcgtggccgagcagtgggcgcagcgtctcggcggcggtccgctcgctttcgtgcacaagactcgcgacatcacccgcccgaaccaggcggtcgccaaccgtgtggtcggcgacgtcgccggcaaggactgcgtgcttgtcgatgacctgatcgacaccgccggtaccatcgcgggcgcatgccacgtgctgcaggacgcgggagccaagtcggtgaccgtggtcgccacgcatggcgtgctctccggcccggccatcgagcggctcaagaactgcggtgcgcgcgaggtcgtgctgaccgacaccgtgccgattcccgaggaaaagcgctgggatggcttgaccgtcctgtcgatcgccccgctgctggccagcgccatccgcgccgtattcgaggacggctcggtcgccgaactgttcgacacctaccccgagcaccacggtcaaggcttcctgttcgcctgatcacgtgcgtgtttgttcaaggaaagcacacgatgcgagacgcgacatggcgtagtctttcggtaaataccgacagtatggtataaatgaacacttgtgggccgaaagcccacgactcccccatggtgtaatggcagcacacgggtctttggaaccctttgtcttggttcgagtccaggtgggggaacggctgacggccgctcgacatccgggcggccgtctattgttttgaggtgtttccaccctcaatagacattccaatcgaagggaatacgtcagttatggcattatccgcagccatcgtcctcgccgccggcgagggtacccgcatgcgttccaacaagccgaaggtgctgcatacttttgcaggcaagaccttcctgaacagggtcatggattcggtgaccgccctgaaccccgacacgctggccgtggtcgtgcacttccaggccgagcgcgtcgccgaagccgcccgctcctatgacgagcaggtcaccatcgtgaaccaggacgacattcccggtaccggtcgcgccgtgcagtgcgcaatggcacagctcaccgaggctggcaaggtcgatggcccggtgctgatcgccgcctccgacatgccgctgctcgacagcgagacgctgcaccgcctggtcgaattccacaccgcctccggcaacggcgccaccgtgctcaccaccatcctcgatgacccgaccggctacggccgcatcatccgcgatcgcgaaggcaacgtgctgcgcatcgtcgagcagaaggacgccaaccgcagcgaactcgccgtgcaggaagtgaacacctcggtctacgtgttcgaggcttccgtgcttaccgaggcaatcgccggactgaagtcgaacaacgcgcagggtgagttctatctgaccgacgcgctggaaaccgccaaggccgctggcaaggtcggcgcgttcgccgctccggatccgctcaccgtcgaaggcgtgaacgaccgcgtgcagctggccgcgctgtccaagacctacaaccgccgcgtctgcgagcgctggatgcgcgacggcgtgaccattcttgacccggaaaccacttggatcgaggacgatgtccagatcggccgcgacgccaccatcctgcccggttccttcctgcaaggccacacggtggtcggcgaggacgccatcgtcggcccgtacaccaccctcattgacgcaaccgtggacgaaggtgccgtggtcgagcgttcccgcgtgcaggaatcgcacatcggcgcacgcacgaacatcggcccgtggacctacctgcgcccgggcaacgagttcggcgaggatgccaaggccggcgcgttcgtcgaaatgaagaaggcgcacatcggcaacggcaccaaggtgccgcacctgagctacgtgggcgacgcccagctcggcgaccacaccaacatcggcggcggcaccatcaccgccaactatgacggtgtgcacaagaatcgcaccaccatcggctccggctgccatgtgggcgccggcaacctgttcgtggccccggtcgaggtcggcgacaacgtgaccaccggtgccggctccgtggtgcgccacgccgtgccgagcgacacaatggtctactccgagaacacgcagcacaacgtcgagggctggaagcccgcctgggagcgctgaaccatgcccgcacttcaggattccatcaacgccgtccgcgtggccgccgaggccgcagaccgtatcaaggccaccgacatcgtggccttcgacgtagccgacctgctcggcatcaccgacatcatgatgatcgccggcgcctccaacgagcgtcaggtactggccgtggccgaggaaatcgaaaaggacctgttccttaagtgctccggccgtcagccgcgctctcgcgagggcctgaccgagggccagtgggtgctgcttgactacggtgatttcgtgattcatgtcatgcacgaagaatcgcgcgaattctacgggctcgaacgactctggcgcgactgcccggccatcgatcttgaactcgcacacccggaaacggcggagcatgcggacgctgctgccgtcaccaccgcgtaacgtgcgaatcacataacgctgatattcgctgatactcgctgatattcgtgtgtcgggctgcctgttgccgaacgtcattgacggcaccaggcagccctcccttttccctgtttcctcactggaatcgaaaggatcgtcactatggccaatcatgttcgttccattttccttatccgtcatggacgcacttcctataacgccgctcacaagctccaaggccaggtcgacattccgctggacgccgtgggtgaatggcaggtcaagcagaccgccgcggccttgaaaagcctgtacgtcgatcgtcggccggaaatcaaccaccggttcattgtctgctccgatttgaagcgtgcgcacgccaccgcgcaggctttcgccgacgtattgggtggaatcgagcccgtcgatgatcatcgcgtccgtgaacgcagcttcggcgactgggatggccatgccgtggctgaactggccgaacgctaccctgaggacttccgttcctggatggagtctcggggcggtgaactgaagtatggtgccgaacccaaggaagccgtaggcaaacgcggtgtggaggctcttgaggactggtccacgcgtgccggagacgacacggacctgttcgtgttctcgcacggcgcatggatcgcgcagacattgcagaccctgttgggcatttccgcgatcgatccgaccttctccacggtggtctcattgcgcaatgcgcactgggtgcgcttggtgccgatggacaatcccgatggcactgtgcgctggcgtctgctggactacaatcacggtccggccatcgccgacaccgacgaatgggaacgcgaacgctgatcatgttcccgactcccctgctaatccaataggtccggtgcattcggaaccgttcaagcaataactgaatggctcaatgcctgaataatggcggaaacaagccaaaaagtgtcgccaaatcacacttttgtcatttggcgacacgccggattttgccagaatcgacatctcgtcgtaatgtatacgaggtccgaacaacgggctaacaattgaaaacggggctatagcgcagctggtagcgcatctccatggcatggagagggtcgggggttcgaatccccctagctccacgacgaagccatcaaatcggatgatatggtggtttctccgctggttcgtggcgggtcttgtgactcccatgaatcggatagcttcactcggggctatagcgcagctggtagcgcatctccatggcatggagagggtcgggggttcgaatccccctagctccacaatcaaggccggtgcttcacacaccggcctttttcgttttctatcctatcgggcgacttttgtgcaacattcccgggaatacgtcgcaaaacagggactggaatgcatgcagtgcgatactttccccggaaagtatcgccaaggggacgctcttccgattggcgcgacaccggcgtgagagataacagtaatcgccactacaatgaggtgtggtccctatcgtgttgatcatcaaaggagacaaaaacatcgtgaccgtcacccgtgtatatatcgccagccctgaaggcgccaatggccgcaacgtcgtcgcttacggcgtgctcaacgcattgacttccaagtacaagaccatggtgttccgccctgctgtgtccaaccatgacgaattcaccccgatcctgctcgccgcttccaatgccggactcggcgtggccctgtccaccggcctcgacgtgcataaggtgcgcgccgacaaggacaccgcccgcggagacatcgtcggcgagttcaactacgccatggaggtctcccgcgcgaacgccgccctgatcgtcggcaccgacaaatcccacgtcaacgacccgaccacctacgagttcaacgcggacgtcgccgccgatctgaaggccggggtgttcctggccgtgtgcaccgtcgaccgctggccgcacgagctcgacgagaccgtcaagctgtccatcgagggcatgcgcgccgcgggcaatacggtgctcggcatcttcgtgaccggctgcgagccgcgtcacgccttctccgtcaaggagaccctcgccaaatacggcctgccggtctggaccctgccgcaggtgcccttcaccgacgaatccaccaaggatctggcgctggagaccttccgcaagcacgctcccatcgacgaggtgctcgccgcgctcgatgtggacgtcaccgcgccggtcacgccgtacgccttccaattcgacctgctcggcaaggccaagagcaacaagaagaccatcgtgctgcccgaaggcgaggaggaccgcatcatcaaggcggccgattacctgctcgaacgtgagaccgtgaacctcatcatcgtgggcgacaaggacgccatcctggcccgcggcagggaactggggctgaacagtctggggcgcgcccgattccaggccatggacgacgagaacgtgttgaagcccatggtcgccaaactgtgcgagttgcgcgccaagaagggcatgaccgaggagcaggcccgcaagcaactgaccgacgccagctacttcggcaccatgctggtggtgctcggctatgccgacggactggtttcgggttccgtgcattccaccgccaacaccgtgcgccccgccctgcaggtcatcaagaccaagccgggccagaaactggtctcgggcgcgttcctcatgtgcttcaaggaccatgtggccgtgttcgccgactgcgccatcaacctcaacccggacgccgagcagctttccgaaatcgcgttgcagtccgccgagaccgcacgtgccttcggcatcgacccgaaggtcggtatgctctcctactccaccctcggctccggcaagggcccggacgtggacgtggtcgaggaagccaccaagctgctcaaggagaaggctccggatctgccggtggtcggttccatccagttcgacgccgcctggtcccccaccgtggccgccaccaaggccaagggcaacgatgtggccggacacgtcaacgtgttcgtcttcccggacctgtgcgccggcaacatcggctacaaagccgtgcagcgctcctccggcgccttggccatcggcccggtgctgcagggtctcaacaggccggtaaacgacctgtcccgtggtgcgatggtgcaggacatcatcaacaccatcgccctcaccgccatcgaagcgcagtgagcccggcttagctcccgccagcgggagccactgtaatgcttattttgtagcaagcaacgagtaatctaatcaacggtaacccgtgtctcacgggaacattcaatcacaatggaggatgcccacaatggcgaaaaccgtccttgtcatcaattccggctccagctcgatcaagtaccagctggttgatctcgaatccggcgaaggcctcgcttccggcctcgtcgagaagatcggtgagccggtcgacggccactacaagcacgagtacaacggcgaaaagcacgagcttgaagagccgattcacgaccacgagcagggtctgaagcgcgtgctcggcttcttcgaggagtacggcccgaacctgtctgaggctggcattgtcgccgtcggccaccgtgtggtgcagggcggctccatcttcccgaagccggccctcgtgaccaacaagaccatcaaccaggtcaaggatctggctgtgctcgccccgctgcacaacggcccggaggccaagggtgccgaagtcatgcgctccctgctgccggacgttccgcagatcttcgtcttcgattcctccttcttcttccagctgccgaaggccgccagcacctacgcgctgaacaaggaaatcgccgatcagtaccacatccgccgctacggcgcccacggcacctcccacgagtacatctcctccgtggtgccggacgtcatcggcaagccggctgaaggcctgaagcagatcgttctgcacatcggcaacggcgcttccgcttccgctgaggtctccggcaagccggttgagacctccatgggtctgaccccgcttgagggcctgatgatgggtggccgtaccggtgacatcgacccggctgtggtcttccacctgatccgcaacgcccacatgaacgtggacgagctcgatgccctgttcaacaagcgttccggcatgatgggcatgaccggctacggcgatctgcgtgaggttcaccgtctggtgtccgaaggcaacgaggacgccaagctggctctggatgtctacgtgcaccgcatcgtcagctacatcggcaactacacctaccagatgggtggctgcgacgtgatcaccttcaccgctggtgtgggcgagaacgacgacgtggtccgcaagatggtgtgcgacaagctcgctccgttcggtgtcaagctggacgaggagaagaacgccacccgctccaaggaaccgcgcatcatctccactccggactcctccgtgatcatcgccgtgatcccgacgaacgaagaactggccatcgcccgcaagtccgccgcaatcgccgaggctggcaccgatacctacggcaacaccttcgccaagtaagtaaccgccgttaggcatctcactaatctctagttgcaacactatgggggctgattccgattggaatcagcccccattcgtatatggtcaagagaccactacccctgcgtcatactcccctcagtcgcctccggcggacagatccactcagagaggggatccaggccctataacttggctcccttctctgaggggagctgtccgcgtagcggactgaggggagttccaccaggaacacaggaccccttactgcctcagcatgccactccacataccgacgaaatcaggcaaggtcttgcgcgtggtggccacgttgatgacctcgatatcgggaatacgcagccccagcatcgcggcgaacgtggccatacggtgatcagcataggtttccatcacggcaccgtgcaacgtctccgccggcaccggttcgatacgcaatccatcaggcaattcctcagccgctcccccaacacgacgaatctcgttgaccaatgcctccagacgattcgtttcgtggccgcgcaggtgaccaataccaaccatgtctgtcgacttatcagcaaacaccagaatcgccgccaacgagggcgcaatctccccggccgccgtcaaatcgaacgtacccagcccacgcacggtgccgtcaccggtcacctcgcaatagcgcacgccgccgatggtcgggaacgatacttcggcacccatctgctccagatatccgggcaacaggccgcccggctgggtggtggtttcaggccaatgaggcacccggaccgtgccgccggcgatcaatgccgcgccgaggaatggcgccgcgttcgacagatcgggctcaacggtcaccttgctcggcagttgcattgcgcgcggttcaaccgtccatgtgcgggcggattcgtcggcctcaaccgcaccgccggcaccggtcacatcggccacggtcatgcgaatgtgcggcaggctcggggtcttctcccccgtgtgcgcgaggtgcagaccgccaggcagtttggaactaatcagcaacaggccggagatgaactgggaagaaccggacgaatcgatgctgacctgcgcctgggcagccggcaaggttgcaggcggcgtaatagtgaacggcagacggccaacctcgccgtggtaatcaaccgttgcacccagctgttccaaaccgtcaagcaccggcttcatcggacgtgcataagcctgttcgtcgccatcaaaattcactgggccatctgcaaacagggcaaggccgggcacgaaacgcatcaccgtgccggccagtccgcagaacacattgacgttgccatggaatcggccggatacaggaggagtaaccgttacggtggtatcggttgcggaatccacgtcgcagcggacaccgagggcttcgagtgcgcccatcataaggtccgtgtcgcgcgaacgcagcaggccaatcagagtaacgggcttgctgccgagggcggcgagaatcaggtagcggttggatagggacttgctacccggcaccgttaccgtagtgttcaacggctgtgcggcgagcggggcaggccagagattcgtgagtcgttcagtcataaggccaaatctatcaaacaaattattcaccggtcggcagcgatgcgggattcgatctgctgatcaggtgcggaagacggctgctcaaaaccgccttcgatggcctgcgcgtgcaacaactgagcggccgcgcgatcggcctcgatggcggcgatctggcgcgagaacacgatgaaccagccgaggaacgccagaccagccaacgcctccacattggtgagggtgttgtgacccatcatcatattgacccagaatgcagcgcatacgagcgcggtcaggtcggaggccaccatcactgctttggacaggcgtggcgcaagccacggcaggagcacgaacagcagcagcatgacgaacggcaggcctttggcgcatatattgtgcaagagattgtgtggcgtgtaccgaaacacgccgatgccgatgaatgccaggccggccaccatcagcaggaaggacagaatggagatgcgcagcatgaaatgtgggatttcgtagccgcgattcggatctctgctggtgcggtcgtgccagaggcgctgtagccgttcggtggtcaccagttcggagatggcgaagtagctgacgatgatgatgcatgtgccggcaagaatcagcgtggagttgaacatacgggccgcaaacgtggttctgtcgccgagctgcgaaaagttgttgtgataccagtatgggtcgtcggtggtcatgccggcggtgaccacgccggagatgacgaagaacggcaacagactggcaatagttttggcgttcatcatctccgcctgtacaaaggtcatgtaccccaccacgccggcgaaggcggcgcagacgctggagatatagccggagaagatggcattgcccatcatgtcgttggccgcaccgatgagtgcaaaagacgacaggaaaatggtcgaggcatacaccaccgaaagggcaacgatttcgaaaatgcgacgaatcggcgcaaaccaaccatgtttgaggttcaatgaacgtgatttgcgcgcatagccaataatgaaggaaatgacgccgcatgccgccacgatgcccgaacataccatgaatcggcgttgcgtcagctgccagatggccggcgcgtattccatgtacaggttcatcgataccgcgccaatgatggcgcaaatcaagaaggagatgagtccggaggtttctgcacgctgatgacgtcccatgccgggcctcccctatctattcgatgccgcgttatctttcaacaacaaacaaaactccccccgaggacaacgctttactagcaagccagcgggatttggctgtcgccattctactgaaaatctgaaacactacaaaaaaacgattatgtacgggcttcttagcctttgcgactatcgttaccgccttgccgagtaccgttgttcatgcagaaagaaagcagtattggacacaatcgaatgagcgtgtcggtatcgttgaaaaagtaatgaatgacggttctatcggttcaacctttaagggacgaaccagccgcggcaccatggcgctgatgcatgactatgccgagctcatcaatgaattacgtccgacagcagagcaattcaccgagatcgagcaatactgggtcaaacgaattcaggcgttcttcaccagcaaaccattcaagctggagtccgacaactcgctttccgttgatgcggccgtggaacatctgctgcggcaggcagcgcagcggcgaagggagaatccgggcatcatgtacgtcggcaccgtcctgcagcatctcgtcgcggcaaagctcaccatcgttgctccggaagtggaaatcaacggcgcgtccgttgctgatgatccgagtccgcggcttccaacggtgaggccgcggaccgtctcacaaaaccgtccgcggctccgccctcctgtttcgtcgcaactgactacaccgacgggttcgggcgcttcgtcacgaaaacgccattgcgatgcaccgtatacgcgccgccgtcactgccccgttccgcccggaacaggacgatcggctcccctgcgatgtcgcgcagttcgacatccgatctgccacgtgtcagatagaagtcgaatatggcgtcgtcggattgacgcacggtgtgcagaacgtcagaggtcacgccgctggcgggcgaccgcaggttggcttccggctgccggccatcctgcggctgcgcggcaagccagcctcccacgaatcgcgtcagatcgctcacgcccagatcgcagccgaggaaatacgcctccccttcgccgtacgtgttgcgggtgatcgcggccatgccgtcaagctcccactcatccgcttcttcgccggcatacgaggcaagcacctgcacatgcggtccggcgacggtcacgtcaccgagcttgtcgatgacgcgatcgagccagtcgaaatcccaatggtcttcgatgggctggaggcgatctcagctgaagatggcaagggccacggtgttgacgccggcctggcccatcaggcggatgtcgtcatcccagatttcctccggccattggtcgggactatagtcgccaccgaaagcgatgccgcgtccgtccgcggtcagcagttttggccatgcgaagtcacgtcatgcacgcacggttatctcctttggcaggcggcgcagggccacggcccatatcggataccagctgatagacactcctggccgatagtcgacacgccgccggttccggccccactgccggaaccgacatgggtatgttcatgaccgccgaccgcaggaacgaacaggcccgtccgccacggaccgcatcttgcggttcaggcggacgggccttatgggagggataggaacgggagatcagttcttaataactgcctgcgcctcatcgtcggcggcctcgacggcctccacgacctgcgcctcatcgtcgacgatctcgccggaagcgagcttggcttcgagctcctcaacgatctgcgcatgcatcttctcatcgatcttgaccttgaaccagaacacgacgaggctgaggatgatgagaacaagcgggacgtagaaggcgaaggtcttgaacgtggcgatgttggacgcggtcatgtcggctgccgtggcatgaccggtcatgccagccgcgagggcaacggcaccgaccgcaccgttggacatcgcgccgccgatcttgtcgagcatgggacgcaccgacaaggtgaccgcctcgttgcgcctgccgttcttcagctggccgtactcgatggagtcggtcagcgacagaatcgcggtcatctggatgaactgcgcaggcacatagaagaagatcagggcgacgatgacgaccggcaggttgctggagaacagggcgagcatcgtgtagccgataatcatggagaccatgccgccggtgaacaggtagcgacggggaatccagcggttgagaatcgggtacagcggcgccatgatgaatccggcgatcagcgggatgatgccggtgatggagaaggcggcaggctcgtcaagcacgaacacgaagaggtagtacatcacaccggtcgtgatgacgtttgcgatggcgtacagcaggtaggacagagcgacccacagcagctggtcgttctggaacagcgccttgaacgcctcgaacgggttaccgttcttctgggccttggcacgcagcgcgctggtgctttccttggtgccaaaggcgacggtccaggcggtaatcaggccgaggagcgcgacgatgaagccgaaggaggtccatccggcctggccctggcccttggcgccggtgaacgtccaggtgaagtagctgacgatcgggatgacgatgacggtgatgccgttgtagccgatagagccggtgaaggtgccaagggcggtgtaggtggaacgttcgtgggagtcggaggacaacgccgggatcatgccccagtaggagatgtcacgcagggagtagaacacgtcaagcacgatgaacgtgatgacgaacagcacgatgaacagcgtggtgttcacgttgaccagtccgaacatgccggagaagatgagcacgatcaacacggaggagaccagtccgccgatgaactgccacgggcggaaacggccccacttggtggtggtgttgtccacgaggttgcccagcagcggatcgatgaagatctcggcgatgcggataacgacgatcaggccggtgatgacggcgatcatttgggcggcgagagccttgctgtagctgacgaacaggcagctggtgacgtacgtgacgaagtacgtgctcatcgcgttgtagaaggcagcctgccccaagttgccgcacgcgtaggcgatgcgctggccgagcccgcccttcctgcggacgtcaccgtccgcgacattttcgttgctcattaatcttctccttaagaacccagagcatggatttatctatctattagataatcacttgccgacaggtgacacgccgccggttccggccccactgccggaaccgacatgggtatgttcatgaccgccgaccgcaggaacgaacaggcccgtccgccacggaccgcatcttgcggttcaggcggacgggccttatgggagggatgggaacgggagatcagttcttaataactgcctgcgcctcatcaccggcggctgcggcggcttcggcggcctccacggtctgcgcctcatcgtcgacgatctcgccggaagcgagcttggcttcaagctcgtcaacgatctgcgcgtgcatcttctcggtgatcttgaccttggagacgaacaccagcaggctgagcacgatcaggatgagcggggcatagaacgcgcagatcttgaagacgtggatattcgtcggggtcatatcggcggcggttgcgtcacccgtcatgccggccgcaagggcgatgaagccgacgatgccgttcgacagagcgccgccgatcttatcaagcatcgggcggatggaaagcgtaacggcctcgttgcgcttgccgttcttcagctggccgtactcgatggagtcggtcagggagaggatgaccgtcatcatgatgagcgtgccgggaacgtagaagagcaccagcgcgatgaagaccaggacgatgttgctggagaacagggcgagcatcacataagccacgatcatggagaccatgccgccgatgtacaggtagcggcgcggaatgtacctgttcagaatcgggtacagcggggacatgaccaggcccgcgatcatggcgatgacaccggtcgcggagaaagcggcctgattgtcaaggacgaacttgaacaggaagagaagcacaccggtggtggtcacgttcgcgatggcgtacagcaggtaggacagggcgacccacagcagctggtcgttctggaacacggccttgaacgcctgcaacggaccaccgttgtcttcggcgttggcgcgaagggcgctttggttttccctggtgccgaaggcgacggtccaggcggtcatgatgccgagcaccgcgacgatgatgccgaaagcggtccaacccgactggtgctcggcgttctcgccggtgaacacccagctgaaataggtgacgaccggaatcacgaggatggtgatggcgttgccgccgatggagccggtgaaggagccgagggcggtgtaggtggaacgttcgtgggagtcggaggacaatgccgggatcatgccccagtaggagatgtcacgcagggagtagaacacgtcaagcacgatgaacgtgatgacgaacacgacgatgaacaatgtggagttaacgttcaccaggccaaacatgccgctgaaaaccacggcaagcagcacggaggagaccagtccgccgaagaactgccacgggcggaaacggccccacttggtggtggtgttgtccacgaggttgcccagcagcggatcgacgaagatctcggcgatgcggatgatcaccacgaggctggtgatgacgccgatcagcttggccgcaagcgccttgtcaacgcccgagaacaggcagctggtgacatacacgatgaagtacgtgctcatcgcgttgtagaaggcggcctgaccgaggttgccgaacgcgtaggcgatgcgctggcctaacccactcttcctgcggacgtcaccgtccgcggcattttcgttgctcattaatcttctccttaagaacccagagcatggaatcactcattgattttgtaaagtaagcatacaagttttatcaccaaaagtaaaaagcattagtaaacaaggagataaacagcgtgtcgcaaggatgggataacatgggctgaaccgagacattgcatggacgcggcgtagcgtcgacggcaagcagtgccagtgatttggaagcggtaaacaggatttgcgttttatataaaaactgtttattcttttcggtaaaggaggccccgacctcctccataatatcattcacaacgaggtaatgacagaaagcaggagagcatgacagacgtcacacatgtcgatcgcgcatcgcaggcttggctgaccgacccgacggtgttcgaggtgaaccggactccggcccattccagccacaagtggtacgcccgcgacccccagagcggacaatggtccgatctcaagcagagccttgacggcgagtggcgggtcgaggtcgttcaggccgccgacatcaacctcgaagaggaacccgcgacggccgagtcgttcgacgactcctcgttcgagcgtatccaggttccgggccacctgcagacggccggtctgatgaaccacaagtacgtgaacgtccagtatccgtgggacggccacgagaacccgttggaaccgaacatcccggagaacaatcacgtcgcgctctaccgcaggaagttcaccgtctccgtccccgtagcaaacgccaagcaggccggcggatcggtgtcgatcgtgttccacggcatggccacggcgatctacgtgtgggtcaacggcgcgttcgtcggctatggcgaggacggcttcacgcccaatgagttcgacatcaccgaactgctgcacgacggggagaacgtcgtggccgtcgcctgctacgaatactccagcgcctcctggcttgaggatcaggacttctggcgtctgcacggcctgttccgctccgtcgaactcgccgcccgcccgcacgtgcacatcgagaacacgcaaatcgaagccgattgggatcccgaggccggcaccgcttccctcgacgccgcgctgaccgtgctcaacgcggccgacgcggccacggtccgcgcgaccctgaaggacgccgacggcaacacggtgtggcagacgacgggcgacgcggaggcgcagaccgcgatctccagcgagccgctgcagggcatcgaaccctggagcgccgaaagcccgacgctgtacgaacttgacgtcgacgtcatcgaccaagcgggcgacgtcatcgaatgcacgtcccagaaggtcggtttccgccgcttccgcatcgaggacggcatcctgaccatcaacggcaagcgcatcgtgttcaagggcgccgaccgccacgagttcgacgccgaacgcggccgcgccatcaccgagcaggacatgatcgatgacgtggtcttctgcaagcgccacaacatcaactccatccgcacctcgcactacccgaaccaggaacgctggtacgaactgtgcgacgagtacggcatctacctgatcgacgaagccaacctcgaagcccacggcagctggtccctgcccggagacgtcctcaccgaggacaccatcgtgccgggcagcaagcgcgaatgggaaggcgcctgcgtcgaccgcgtcaacagcatgatgcgccgtgactacaaccacccgagcgtgctgatctggtcgctgggcaacgaatcctacgtgggcgacgtgttccgcgccatgtacaagcacgtgcacgacatcgacccgaaccgtccggtgcactacgagggcgtgacccacaaccgtgactacgatgacgtcaccgacatcgagacccgtatgtactcgcatgccgacgagatcgagaagtacctgaaggacgacccgaagaagccgtacctctcctgcgaatacatgcacgccatgggcaactccgtgggcaacatggacgaatacacggcgctcgaacgctacccgaagtatcagggcggcttcatctgggacttcatcgaccaggccatctacgccacccagcccgacggcaccaggagcctgcgctacggcggagacttcggcgaccgtccgtccgactacgagttctccggcgacggcctgctgttcgccgaccgcaagccgtcccccaaggcccaggaagtcaagcagctgtactcgaacgtccacatcgacgtgacgaaggactcggtgtccgtcaagaacgacaacctgttcaccgccaccagcgactacgtgttcgtcctgagcgttctcgccgacggcaagccggtctggcagtccacccggcgtttcgacgtgccggccggtgagacccgcacgttcgatgtcgcatggccggtggcggcgtaccgcgccgacgcccgcgaactggtgctgcaggtttcgcagcgtctcgccaaggcgaccgattgggccgagagcggctacgagcttgccttcggacaggcggtggtgcccgcggacgccaccgcgacgcccgacgcgaagccggccgatgggaccatcaccgtgggccgttggaacgctggcgtgcgaggcgccggacgcgaggtcctgctgtcgcgcacccagggcggcatggtctcctacaccttcgccggcaacgagttcgtgctgcgccgtcccgcaatcaccaccttccgtccgctgaccgacaacgatcgcggtgccggtcatggcttcgagcgcgtccagtggctgggcgccggccgctacgcccgctgcgtggacaacgtgctcgagcagatcgacgacagcacgctcaagggcacgtacacgtatgagctcgccaccgcgcagcgcaccaaggtgaccgtctcctacacggcccacaccgatggccgcgtgaacctgcacgtcgaataccctggagagcagggtgacctgcccaccatcccggcgttcggcatcgaatggacgctgcctgtgcagtacacgaacctgaggttcttcggcaccggcccggaggagacgtacctggaccgcaagcacgccaagctcggcgtgtggagcaccaacgccttcgccgatcatgcgccgtacctcatgccgcaggagacgggcaaccatgaggatgtgcgttgggccgagattaccgacgatcacggccacggcatgcgcgtcagccgcgccgatggtgccgcgccgttcgcggtaagcctgttgccgtactccagcttcatgcttgaggaggctcagcaccaggacgagctgccgaagccgaagcacatgttcctgcgcgtccttgccgcacagatgggcgttggcggcgatgattcctggatgtcgccggtgcacccccagtaccatatcccggcggacaagccgatcagcctcgatgtcgacctcgagctgatctgatcagaattgatccgatagtccaccgtgcaaacgatgtggcccccgacttcctcgcaggaagtcgggggccacatcgtttgcacggtccttgttagtccagcggatgcgcc

SEQ ID NO: 853 - DNA, 8120 bp, Unknown
  R14_18m  MAG No. k141_11463
agtcactccgcagggacgatggagacgatcttgggggccttgacgatcaccttgcgcggctctttgccgccaagacggtcggcgacggcggccagcgcctgcttctcgaggtcggccgggtcgatgtcgaccggcacttcgagcttggcgcgcaccttgcccttgatctgcaccacggcggtcacggtgtcgtggcccacgtagcgttcgtcggccaccggccacggctcggcggacagggactcggggtggcccagcttgctccacatctcctcgcagatgtgcggggcgatcggggcgagcatcaggaccaacggctccactgcggcacgcggcacggccttcagaccggtcagatggttgttgagcacgatgagcttggcgatggcggtgttcggacgcatgccctccatctccgcggtcacttcggcgatcgtgttgttgagcagtttcagtgtcttctcatcgggcgcgtcctcggtcacgtgggcctcgccggtggtctcgtccaccacgttgcgccacaggcgctgcaggaagcgcatgccgccgaccacgttgcgggtgttccacgggcgagactcgtccagcggtcccatgctcatctcatacaggcggaaggtgtcggcaccgtagttctcgtacatgtagtccggggtcacgatgttcttgagggacttgcccatcttgccgaactcgcgattggcatgttcgccgttccaggtgaacgtcggctcgccggaggcgtcggccgggccttccacgacctcgtcggccggcacgtactggccgcggtcgtcggtgtaggcgtaggcctggatcatgccctggttgaacagcttgtggaacggttcggccgaagccacgtagccgaggtcgaagagcaccttgtgccagaaacgggagtagagcaggtggagcacggcgtgttcgacgccgccgatgtacaggtccacaccgccttcgtcacccgagtacttgttgtggttcgggcccatccagtagtcgaactcgtccttctccaccatgtgcttggtgtcggtcgggtcgatgtaacgcatgtagtaccagcaggagccggcccagttcggcatggtgttggtgtcgcggtagtaggtcttcttgccgtcgcccaagtcgagctcgaccttgacccagtcctcgttgcggctcaacggtgcctcgggattggactcggcgtccatcggatcgaaggtgcgcggctcgtagtcgggcacgtcgggcaggttgattggcaatgcggaatccggcagcaggtgcggggtgccgtcttcgccgtaaacgatcgggaagggctcgccccagtagcgctggcgggagaacagccagtcgcgcagacggtagcttacggtgcccttgcccacgccggcggattcgagccaggcgttgaccttggcgatggcgtcgtccacgcgcagaccgttaaggctcagcgcgtcgcccttggcttcggtggcctcgacggaggagttgatcacgatgccgtcatgggaaacgaacggcgccttgccctcgtagttggccaagtcgtcgccggaatccggcagaggcttgacggtgtagatgaccggcagaccgaacttcacggcaaagtcgtaatcgcgctggtcgccaccaggcacggccataatggcaccggtgccgtagtccatcagcacgtagtcggcagtgaacagcgggagcttcgcgccggtgatcgggttggtggcgtacaggccggtgaacagacctgtcttctcaccgccctcgtccacgcggtccttggcggtcttggcttcggcggcgagcctgtaggccttcaccgcctcgaccgggttggcatagccgcccttccagtcttcgggtacatcggccggccattcggcgggcacgttctccagcaggtgatgttccggggaaacaacggcgaacgtggtgccgaacagcgtgtcgggacgggtggtgtagatttccatgtccttgtcaccgtcggcagtggccacggtgaagtgcacggaggcaccatgggattcaccgatccagttgcgctgcatgagcttgaccttctcaggccaatcgatgccgtcgaggtcggcgatcagacggtggccgtacttggtgatgcgcatggaccactggcgtagctcacgctggaagaccgggaagttgccacgctcggacttgccttcggcggtgacctcctcgttggccagcacggtgcccagacccgggcaccagttgaccggggacttggagatgtaggccaggcggaagtcgttcaagatatcctgctgctcggcgtcagtgaggtcggaccactgcttgccatcggactcgtggcccggaatggccttttcgccggactcgaatttggcgacgagctcggcgatggggcgcgcggagcccttggagccggacgggttggtggcgtcctcgtcgtaccaggaatcgtagatgcgcgagaagatccattgggtccaacgcacgtagccggggtcgatggtggcgaacgtgcggcggttgtcgaagctcaggcccatgcggtgcagctggcggctcatgttggcgatgttcgcctcggtggtcacgcgaggatgctggccggtctggactgcgtactgttccgcgggcaggccgaaggcgtcatagcccatggcgtgcaggacgttctcgcccttcatgcggtggtagcggctcgtcacatcggaggccagataacccagcgggtggcccacatgcagacccttgccggaggggtaggggaacatgtccatggcgaagtaggcggcgcggccttcggcgttacggcccttgccgtccttcaaatcgccgttgacgttggcggcccagaaggtgccttgctcatcccagatcttctgccacttgttttcgatgtcctgcgccagtgcggcgttgtagcggaagttgggctcttcggtttgcgtgctcttctcgttgtcactcataaatcagcaaggtagcctcgcaactggacacgtcgtcaatcgttattcagcatccgagacgatggctttggggtcaccgttcagcgaaaccatgagctttgtttggcttgtgaacgtatccttggcggccgtccagctgccatcctcaaccatgtcttccaatgcttccgcgattttctgcgccaattggctggtgccttgactcacggcgatgccataactgacctcgcccttgtccgcaatcacgtccatatactggggcccgttggccgcttgaagaccggaaagcaccgccatatcggaggctatggcatccgccgaccctacttgcacggccgtgacgcactgcgcataactgctacgctcctgaatccgagcctgcgggtggttgccgcggaagatgccgactgtctcgtcacctttcactgcgcacaccgtgccgtcgcctacgtcgcccaccgaacctgcgtcattggtgaatcggccacgctcatccgacctgaccagcaaaccgacgctggtcgtgaggtatggtccggcaaaatcaacgatcgcgctggacccatcggtgataggccaagaggcgacgaccatgtcgacctgtccattgtccagcatggagcgccggttttcggggcgaacctgcttgaagacgatctgcttgttcgcatagccgagtttggcggccacgtatttggcgatggtgatgtcgaagccctggtatgtgccgtcatgccatgctcccaccgatggttcgtcggctgcgaccccaatggcgatggtgggtccctccggcgctccggagacggtggtgacttgaatttggccgcaaccggccagaccagataatggcaatatcacgccaaaggccgcggcgaatcctgccatcagccgggagcgaaatccgcgccgcatcgggcggcgggcgcggagcatgctacggctgacgaacgatgaccagtggtgcataaccgtcaaacgccttacttgaacatgcgcgaacgtgtgaggaaccaggcgaccacaccggaaagcaccatggagatcacgatgatgagcaggaagccccaaggcttgtcggtgaacggcatgcccatcatgccgccgtcgaagttcatgccgtacatcgagaaaatcagcgtcgggatggacagggtgatggagatgatggtgaagatgcgcatcacgttgttcaggttgttggacacgatcgaggcgaaggcgtcggtcatgttcgcaagaacgccgctgtagatgttggccatctcgatggcctgcttgttttcggtgatgacgtcgtcgagcagatcctcatcgtccggatactgcttgatgcgctgcagggtggtgagtttctccatcacgatctcgttcgatttcagcgatgtggtgaagtacaccaaggtcttgctcagttccatgagcatcacaatctcgcggttttgcatggagtggcgcagcttcagttcaagcttgtcgctttcgcggtcgatgatgcgcaggtaacgcaggtacatcgtggcgttgcggtacaggatctgcaggatgaagcgcgaacgcatgaaggtgttgaagcctcggatcgtgccttccatgaatgggtggagcacgggcgtgtcctgcatgcagacggtgatgatgaggttttcggtgacgatgatcgacagcgggatggtctcgtaccagtcgcgtccgccacgctcctccacggtggggatgtcgacgatgatcatcgtgtaatcgtcttcgacgtccacacgtgaacgttcctcgtcatccaaaggggcgcgcaggtcggccaggtcgatgccggtctgtgatgcgacggtggcgagctccacatcagtgggttcgctcaaacataaccaggagccgttttccggtttctcgatctgctccacttggccattgattgagctgaagattctcagcatgtcgcctcacccgccttccgcgctttcctactgttctatcgctgtacggttccaaaccgagattagtctagacccaccgttcgaatttgcgagcggggtttcgcatagcgaccgtcaccagacgattggctgccaactcggcatgtgcggtcctcgcagatcggtcggcccgttctcccagtcggcgctgtcggcgatggcgggagccttgttgtattcctccaactcccacaggggctgttcggcggggatgccgttgacgctgtggcgcactttgagccggcaccaacaggcgttgcgcatgccgccgagtgcgttcatgccgtccgggtcgagttcgagcaggttggagatggtggcggtaatccatgagccatgggtgacgagcatcagcgtggtgggcgtgctgtctgaataggcggagtcgatgaccagtgcgcgcacggcatcggcacctcgctggcccacggcggcacggctttccacaccatgcttggtttcgcccccggtgtgctgtttccaagaggcgtagtcgtcggctgccacggctttgatttcggcgcgggtcatgccttcccactcgccgaagctgcgttcacgcagtcgttggtcacaggtgaccggcaatcccaaaatatcggcgaaggcgtgtgcggtctgttgggcacggaacaggtcggaggtcatcaccaccatgcgccggccggcggcgggggcctcctcgaactgtcgcgtatcagtgcgttcggcggcgtcaggaccgggctgggcgatggcttcgggatgctcggcaagccggttcaccttggcccagtagtaccgtgaagcgagcgcgaatccggtctggtcgacctgccattggcctacgatgtcgagcggcacatcgatctggccttgcaagcgatgttcgagattgtattgcgtacggccatggcgcagcatcatcacttcatcgatcatcggttttcgccacctcgttctcttgcggttttttcatactcatctcagcacaacccctagaatggcggcatggagatttctgagtcgacttgggcgttcatcgccaaacaccgccgtgaagatgtgcgtgatgtggccttgcacgccaaacatgatggcgacgtggatgtgccgttcgcgctggagcagattgccggctggcagcgcgcttcgctcaagctacctgactgggcgtcccatgatgggctgattttcccgccgcaagtcccaatggaacaatgttccagccagttcacggctcaatacaaagcccggttagcacagcgattgttggacggggaagcagtcgacgacgccgacgattccccgacatccctagtcgatctgaccggcggtttcggcgtcgacttttcttacatgtcccgagtgtttgaccatgccatatatgtggaacaacaatccattttatgtggtatcgctcgccataatttcccgatactcggccttggccacgccgaaatcatcaatgatgattcaacagcagtgcttgatacgcttggccgagtctccatgatcttcctcgatccggcccgccgtgacgatcatggctcgcgtacctacgcgattgccgattgcacgccggatgtgctgaccctgaaggatacgctgctggccaaggcaccgacggtcatggtcaagctctcccccatgctcgactggcataagaccattacggatttcgccggcgcggtgcacgaggtgcatatcgtctccaccggtaatgaatgcaaggaattgttgctggtgttggggcgcggccgttgcgcctcaccgctcgtggtatgcgtcaatgacgggcaggtgctgtcgtacaaggccggcgataatagcgacaatcacacccctatcagcgattctgccttagttgcatgcaatacctgtaataccgaggatctcccggctgaggaaagcgcgaacggcttcgattcctcgcattggaagtacctttacgaacccaacgcctcaatcatgaaggccgggtgctttgctgttctcgaacagcgcttcgccgtgcatcacatcagcccgaatagccacctgttcgtggcggccgaacctattgccgattttccaggcagatcattcgtcatcgaatccatcgccaccatgaacaagagagaactgaagcagctattggccggtctcacgcacgccaacatctccgtacgcaatttccccctaaccgtggcccagctacgcaaaaaactcaaactcaaggacggcggcaacacctacctcttcgccaccaccgacctcaaaggccatcacctagtactgcgcactgaaaagcgaaaaagtggctccctctgacgaggaagccaccaatacgtcagctaatcagtccttggcgatggtcttgccggcggtcggaccggaggcaaggttctggatctcggtgacttcgagaaccggaatcacggccggcttcttggtgcccttttcctcggcgatcttgacctgctcgttgtagatgtcgtcgtcaacgtgcagcaccacgttgccgcggaagcggtagccctgcttcttctcgaggttggcgaaggcgatgaccagcggagagccgttcttgaggttctcgtagtgctggccggcggtgcgctcgtggtaggcgatgtgcgtgtcgtccagcacgaacagggacatcttcgggccgaggtccagttcgccgtccttggagacggtggtgatccaaccgaggttgttcttgatgaattccttgatttccggagtaatgactgccatgtcgaatcctttcatgattgctatggacaacgtatttttactctttccagagtaccggtttcgagcgcgactagcccggatgttcgctgtgagtaacctcaccttcgcacagctttcatccggttcttacctgcttggcgatgccgcgccccggccgcgcaccagccacacacctgtcacacacccgacgcccatcgaccggtcgattttggccggtagttcccgtaatctgtgagccgagagagccacaagttttcctaactgtcctgaggtgcaccatgggtttggtcgaacgtttcagcaagctgcgcagccgctggtcccgcagctttcccccgaatctcgcccgactcatgttgctgggctgcgccgcattatggggtggcagttatctgctcgccaaattcgccatggaggcgattccgccccaatggctgatgggtctgcgcatgatagg

SEQ ID NO: 854 - DNA, 2574 bp, Unknown
  R14_18m  MAG No. k141_12022
gccgcagaccaaacatccgacgatcaacccgctgagggcgcgaaggagtaagggggatcatcatgcgagcacgattcattctgtccgaaacgtgggccaacctcacccgtaacctgtcgatgctgctgtcgctgacgctggtcaccttcatctcattcctgttcatcggcgcttcggtgcttactcaggcgcagatcaccaaagccaagggcgactggtacgacaaggtcgaggtcgtggtgtggctatgtcccgacggcaccagccagtccgcgaactgtgcttccggcaaatcgccctcagccaatgagatcacggcactgcagaaaaccattcgcgatgaactcaacgacgtggtctccaacatcgactatgtcagcaagcaggatttctacgacaacaccttcaccaagcagtacccgaacggtgaattccaaggccgtacgctgaccgcggacgatatgcaggactccctctggctcaagctcaaggaccccaccaaatatcaggtggtctccgaagtgctctccggcaaggagggtgtggaagacgttaccgatcagcgccagatcttcgacccggtgttcgccgtgctcaaccgagccacggcggttacggctgtgctcgccggcgtgatggtggtggtcgccatcctgctgaccggaaccaccattcgtatgtccgccgcatccagacgaaccgaaaccgaaatcatgaggtacgtgggtgcctcgaactggacgattcgtctgccgttcattctggagggcaccatcgcctcgctgatcggctcggtgctctcgtgcctgatgctttcggctatcgtcaacgtgttcgtcaccggctggctggcgaaatccgttacatggattccttatgtgaatcagctcacggtactggtgatatcgccgttcctggttgtgggcgcgatactgctgtccatcatcgcttcaaccatctcgttgcggcgttatttgagggcgtaacgcgaccggcttacccgcgagaaatgtgatgacatcgtgtgcaagcctctcaggttcgcatgttatggtattggcttaagtgagcgaaaggactattcacatatgacgaacgtacgtgtgatcaagcccgcactggcggcactggtggccgccgcagcctgtgtgggaggtctggcgttcagctcggcacagcctgcccaggcagacacctattccgacctgatcaatgcgcagaaccagcacgccgcgtcggtacagcgcgaggccgaactcaagcagcagctggccggtgccagccaggacctggcgaataaggtacttgagctggacgatctgaccaacaacaagattgtcgccgcgcaggccaaggtcacgcaggccaacgaggatgccgccaccgctcaggacgaggccgacgccgcatccaaacgtctttccgccgcgcagaaagacaaggagacgctcgaggagcggatcaagcagaccggcaaggactacgatgacgcgcacgccgccgtggcccagctggcccgtgacgagatgcacggctcgaatgcttccgacgtgatgagcgtggtgacgggtgccaccagcacacaggacttcgtcaactccatgcagtcccgggacgcgttgtcccgcaacgaggcgaatgcggcttcctccgccgcgacctcactgagcacgtcgaagaatcgtggcgagcgcttggcggccatcgaaaagcagatcgctgtgctcaagacccaggccgatgagaaggccgcttccgcacagaccgccgccgaaaccgcgcaaagcgaacgtgacgctttggataagctgcgccaggaaggcgaagcaaggcgtgacgaactgtcttccatgatcgacagtctggattcccaatccgccaagcaggcggcccagaccgtactgatcgcttcccaggtcgattcctacaatcgtcagttccagaaggagcagcaggacgccgccaacagggtggataccggtaaccagggcggcacgccgtccactccggtgacccccgctccggcgcccgctccggcgcccgctccggctccggcgccggctcccgcccccgctcccgcccccagcgtcggcggccaaggcacgtcgaacggtgattacggcaacgcctatgccgccggccagtgcacgtactgggcgtatgaacgccgtaggcagatgggcattggcacgccgtcctatctcggcaatggcggcgactggtggcgcaacgccccctcgtacggcttgcgcgtggaccacaaccctcaggtcggtgcggcgctctccttcctgcctggtcaggatggtgccgacggtacctatggccatgttgccgtagtcgaagccgtgtatggcgacggcacattccagatctccgaaatgaactggggtggtccgtggaacatgcacaaccgcaccttgaccaatttgggtcagtactggttcgtccactgaccggttggttcggccgatatatgcggttgaagggttcctcttgaagaggaacccttttcgtattcgaggccggtccgtgatatcgtcggatgttgcgttgctacccacgagttgctac

SEQ ID NO: 855 - DNA, 19938 bp, Unknown
  R14_18m  MAG No. k141_12324
ctggcggttgaccccgggctgggctagagttgagaacaagtctcaacaaggtagaaagaacctcatgatcgaattgaagacccctcgtgaaatcgaggaaatgaagccggccggccgtttcgtcggcggcattctgaaggaactgcaggagaccaccaaggtgggcaccaatctgctcgaaatcgacgagttcgtccacaagaagatcgtggaccgcaagggcgccgaatcctgctatgttgactacgctcctgacttcggcaccggcccgttcgcccactacatctgcacctccgtcaacgacgccgtgctgcacggtgtgccgtacgattacagcctgaaggacggcgacctcgtctccctcgatctcgccatctccgtggatggctgggtggccgattccgccgtcagcttcgtggtcggcaaagacccggaccccgaagacctgcgcatcatcaagtgcactgaggaagcgctcgccgccgccatcgacgtggccaagcccggcaaccgtctcggcgacatctccaacaccattggcgacatcgcgcgcgaatacggctacccgatcaacctcgagttcggcggtcacggcgtgggccacatcatgcacggcgacccgcacgtaccgaacgacggccgcgcccaccacggctacaagctgcgcgaaggcctggtcatcgccatcgaaccatggttcctcaagaccaccgacgagatcttccaggatccgaaggacggctggaccctgcgtgcctccgacggctcgcgcggtgcccactccgagcacaccatcgccatcaccgagaacggcccgatcatcttcaccgatcgcaccaacctctgattggcgtttggcgtatggcgggtgcctgattggcctgtgatgggcgatcggcatctcatcaaccgtctatatgtttgcggttttcccgcgaattcgagacgtaacaagccgaagtgcgtttgctttgatagcatgagcgcacttcggctttcgtgtatcgaccggtgtctgccggcggtaacacagaagacataaagtaccgaacactagcgttcgcgaacgcgtgaacgttaatgtttggggtaagtggttcatgaagaggaaggtgcgcgaatggcaacggcacaacttgatgtcgattcgaacaagttcaacctgcccgtggtgaaggctagtgcagggccggatggcatcgtcgtttccaagctgcgcaatgacggctgggtaacgctcgaccccggattcctcaccaccgcacagtgcgaatcgaaaatcacctacatcgacggcaagcattcgatcctgcgctaccgtggctaccccatcgagcagttgtgcgagaactccgattttctggaagtggcgtggctgctgcgccacggcgagctgccgagcagggctgagtatgagcagttctgcgcggacatcaaccacaagacgatggttggcgaagacttccgtaccttcatgggttcgttcccgcgctccgctcatccgatgagcgtgcttgcctccgccatcaatgcgctggccacgttctatccggacaccaccgatatctccgacaccgaccagctcgatgaggccgccaagatcatcatggccaaggcccgcacgattgtgtcgtacatcttccgccgtcgtcgcgatgagccgatgctgtaccccgattacgcgcgcggctatgtagacgacttcctgcgcatgtgcttcgctgtgccgtacgagccgttcgaatctgacccgttgtatgtgcatgctttgggtcgtttgctgattattcatgccgatcacgagcagaactgctcgacctcggtggtgcgtatcgccggttccgcccacgctaacctgtattcggcggtggccgctggcgtcaatgccttgtccggaccgttgcacggtggcgcgaatgaggccgtactacgccaattgaaggcgattcgtgattccggtaagtctgtggccgagttcgtgcgtgatgccaaggaggatggccagaagatttccggccttggccaccgtgtatacaagtcgtatgatccgcgtgcggcgattgccaagaagtatcttgagaagatcatggagcgcgaggatacgcagaaactgccgtccgacgagcgtgcgttgttcgatgtggccaccgagcttgaggatattgcgttgaacgacgagtatttcgtatcgcgcaacctgtatccgaacgtcgatttctacacgggcttgatttatcgggcgatcggcttcgatccggccatgttcaccacgctgttcgcactgggccgcattcccggttggattgcgcagtaccgtgagatgctggccgacccgaacaccaagatcggccgcccacgccaggtctacaccggtccggtcgagcgcgatttcatgccgatggacgagcggtgattattggtttgagaaagcgcttcgctggagattccagtgaagcgctttctatatgtacagcgcaaaccagctatgctgcgacggctgcataagaacgagcagggctagttctgaaattgaaataatgtgtgcggtatcgaagcgtaccgagggaaggcgtacggaagtacgtcgaccgaggagcaacgaagataacgctccattatttcaatttcagttcttgtgcagcttggcgttgagctcaattcccaccttgcggtagcgggcttcgatacgtccattcaccgagttgcggatgaacaggatgttgtctttgccggagagctcagcacccttgacgacttcgagcggctcgccggctgcggccttggccttgtcccagatgctgatcttggtgccggcggtgatgtacagaccggcttcgacggtgcagttatcgccgagggagatgccgataccggcgttggcgccgagcagcgagtgctcgccgatggagttgcgcagcttgccgccgccggagagggtgcccatgatggaggcaccgccgccgatatcggaaccgtcgcccacgaccacaccttgcgaaacgcggccttcgaccatggagacgccgagcgtgccggcattgaagttcacgaatccggcgtgcatcacggtggtgccggaagataggtaagcaccgaggcgcacacggtcggcgtcgccgatacgcacgccggtgggcactacgtaatcgatcatgcgcgggaatttatccacaccgaacacgttgacggtggtggcaggagctgcggcaggcagtccggcctgagcagcgaaagcgagagcggcttcggtggaggcgcgttcgacatcggccttgcgtagtgtgaagtcctcaacggcgaaaggaccgtagttggtccacaccacattggcgagttgggcgaagatgccgtcaaggttcagcgtgttcggcttggccatgcgcatgctcatcagatggagtttcaggtaagcgtccgcggcgttgctgatcggctcgtccaactggctgacgacgaataccggcacgcggcggatgccacgggcgtcggcttcatcgtgagccagagtgccgaaattgtggtttggacgatcggcctcggccggtgcctcaccgagattcagttcggggtaccagacgtctagggtggtgccggcggcgtctacgctggccagaccccatccccatgcggtacgctcttcgctcatagttgctccttacatatcgttgcgtttgcgttgcatgtgcatcgcggcatgtgatggttccaccttagcgtcaagtacggctaggcgggggccatagttcgtggaatggcttgaaatcgagttgttcggtaaaaaattaccgaacgtgattggcgatgggatgataggttctccggtgaaattcgctggtgaacaactcggcaaggaggtgtgcgatgtgatgctgcatcattcgggagcataggctgtggccatgcgacgcccggcatcatagagtttgcgcttgagcgaatcgggctcaagaatcactacgcggccatcccaggaatactgcaatgcccaccagaacacggcgcgttcgggagcatcgacgatgacttcgaactgtgtgccgtccggcgaatgtttgatctgagggtcgtcgaaccattcgaacacattgttgagcatggattcgtctcgtacggccatgcggatgcgaatcggggcatcggctacgggatacgggcggtgacgcatgaagttcactgcgtcaaaatcagccggcgctggtttttccagtggaactgtgccgttcctgcctttggcgctgacgttggcgattcggttgaccacgaaaatgcggagattatcctcgccatgtagatggcagatgaggtaataccgtccgttcttgtacaccatctggtaagggtcggcggtgtaggtaattcgacctgcgcccgtacggcttttatgcggtatcagggtgccgtccgggccgtaatcacggtattggaaggttacgccgtggccttcttcaatggcctgattcagttggtcgatggtggataggaactcgccgttgatatgcgtgtaggtggccacgtgctcaaggtaacctactgcttgcccagcggcacctgcgagttcgcggattttaccgatgagatcgtccatggtgtcgaggctgatgcgagacaaggtgaggctgtcgagtagcagtcgcatttcggcggtggataggaatgcgtcaagataccagccgggttgtggattcttgcattcgatgccggcaaggtcgctttcggtgagatgcccgatatgtctgccgagaaattccgtggcggtaagctttttgagctgatttcgtatggttttctcggtcggcagctcgcttggatcttccagctggtgtttacgggcaagttcatcgagtatttgccgcacggtcaggccatgtccaaagtagctgtgacgccacagcacctcgaagatttcgagggtggtgttccctgcataggatttgcgttgcgccggcttgtctgcatccatacattaaggctaccgcgcgcctcgtctaggatagaagtgttggactgaaatgcattcgctggaaaggaggctcgcccatgagcaaagggtatggtgtatttggccatgttcccgataatgcggatgacgatgacctcctgccttatgaggatgatgattccggcgtttcctggggccatgcgttgcgccgtcgcaatccttggaaaaggggaggcgacgaaggtgccgattacgacgatgatcggtatggcgcagatgacacagatgacactaatgaggacaggggtctctttgccggcaagagcagcggtataggcggtatctctggcgaggcagatggaatgcttggtggcgcaggcgctgccggcagtagagccgtaacgtttggtggaacggacagtttgtccgccgccgatgcggttatgccctatcgtttcaggcaaggacgttccgtatggttcgaagatgaggacgaaggccatttcgccggggctgcgaagcgtgccgaagcccatgccgtccctatccttgcgttacgcaacgatgtggaatcgtcatcgtcgaatgccgtgctcgctcgtgcccgtagcattgcgcgcaaagcggccaccatggttatcaatccggtatacagcgaaaatcatcgaaccgggtatgccgagcttgacggtattctacgtggcaccaccagcccatcgagtaggtatcgtaccagcgtgcaattcgacctcgatacgggagaagccgtcggtggcaagtgctcatgcccggcttacggccgtggctatggcatgtgcaagcacatgattgcgctcgccttcatattctgcgatgatccgcagcgttttgaagggtaccgtgccggggctgtgaggccgtctcggacgctgatcgactatatggagcacgtcgataggcaagatgctcaagccaaagcgcgtcgccgcaatgcgctcatgcgccgattcgatactgcaaaaagacgaaatggcgcaggtggacgacgtacgaatagcggatacggctctcgtgccggcacccgaggcggcgggtatcagggcgatagtgagactgtgggcttggggcaggtgcagcttgttccgatattgagtttcatcgatggcgtgtggagcgtggagttcaagatcggatcgacttccaatgggtccagctatgtactgaaatcgattccgcaatttgtgcttaccatggcgaacggcgactatacggattatgggcagaagcttgcctttacccatacgccggatatgttcgacgatgattcgcgcccactgctgggcttccttgacgacgcgatggccgtgcgtcgtgcggccgagcagcaggaccggtattacgggcatatcgccatcgatcgtcacctgacactttcagcaccggaagtggcccggttgctgtccgtacgtgagggcagaggcgtacagctcgtgttgaacacatggttctccgggcagcctgcatcggtgccggttgatggtggcgagccagattttcttatgcgcattgcgcggcgtgatttcaatacgtatggtccggatgccggatacctgcttgccggagtgccggcggtggaaaccgtgattgatggtggcaaggatgtatggctgttgctcgcctccactaatccggccggtgcggtatccgccatgatggcgggctctcagcgtaaaagcgcagcgggatgccgattcgtccgttgcccgaaacgattgattccgttgcgaggactattgggagacctgtttgaacccgatggcgaggggcaggtcattgccggtgatgacatcgccctgttcgcacgcacgctattgcctcagctggttggtgccggactgttggaggccagtgagattcctcgcgagctggctgaattaagtcctacggaatgcagcctccagttttatctggatcgtgatgagcatggtgtgcaatgcgaggtcaaggcacactacggcgatgccattgtcccgttgctacccgatggcccgacggtgcatgctagggatgagcgttccgtccccttgtctcggggcgtgattgggcgtgatttcgacgctgagcatcttgcgattgatgtagtgcgtgaattctttaccatgcctgaccagcgcaagcgcgttgcggccgccactcatcagacggtgaatgggttccgaacgccggccgcgcgaaagaccgccaaacaattcgtgtctgatgcggccactatcgatcgcgatgacaccacgcagattgttcgtctttttgacgagggattgcccgcactgaaggaagtaggggaggtcttcaccacaccggcttttgaccggctgatcgcgcccaagccgccaagcgtcaaagtcggattgtccatcaaaggcaatttggtggagatatcacccctcgctgatgaagtaccgccggacgaagtgggtgccttgctgtcttcgtatcgtcggcgtcaacgattccatcatttgaaggacggcacgctggtcaaactcagcggcgcgaatctcagcacgttggaccgattggccagcgaccttgatctgagcgagcagcagctcaactccgggctgatcgagttgccgggcggtcgagcattcctactggatggtgagttgccggatgacggctccgatgtagtcaaggacgcttcgttcaccgaatacatcgacgatctcaagatcatcgaccctaagtcgtatgaagtgccggatagtctcaagcatattctgcgcccttatcaggtcgaaggcttccaatggctgaacacgttgtgcgacaagggttttggcggcattttggccgacgagatgggtttgggcaaatccgtgcagcttatcgccctgttgctgtcgcgataccacaacgaatctagtggcatgccgaccgctcaaggcatggatgccggtaatgctgttaatagtgaatcagccgtaaccggtcatattactttcgattccgaagatggcgggccgcatccatcattgatcgtgtgcccggcgtccttggtgtacaactggggtgccgaattcgccaagttcgccccgagcttcaacgccgtggtggtggccggtaccaaagccgagcgccgcaccgccatcggccgcgcgttccgggcggatgaccccaccgtgctcatcacctcatacgacctgctgcgccgggatgtcgatgattacaccgccaatgagcaacgtttcaatgtcatggcgctggatgaagcccagtacatcaagaatcacaccacgaagatagccaaagcggtcaaggccgtggccgccgaccatcgtttcgccttgaccggcacgccgatcgagaaccgactctccgaactgtggagcatcttcgacttcctgatgccgggactattgggctcatacaagcgattccatgagcgctacgagttgcccatctccaacgcccgggctgcagatggcagcacggccgaaggtcgggccgccgcacaggtcaatcctgaggccgcccgggtgtctcgccaattgcagtcgttggtgggcgtgttcatcaagcgcaggttgaagtcccaagtgctgaccgatttgccggacaagttggagaccacgctgaccgtgcagcttgccggcgaacagcgcaaactgtatgcggcccacgagcagcggctcagaatgcagctcgaacacagcgaagaagccgatttcaacacgtcgaagattcgcatcctcgccgagctgaccaagttgcgccagatctgctgtgatccaaggctgctgtatgccgatgccaaggatcagtcggccaagcttgccgccatcaccgaactggtggaaacctgcgtgaatgaaggcaagaaggcgctgatcttctcccagttcaccagcttccttgatctgatcgccgaacgtttcgacgcgcaaggactacgctactacaccatcaccggatccacgcctaaaaagaagcgtctcgaactcgtcgaccagttcaatgcggacgatacgcccgccttcctgatttcattgaaggccggcaacaccggactgaacctgaccggtgccagcgtggtcatccacgccgatccatggtggaacgctgccgcgcaggatcaggccaccgaccgagcacatcgtatcggccagaccgaagacgtcaacgtgtatcaggtggtggccaaggacaccatcgaagaacgcatcttggagcttcagcataccaagagcgagctcgcccgccagttcaccgatgcttccttgcttgccgacgaagctggcaccggtgccagcgccctcaccgaagcccccgcctccatcgccaccctcaccaaggacgatctcctcaatctgctgggatgagaaggtcctgctcggtgctcttgagcttggtgatggaaacagtctgggctttgtggacccgttcgctaagccgagaccggagtcgatagcggtgtggcatggtgcgtgcgtggggagcgtgattcagttgttggctgaggcgattcggatgctgtcgttttgtgctttgttttgccgttgaccaattgaaatgctcgttggtaggagacccccaataaagctccgatttgtcgatacgtgagtccctcgttgcgtagggcccgtgcggcgagtcgggattcggcagccgcttgtgcgttggctttttttgctatttcgcactgccggaacatttctgttacgtgttgtttggcttgtttcggcaacacaaacgtcaccttgagctccggattgtcgtcgtcgttcatgacagtgatgagatctttagccattggctcgatatcgtcaagtcctttggcctgggtcgaccgttcgatagctggtacctgaacgtaccaatatcggccatcgagttgcacaagcacgtcatagttgctcattgccaccacccctttccgagtttctgctcgctctcgttgatgatatccagcgtggttcgttctgagacttcattatggcgggggatgggtatcctcaacccgtccaggcagtaaacctcatgtctgctgccttgccgtaacaaatagaaatcgagccctcgctgctttgccgcttgccgaagtttcttgatgatgagttttcttcgtgtcatcataactctcaatctcgcactagacaaaatgcgtataccgaattgccgggtgggagttgtgggtaaacgtagagatgttcattggtccttctttctgttgtctgacgcgtcgttgcgtgcgggtgcatctgacggtatgggatgaggtttctgattggcaagctgaacgggggtatgtggttctagcttccgagttatccacattgataaagtgcttttttaaagtgactttcccgtgttggtcgtggatgctgcgagcaaggcaagaacggtcgatcgcgtcgcggtgtgtgtgggtgaatggtgaaagtgattttcgatatctttatattgatattcgatatattatgatggtgacatacggggcagtgcaggttcatccattgatattggattaaggagcatagccatgaacgctggtatcgcattcatctctcgcaaatctcgcaaagcagacgtcgcttggcgctatgccattgcacttggtcggtggcgggggagtcggcgttatgttcgacgtcagtgccgtcattggcagatggcgcaaccgccacgaacacaggggtctgatcgttggccagaatcgccttcaattcctcgtccgtgtatttcttgacaccgcctttgaacagatccggtcggccggcatgatgcacttcgagcacctgccgcagcagttcgtcgatttggggaatatcggccgccgtggccctacgaatcatcatgtcatccatttgattcagtctaatcgtgcagtctcgaccggcagatgatcattgcccgcgataagagacacggacgggcaagatgggtgattgttcgttcaggctttcatcctcgccgcaacgtcacggtagtctggagtgcgtgaatcgcaagaaacagccagtggagaagtatgagcggggcacccgttcgtacacgatgtcgcatattcgtggcaaagacaccaaaatcgaggtgctggtacgcagctatctgtttcgcaagggtttgcgattccgcaagaacgacaagcgttaccccggccacccggatgtagtactgccgaaataccacaccatcgtgttcatcaacggctgtttctggcacatgcatgaaggctgttccaaacattcgatgccgaaatcgaatgtggaattctggcagacgaagctactgcgcaatcacaatcgagacatcgcgcagcgggctgaactggaggccgccggctggcgtgtaattaccgtatgggagtgcgaattaacgaaagccgtgcgtgacgaacgcctcgcacggctgtatgagcagattgttgaaggagatgcagattcagcggaataatttcagctcccctctggaggggagctgaaatcagacctcaaacgggaacttcaggccccaacggtcgcgaatcgcatccatcagctccatgatgcggatggtgtcggcgtgcggcatcgcctcgcattcgatcttgccatccagcagcgcgttggctgcatcggccacctcatactcataaccggtcaactgcgacggcaccgcaacactgcgcacgggcttgtgatcgttgttgtagatatcgatggacttgggattgttgatattggtgaccaccaaatacccttcggtgccccacacgtagccgccgcgatcggaggaaaccagcatcgaactggtggacacggccatcgtgccatcatcgtaatacaacgtggtggaattctgtgcatccacaccggtttcggcggccatcatcgacgtatcgaaatgatccagcgtgcggccatggtcggcaccgatcgccatatccaggaagttcagcggatacacgcccacatcgagcagcgcgccaccggcacaggccggatcggtcatacgtgccttgccggacaccggatagcacaggttggcgctcgccgctttcacctcgccgatctcgccggactcgataacttcgttgatgagcttgcggctgggcatgtagcgcgtccagatggtctccgtgcacagcatgccggtttcctcggccacggccagcgcctcacgtgcctgcccggcgttcgcggtgaacgacttctccaccagcacgttcttgccggctttcatacacaggatcgcctgttcggcgtgcagactgtgcggggtggcgatatacaccagatccacatccgggtccgccgtcaactcctcatacgatccataagccttgtcaaaatgccattggtcggcaaaagcctgcgcgcgcgtaatatcacgggccgctaccgcatacgggtgaatccatgaggaatacagtgaaccttcagccatctgggtcagggtgtcggccatggtgtgagctatgcggcccgcacccagaatcgcgacgttgatcttttcgccgctggcctcgaactcggcgcgtttgccattgaatcgactcattattcctccttgaatacgggttggtacactcaatcgacctacagtgattatagaagaagaaaccttgtcccgtgaggcggatagaaccgaaatatggaaaacgaagcagcgcagcagccccaatctccggccgcgtctccagtcatgtcccgccgagcgcgtgaggtcaatcccttccgtgccatggtattcggcgaacaagcagacaagatgatcgcccaaggtatcagcgtcatcaaattaagccttggcgagcccgatttcggcgcgccgcccgccgtacgcgacgccatgcgcgaacagtacgacggccgggccctgccgtacaccgccgccatgggcctacctgaactgcgccaagccatcgccgacttctaccgcgagcgtcatgaccttgacatcgaccccaagcgtatctgcgtgaccgccggcggttcggccgccctgctgttggccaccgcgctgaccgtggaccccggtgacgatgtgattgtggccgacccctcctacccgtgcaaccgcgaacttgtgcgctcctttgaggggcgggtcatcgacgttccgacctcggccgccacccgcttccacctgaccgccgacctgtgcagccagtactggacaagcaagaccaaggccgtaatgatcacgtcgccgtccaaccccaccggcaccaccatcgacttcaacgtattggacgaggtgtgcaagctggccgccagccgcggcgcatggcgcatcgtggacgaaacctaccttgatttggccgaccgtgagccggacggcaccgaagtcaagtccgtactggcctgcgatcccggtgccatcgtgtgcaacagcttctccaagttcttcggcatgaccggctggcgtctcggctgggctattctgcccgacgaccccaccgtgctggaagcggtcgacgacctggccaccaactactacctgtgcgcccacacgcccacccagcatgcggcgctcgcctgttttacgccggagagtttggccgaatgtgaagctcgtcgtcaggaattgcttgcccgtcgtcgcattgtgattgacgggctcaagcgcatcggtttgccggttgaggtggagccgaatggcgcgttctacgcctacttcaacatttcccgtactggtctggatgcctggacgttctgcgaacgcgcgctggatgaagcccatgtggctctgactcctggccgcgacttcggtgcggccacagcggatacgcatgtgcgcctgagctatgccgcctcacgtgaggccctgaccgaggggctggaacgtctcggaacgttcgtcgaatcgttgtgaacggcgcggcatccggtgtgattgttgtacggtagtcgagtttgtgtgatgttcggctggcctcgcggtgttggttgccggccgaacgactcgccatggtggcgcacggctggctgattgcgatggtcggcccgttgttcggccatcacgggttgggtaaggtcaggaatagggatcatggtcaatctgcgttcgcgcaccacgcgacttggtgtgcttgatatcggttcgaacactatccacatgcttatcgtcgacgccgctcccggcgctcgccctgaccccgaggccagcaccaaatccacagtgcgcctgatgaagtatttaaaggatgacggctcaatcaagaagtccggcatcgaggcgattctggaagccgtgtcccagtgtatgcggctggccgaggaatacgaaatcacccaaccgccacggtagccaacaacgccgcatgatcggagccctcgactttgaccaccttgcattgcccggccttcatgccctgatcaagcaccacgtggtcaataccggcgaacatcggcatatacacgcggttcgtaggccacgaaaacgtaaacccatgtccggattcacgtgcggcatccacgaaccggtcgccaagaaaatcacggaatggcgtgtgatcgtaagtggcattgaaatcgcccatgaaaatataccgtgtatccgtatgcccgcgcatcggacccaactcatccagcgatcgcttccactgccgccaatagccgggtacgggagcggtggtgtgcacggatacgaatcgaatctgctgaccacccatatccaccgtgccgccgggcatgaatgaggcgctggaattcacgtcatcgtcggccggatcggcaagtggcgtggccgaccagaggccgttaccgaatacgccgtcagacgatgagacctgcgcatacggcagatagtgctcaatgccagcctcgttgagttttttgacgaaatcctcggtggtctcctgcaaagcgagcacttcgacgcgctgatcgcggactagttcgacgatggcttgtgggtcggcctgccccttgtatacattgaaggtcatgacgcgcgcgtaggcatcgctggtgttgggggaggccgcagccacggcgttctgcgcggcttgggggagcgggtcggtcgagtagaagaacggatattgccaatagccattgcatgcgattgcggcgatggcgattagtgcggcaaggatacgccgcgacacgatggccaacagtagggcaatcaggccaagcaacgtgaaccagggcgttgccgataccacaatcggcacaaatggcagttcctgtaaatcggcaggcagcgcgcgggcggcagtgccggcaagggcaagaagcgcgaacatcgtggcgagaaaaccaagcagacgatgccgtttgtgtggcttcacggcagacttggatactgggcgtgccgtggctttggcagagcgtggcttggcagcggcgcgagctcgtacgcttgcacctgtggtagtacttcgtgcctttgccatgctgccctttcctccggcttgtttactgttaccttgcttttcgtgcgatttgccactgtaccgtgtgcggcttgtctttcggtgtcttttcgccatgcgcaagagcagttcgcaccaaaccggcacgaaaaccggccatgccttggtgccgggttctgccaggtggcttgcatagactgccatgcggcttacgcaggctgccacgcgaacatgatgcgactgggcgtgtggccgtgtacaataaaacgtcgttgcccgagtagctcagtggatagagcaccgctctcctaaagcgggtgtcgtcggttcgaatccgatctcgggcacttggcttcggaaacatgacggtatctcagcctctattcatcggtgatgagccataggcattaggcatgtgtaaacgtataggttccaccatccatcatcccgtcatgtgaaactatgcaaagacatgtggggcttcacggttatcgtgagggtccatggctatcgaatacacggaagagaagcggtttactgtcgaacaggttgaggcgctgttcaagtcggttggttgggaatcggcgcagtggcccgaacggttgttcaaggcattgcagcattcggatacggtaatcagcgcatgggatggcggctatttggtcggcttggttcgcgtgctcgacgatacgggagggggcgaaagtggcggagtgtgctgatcgggggcaacgtacgtagtcattgacggttatcccgtagtaatgttcacgatacgaccccttgtccatacagtgaaaataacggctggcgtccgacgttgctgcgctatgactagagaccatgagtgaagacaaacagtatgacttctatgtggccggtccgttctttgatcctgaacaaacgtcaagtatggaacgtttggaaaagatattggaagaccatggcaaggtactgttcaagccgcggtttgtcagccagatcgaagaagtaggccctgaaggatgctttgcggacgatatccatggcattaatgctgctaaagccgtggtcgccaatcttatggacgaggacccgggcacgatgttcgaaatcggatatgcgcatgcgctgggaatcccggtgtacggctatttcgaaaaccttacgccaatggatcgtgtcaatctgatgattgcgcaagcggtcgaactggtgttcgtcggtcctgatgatgtggcgaaatacttggaaaccggcgaacatacggaagtcgattacattcagttctaagcagctctaacaggttctcagcaaacaggggtggcggcgttctcgtacatagtcatgtacgggaacgccgcagtggtatagggatattccaacaagcggcataatggagtcgtgggaaaaccagtcggatacaagtgaagtgtctgaatttcgtaaggagtgccgttatgagtaaccacaatcccatgaatattgccaccgactttgccaaggccacgggaggaaccgctcgcaaagttgttgctttgaccgataaaggtccgttgaatggctttaagaaattcctgtcgcgcggatcgatgattgatatggcggtaggtgtggtgatgggctctgccgttaccgctgtggtcaattccatcgtcgacaatctcatcagtccattaatcggcatgattggcggcgtaccggatctttccggactgctgaccatcacgttcaacaactcgactgtttcatttggtgcgattcttaacgcgctgattagcttcctgcttgttggcgtggcggtgtatttctgtgtgattttgccgattaataagcttcgtgatctcactgctgcccaggatgaggctgacgctgaagaacaggggcctagcgttgaagagcagactctcgccacgctgcaggagattcgcgacgagctgaaaaaggccaatgactccgccgagtaatctgctgaatgtacggtgcgacagatttacctggtttgcccgaaataacggattgccggggccatttggtctggacaatccgttgtttcgcgcgtgttttgtagcatccgtggagttacatggggagtatgactgaaaacatcgctgataaggccataaacgatactcgtatcgtcaagcagttcaccaatcccgtcaaggagccgattgacagcgacatcaacctgttcgatttgctcgatgagcgagccaagcgcgatcccgatggcgccatgatcgaatataaaactgaggatggcacctggcagccgtacagcgcccaggtcttccgcgacatggtcatcgatctggccaaaggcctgattggtctgggcgtcaacaagggcgactccgtggccatcgtgtctcgcacgcgttgggagtggaccgctctggatatggcgatcatgtccatcggcgcactcaccgtgccggtatatgagaccaactccgccagccaggtcagctggattttcaacgattccaaggtcacgctcgccatcgccgaggatgacggtcagcgcgacaagattgaatccgtgcgcagcgaggtgcccaccctgcgcaacgtgttcgtcatcgaagcaggcggcctgaacgccatcaagacctatggcgaaagcgtcaccgatgccgaattctgggaatacaagagcgcctcccacggcgacgaccgcgccaccatcgtttacacgtccggctccaccggcaccccgaaaggcgtggagctcacccaccgcaacttcgcgttcctggtgcgctccggcctgcagtacatgcctcgtgccggcgcatggcccaaccgccgtctgctgctgttcctgcccctgagccatgtgttcgcccgattcctggaattcttcagttttggcggcaccatttctctggccctgagctccaatatgaagaccatggtcaaggacttcgagaccttcggccccacgctgctgcttgccgtgccgcgtgtgtacgaaaaggtctacaacgccgcctcccagcgtgccggcagcggttttgcgggcaagatgttcatgcgtgccgccgaaaacgcgcgcgaatggtccaaggccgagcagaagggcgagaagctgccgcttcccggtcgtattgctcacgctttctacgagcaggtggtgtacaagaagattcgtaccatctttggcccgaacgccgactttgccgtcaccggtggagccccgatggattccgagctctcccacttcttcaacggcatcggcatgccggtgctggaaggctacggcatgacggaaacctgtggtccggtgtgcgtgagcttgccggaagacaatcgcatcggcaccatcggcatgccgatgtgcggcatcaccgccggcatcgccgaggatggcgagctggtgatcaagggaccgctggtgtgcaaggggtaccacaacaaccctgaggtcaccacccagcagatcaccgatggctggctgcacaccggtgatttgggcgatatctccgaagacggattcatttccatcactggccgtaagaaggacctcatcatcaccgccggcggcaagaacgtgtcgccgggtctgcttgaggcttccgtgatgacctcgcccgtggtcaaccagtgcttggttattggcgataagaagccgttcgtggccgctctggtcacgctggatctggcggatgccaacaactggttggaatcccaaggcgccaaaccggaacccgatctggcctcgctggccaagaacgccatcgttcatgccgaggtagagcgtgcggtgaacgccgccaacgagggcgtttcccgcgccgagtcgattcgtaagttcgagattctgccagacgaattcaccgaggccaacggcatgctgaccccgagcctgaagacccgtcgcgcgcaaatcgttgagcactatcgcgagctcattgacgacgtgatctacgtgccgttgaagaagtagctatcaactccctctgatccaaaaaataagctctctctgacgagggagctgtcagccgcaggctgactgggagagaccgcggctagcccgcgaaacaacaaggccgggtgcgacttgcacccggcctcagcttattcagtccaaaatcgccgaaacataatcggcggcggcctgatccagctccgcatcgccgatggtggcggtgccctgcaccaggaacggctcagcatagttcatgccgatcttgtacgccacgacctcaaacgggctcagcagctcctccatggtgcggctgtactcgccatccttgcggtacttggcggcgtcggaaccagtggtgaccaccagcttgagctccttgcccttgagtgcgtggcctccaccgtaggcccagcctgcggtgatgacctcgtcttcccattccttgagcagcgcgggggaggagtaccagtagaacgggaactggaggattacgcggtcggcggcctccagtagctcgtgctccttgtcggcgttgacggagaagttcggatattcggcgtattcgtcgcgtacgatgatgtcgtcctcgccttgtgcggcgagttcggcaagcagacgggcgttcactcgcgagccgtccttcaggtgcggatggaatacaagaatcagcgttgacatgggatttcccttctataactgctaccaatgtggcctaatcaccactatcgtatgccgggaagc

SEQ ID NO: 856 - DNA, 8773 bp, Unknown
  R14_18m  MAG No. k141_12333
actggccgcaaacggaccgatcacacgtgcaatactcttcaagaatacggcacggcgtttcgattgcattgggaatggggaaaatcatcaatgggcaaggaatgatctacgtcaatcaatccccatgccgagagagtcctctactctgcgggattgttgtgggacggcacgcgattttgcccgattttttcgcggcggcccacaccactccacatatgactgatgacgccgcacgaagaaatggcgtcattgcaacgattcctcaatacattctgtgggacggcacgaatgtacatcgtttgacgttcatgccatcccacaccggcgtgggacggcacgcgataatcgcccaaaaatcgccgccgtcccacacatatcattgccgataagccattcgacgatcgtacagtcacaaaacagaacagaaccgcacgatcatcgcaacgccattcagcaggcgagcgcggcgaccggacgcggggcgacaatcacgtcatcgcccaccgccagaccggccggcagctcgctggcgggcagctgcacggtggccttgagctgttcacctttgttccagcgctggtattcgccggaggtgatgaccgtgtccacacgaaccaaagagccaaggaagtgaatgacctccacgcgggcgcgttcgccgacgtgcgaatcgctgctgccagccaaggccagcatcaggttctccgggcgcacgagcacggccacggaatcgcccttggcggagccggcgagcagcggcacgcgctggccgaagaccacggcctcgtcgccattggatgcgccgagcaggcggttggtgagtccaatgaacgtggccacgtactcggtggcagggcgctggtacaggtcctgcggggcggcgatctgctcgatcttgcccttgttcatcacgccgatgcggtcggccacggccagcgcctcttcctgatcgtgggtcacgaagacggttgtggtgccggtggtgagttggatgcggcgaatctggtcacgcagctggacgcgcactttggcgtcgagcgcggacaacggctcgtcgagcaggagcacgcgcggcttgatggccagcgcccgggacagggccacgcgctgctgctggccgccggacatctgctgcgtgtacttcttggcctgatcggcaagccccacgagctccagctgttccatggcgatcttgcggcgttcggccttgcccatgccgcgcacttcgaggccgaattccacgttctccagggcggtcatgtgcgggaacagcgagtacgcctggaacaccatggccatctcgcgcttgttcaccggcacaccggtgacatcctgtccgccgaccatgatgcgtccgccttggatgtcttcgagaccggcaagcgatcgcagcgcggtggacttgccgcaaccggatccaccgagcagcacgaccatttcgccgggcttgatgtccaggttgaagtcgtcgagcgcgtgaacggtggagccgggatagatcttgacgacgttctgcatctgaatggaaccaccgccgcgcttggcggtgtctttgagcagggccttggcggccttggtcacgtccttgccgcgcacgccctcgagggtagcggtgggatcgttcttgaaggcgtcctcggcagtggaggacacggctgccggaatggccggggacgccggggcggcgtccactgcggtaccggtttcctgacgggtgggagttgaatcgttgttcatcgggtcacttaccttcccttgacttacgcattgcgtcggagatcaggtcgagcgcaacgaggagcaccacgccgaagagcagagccagcagcgacatggcggtggaaatttgggcattggattggccgagctggtagagcgcgacctgcaggttcatacggccgagcagcgaggcgacggtgtattcaccgagtaccacggcgatggagatgaaggatgccgagaggatcgactgccacaggttcgggatgatcaccttgaagaacactttgggccaggaggcgccgagcgatcgggaggcttcgaccaacgtcttgacgtcgatggagttgaggcccacggcgatcgcgcggaaggcgaacggcatcacgagaatcacataggcgaagcacagccagatcgggttggtgctcaacacgtcggcggaaagccaacggtagatcggcccaagacccaccaccagcacgatgaccggaatggtcagcggcagcgtggccacccattcgattgcacgctccaaggctttggagcgaatatgcacgatgaccatggtgggcaccagcaggatgagcatgatcacgacggtgacggcgctcaacgacagcgagatgccgacgccctgccatagcacgctcagatcggcgcccaacgattcgccgttgccggtgaaaatcgccgtccacggcgcggccgaccagcgaccggacaacgggtgacgcagggtgaagatgaacatggccagcagcggcacgaacaggaacgccagggtgacgaacaggatcacgaatttgatgatgctctgtttgcgcacgcgggcggcacgcagctgcggcggcttggttgtggaagtttcggtcattgccaacgtccggccctcttttccacggcgtggctcagcagcatgacgatggccacgacgatgatcattgcgaatgccagcacctgcgcgaagccctgctggttggggtccatctcattgcgcatggcaccctggatcatgagcggcaccaggatcgaacgctgggagaacagggcggcggcggtcgcataggcggagaacgcggaggcgaacaacagcaggaacgccgagatgaagcggggtgcgaggatcgggcaggccacgcgcgtccagtattggacggtgttgccgccgagcgactcgcaggcttcgcgccactgtggacgaatggaatcgaccgcaggcaggaagatgatgatcatcagcggaatctggaagtagcagtagacggtcaccagccccggcagggagctgagccaattcgggttcacggtatagccagtcagggttttgatgagcatggtgccgatgccgttgatgccaagagtggcgatgaacgcgaacgcgagcatcacgccgccgaactgggcgagcaccgatgagatggcggcgaccatacggcgcagcggtccgttcggcttggcgccgatcaccagcgcgtaggaggcgagcgcgcccaccacggcaccgatcagggatgaggccacggacaccaggattgacgtgccgaacgcggcgatggtgttggcttcgaacatcttgtggaagttcgcaagcgtgaaaccgccgctgcgatcctggaacgcgccgatgatcacgatcacggtgggtgcgagcaggaagcaggcggtgtaggcgaagaacgggagcgtggtggtgagcgtgccaagctcctgacggtgcttcgccagtgcggacgaagcgggggtcgatgcggcggacggacccgcggccttggaggcggcgggtccgttcggtgcgatgggtgcgattgcggcggtcatcgtggactctcagttgccgatcgtcttgtcccagttgttttgaagccactcggtgatgcgggtggagtcatcgttgctgtaggtgaccggctggccttcgatggtgatggcgtccttcagggtggcctagtcgacggtgccgtcggccttcatggagtcgagcagcaccgggttggcgccgcccttgaaccacaggttctgggtttcggcggtgtacaggtattcctcccacaggcgtgcggcggcggggtgcggcgcgtccttgttgatggcctggttgtagtagctgacgacctgggctttggggaaggtcttgtacttccagttcacgcccttggacttgagttccttcttgtaggaggcctggttgtaggtccagtcgaagaccacgccggtctggccggagtcgatggtgccgttggtcacatcgatggtgttcaggttgccggcttccttgagcttcttgaagaagtcgagaccgggctgcaggttgttgatgtcgccgccggcgagctggttgaccatcagatagccgttgaaggccgcgccggcctcggtaggcttgccgttcagggacacggtgccggcgaacttcggatcgagcaggtcgttcagggaggcgacatcgccgtacttgtcggcgttccagcccacggacatgatgccggtgtagtcggcgtagtaggcgccgtcgacgttcttggcagcatcagggatcttgttccaggcctgcaccttgtacggggcgaaatagtcggtggaggtggcggcgatggcctggccgacgtcgaagacatcgggggcggcgtcggtacccttgttggtcttggcggcgtcgatctcctccttggaggaggcgttcgggttcagctcggtgatcttgatctccgggtacttcttcttgaagccctcgatgacctcgccgtagttggaccaatcatgcggcaaggcgatgacgttcagcgcgccttcttccttggcagccgattccgcaccacacttacctcagcacgccctcaatcaatcgcgtgatgagttcggtgtagctcactccggtggcatcccaagccttgggatacatagaaatcggcgtgaagccgggcatggtgttgatttcgttgaccatcaccgtgccatcaggcgtcacgaaggtgtccacacggctcaagccggcaccatccacggccttgaacgcacgccgggccacgtcacgcacgtcctcaagcacgctgaccggcagattggccggcacttccacgtggctggcggaggcatccatgtacttggagtcgaaatcgtagaactggtcgtcgttctgatgatcgagcacgatttcgccgggccagctggcctcgggctcgtcaccggccttcgggcacagcacggcacattcgatttcgcgaccatcaatcccctgttcgacgagcaccttccaatcgtgctcgccggcggtggcaatggcggcggccagacgatcctgctgggtctcgcggtcatcggctttctcgaccttggtcacaccgaagctggagcctgcgcgcgaaggcttgatgaacagcggataggtaagaccggcgtcctcgatcttggcaagcacatcggcggcggtgaagttgcgcgcatcgaccgtcacacccggcgcggtgggaatgccggcggcacccagcaccaccttggtgtaatgcttatccatgcaggcggcggaagcaaacactccgcaccccacgtacggcacacccatcatttccagcaggccttgaaccgtgccgtcctcgccataggggccgtgcagcaccggcagtaccgcgtccacatggccaagggaggtcagcgcatggtgcatttccgggtcggacatgctgacgaagctggtgccgaagccggaatcggcggaattgatgcggctgggctcgccgatgaagaaaccgtcctggccgcgagaggggtcaagcatcaccgggcgcgattccggggtgatctttacggtcggcagctcgccgccatccagattccagccacgaggatcttcgccgttgatgatccacttgccgtccttggtgatgccgaccggaatcggctcgaaccgttcagtgtccatggcccccagcacaccggcagtggagatgcaggaaatcgaatgctcgtctgcacgcccaccatagagcaccacaacacgcttcttggccataaccatccttttattgaaactacaaccgttttcaagcctatgctttgcaccgccaaccggaccgaaccgcgctcggaccgccgcgcacaagagacgcacaccagtctactcgcgcacgtcaacgacgtatacgccacacgactttgcacgtacaacgtatacgccacgtatacgtcgcttctctcgttattcgccggtaacctcgtgcccgaacagtccggcaagcatctccgagcaggaaatgccttcgttcagcacgcggctcatctgatacgccaacggggtcggcacatcaagctgctcgccaagagccaccaccgcatccgtggtgggcacgccttcggccaccccgttgctgaccttggtggcctcctcgaccgtcaatcccttgccgagattcgcgccgaacgtatagttacgagacagcggagagccacaggtggcgatgagatcacccacaccggccaagccgaagaaggtcttgggatcggcgccagcggctgcgcccagcgcggtcagttcggccagtccacgagtttcgatcatggctgcggtgttctcaccgtagccggcaccacgggccatgcccacggccagcgcggtcacgttcttcaggctgccgcacatttccaggccgatgacgtcggtggtcacgaacggcttgaaataggaggtggtacatgcctcggccaccttcgtggcattatcgaggttcgtacaagccaccacggtggcggcaggatgacgatcggcgatttccttggacaggttcggtccggaaatggcggcgaaccggtcggccggcaggtcaagggattcgcggacgacttcgtccatacgcttgttggtgccacgctcgatgcccttcatcaggctgacgacgatggcgtgatcgggaatcagtcccttgaattcgacgagtgccactcgcgcgaactgcgcggcgatggccacaaccacgatgtccgcgttcttgacggcttcggcgcgatccccggtggcggtcatgttgtccggcaacttttcgacggacggcaggcgcacggcgttgtggtggtgatcgcgaatgccctcgacaatccgctgctccttggcccacatggtcaccgtgttgccggcgtccgccagcacttggccgaaagcagtaccccatgctcctgcgccgagaaccgttatatttttacccatatcagattcctaccttcgcttgtcgcgcaacttcatcggcacaatcttgtgccatgctactcgcctaggctccccgtacgggaaccggtgcggctacttctcagccgggaacgggccgccggcttccggccaaggcttgcgactcatgctgcggtagtcccagtagccttcagcggggaactgctcgccacgaatttcctccagtactgtgttcatgcgtttgagcacgcgccacatcagctcgttcacggcctcggcaggcggttcttcaccccatgagtccatgtcggcaagcagatcggagtaatcgagcgcatggtcatagcacatcaccacgtttttgcgcggccatggccaccagtggttgatggaggcggcaccccacgtcaccgccgggtacagcggcacctgatgccccagtctgcgcgaggattcaagggcgatgtatcccacgccctccttaatgctcatcacccactttttcgggtcgcgggtcacggtgccttccggccagaccgtcagcgggcggccggacgtcagaatatcaatcgaggtctcttcgatctgcttggccttgcccgaatgacgctgcaccggctgcatgccgaccaaccggaaccacttgccgatcaatggccacttcgccatctcggccttggccatgtaccgggggcggcggcccatgtggaacaggctcatcatcggcacgaacacatcgaacatggtgatatgactggcggcggtgatgaacggtccggtttccggcacctgttccaggccccaggccttggtcttgcagctggcgcggaacacaatggacacccctcccagcagtcgtttggtggccttgggattctgggcgtcgatttccggctgattgggcgtgcgagggccggtcgggtaatactgtgtcgagtccacaagcgtgtggcgggcggccagacgcttgacctgctcatcactcagcgggcttacggccgaacgcggcgacggttttcctttggatgccatggtctctattgtggcacggaccaccgcccaacgattccagcgcaacattcccgggaatgtgccgcggaaccacacctcgcaccccgcctagcgcgacattccccggaatgcgtcgcacaatacgcggcggcccgtctgcacacaccatgcgcgcagacgggccgccggggaaacgttcgaatcactccaccgcgatggcgtcgatctccacgagcgcgcccttgggaatcatgttgttgccaaaggccacgcgggcgggcttgacggagccgatgaacgcctcagcgtaacgtgcgtccacttccttgaagtcctcgacgttcttcaggtagatggtggcgcggcacacatgctcaatgccggtaccggcagtgtcgagaatgtgcttaatattcttcagcgcctgtgcagcctgctctccagcggtctcgcccgccagttcgccggtggccggatcaatgcccagctggccggatacgaacacgaagccattggccttcaccgcctggctgtatgcgcccagcgcggccggcgcctcggaagtggctacggcttccatcttttcgctcatattgtgctccttctcatcttgggggcgcccacctgctgcggccggcgccggtacacatcaccaccggctacgaccaatcgcacgatcagcaacgattggcaatgccgattacgtagcagtctactgagcgaagtcgcgtttagcgcgcatgatgcccggcatacggccatcaacagactattccttgctattccagacgattccagacgattcgactaccgttctcgccaaaccgggcggtttttccacgacccaagcgagccggcatcaccgac

SEQ ID NO: 857 - DNA, 31345 bp, Unknown
  R14_18m  MAG No. k141_12443
caagtgccatcagttcgcggatgtcatctgcctgaaccggtattacggctgatatgtgcaagatgggtatcagctcatcggagccaagaaggccttcatcaacgagatgaaccaatggatgaacaccgaacccaacaagccgtttctgttcaccgaatacggtgcggacaccgatgccggtgcgcacaagctgccgagcgtgcaatggagtgaagagtaccaatgcgagtacctcaccatgcagcacgaagtgttcgacatgttcgaggcagtggtgggcgagcaggtatggaacctctgcgacttccaaaccggtgaaggcatcatgcgcgtcgacggcaacaagaaggacgtcttcactcgcgaccgtcagcccaaagccgccgcctatgtactcaaggagcgttgggagactaagtagcggcccgcccctggaatattccaggagcaacacacatcgcataacacacaacgcaacatacaaaaaagaacctcgtgaaacgaatttcacgaggttctttctagttacgctgaatgactcccattagactcccacaagagaagagcaatggcgaaatcccaacgttgctaagctctcaaactcagatgtggaagtagagctcgtactcgagcggggtcggggccaggcgagcctggtcgatctcgtcgcgcttgaggccaatccaggtctcgatcaggtcgtcggtgaacacgtcgccggcggtgaggaagtcgtggtcctcttccagggcgtccatagcctcggccagggagcttggcacctgcttgatgccagcgtgctcttccggcggcagctcgtagagatccttgtcgaccggctccggaggctcgatgtggttcaggatgccgtccaggccagccatcagctgagcggagaaggccaggaacgggttgcaggacggatccggagcgcggaactcgatgcgcttggcagccggggaggtgccggccagcggaatacggatggcggcagaacggttacgagcggagtacaccaggttgaccggagcctcgaagcccgggaccagacggtggtaggagttcagggacgggttggtgaaggccagcacggaggaggagtgcttgatcagaccgccgatgtaccagcgagccagatcggacagaccagcgtagcccttctcgtcgtagaacagcggcttgccgtccttccacagggactggtggcagtgcataccagtgccgttgtcgtcggcgatcggcttcggcatgaaggtcgcagccttgccggccagagcggcggtctcgtggacgacgtacttgtacttcatcaggtcatcgcctgcgtgctgcagggtgttgaagcggtagttgatctcctgctgaccagcgccggcgacctcgtggtgggaacgctcgaggatcagaccgaccttctgcaggttggcgaccatatcgtcgcgcagatcctgggtgtggtcaatcggcggaaccgggaagtagcccttcttgacgcgattcttgaaaccgatgttcggggtgccgtcctcttcggagtcaacgccggagttccacggagcttcgatggagtcgacctcgtagaaggagcgctgcatggagttctcgaaacgcaccttgtcgaagatgaagaactcggcctcaggagcgaaggatgcggtgtcggcgatgccggtggacttcaggtaggcctcggccttgccggcgacctgacgcgggtcgcgggagtacggctcgtcggtcagcgggtcgacgatggagaaggccacgtcaagggtcttgtgcttgcggaacgggtcaacgaaagaggtctcaacgtccgggaccagcttcatgtcggactcgttgatggcctggaagccctgaacggaggaaccatcgaacggcatgccgtcggtgaaagcgtccttcaggaattcgctagccggcacggtgaagtgctgctgaacgccgataagatcggtgaaacggacggagacatactcgatgccttccttgttgataagggcctcgacgtcttccttggacttgagttcggtcacgggaccgctcctttcgtatgagatataacggtatatatcgtaaaatagcgcgtttcgccggctcgaaacttgggttacgagaatgtttcgtgactgtggccgacaatcgcgcaggcgcgttatttcaacgaaacaccattacagaatggaaacggagactatcgggggagtaggtagagatgtccgcaacgtggacagtgggtattgacaggtgacgtaggtggatgtaagtggacgcgattatgagacatatgacgaagccccggaaccgattgaacggattccggggcttctgtgcgatttggttgtgtgctgccgatcagcgaccgcgcatcgcgcggcgggagatcttctgcgggcggttcggatccatgcccttggggatggcatagcccttcttggcctgcagcgtgcgaagacgatcgttcagcgtttccatctcggccttggtcagcaggaagcgacggcgcggatgaatcttggcgatcagtgcgttcttgtggtgcgtgggctcatagctcttggacttgatcaccgtgctacgcagcttggtcagcggcacctgcttggggccgtgtcccacggcgatgcggtatatcggaatggaggagccggcggtgacgcccttgatatcgcgttcctgacgatccatcgccttcatgacgcgaccgtattcgccttcgccgatcaggtagatgccgttcatcgaagtgccgcgccagatggcatccttggtcttcgggtcgatccacaccggttcctgcgggaagtcaaagccggctttctgcatgttgctcagcacgccgatggcggcaccaggcttgccatcaatctgcttgtagccgactgcatccgcgcggcgggtgagcatcatggtggccagcagaatgccgagcatgatggcggtaatcatggtgaagatccaggtcagccaggtccacttgacaatcagaccgatgatgatcatcacgactacaggcagcaggaaagcaccggcctcaagccacggcagggccttgtcttccttagccgtgtacttgtagatctggatgatctgcttgattgtgctctgcttcttcggcttcgcgtccttttccgccatcacttcttcctttgttgggacgaaacacactggacaatatcttatcaggtgcgctggtccgaacttgcttgtgctggttggtctcagcgtgtgtgcaacggtcgtccgtcggccttgagcagcgcctcgccgagcgtttcactgaatgtgggatgcgggtgaacgaggcgggctgcgtcggcgagcggcacatggttgccgaccagctgttcggcttcggcgatgatgtcggaggccatcggggagaccatgtgcacgccgagcacgcgcggggtgtccgggttggccgcgtcgcagccggagacgatggtcaatgagccggccgtgccgctcatcagcatgcgcgcgttcgccagcatcggatagttggtctccttgatttcgacgaggtcctctctcgcctgcgcctgttcgacggtgagcccgaccgacgccgcttcggggaaggagaacacgatctgcggcacagcggcttcgttcaccggcttgggattgagtccggcgatggtctccgcgatgacgatgccttgctcaaaagcacgatgcgccagtgcgtgaccggccgtcacgtcgcccaccgcccatacgcccggtttgtcggtgcgaccgtacgcatccgtggcgacatgtccgtggtcatcaatcgtcacgccccatgctgggtcggtgatcgggtcacgcccgatggcgacaagggcgatttcgccccaaacgctctgttcgccgtcctggccttcgcgcgtgtagtgcacggtggcaccaaggttcgcgccggtgtccacatgggtgacgctggcgcgggtgatgatgttcacgccatgacgtttgagctcacgggtcagcgtggtgccggctctccggtcccaggctgagagcacgcggtccttgcgaatcagcagggtcaccttcgaaccggcggcgttccacatcgaggcgaattcaagggcgatggccccggcgccgataatcaccgccgaagagggaaattcgttgacttccagcgcctgtgtggagtcgatgagggcgccggcgaacgggttaccgggcaatgggtgtggcttggcaccggtggcgatgacgatgttcgtggccgtgaggtccatcgtggggccgctgggttcggggacatcggccttgtgataggtgaggatgtcgctttggtcgggggagggaacgaggtggacgatgtggttggaagttgctggagtgatctcatccgcatggaacgcggcattggctcggaacacggtgatgccgcgatgggccagcagtccggccagtcctcccaccatcgtcttgaccacgcgcaggcgatagtcgcgcagcgtgccgaagtcgatgccattcaccgaggcgttgacgccgagttcggccgcacggtgcacggtgtcgatggtgtgggtggcggtgatgagcgccttggaggggatgcagccacggttgagacaggtgccgcccacggtggcgtcacgctcgacgagtgccactttcatgccgagttcggcggcgcgcagggctgtggaatagccgccggggccggccccgatgatgaccagatcaaactgttcgctcatgattgcctccttggtgcatataagtatggctcccatgctagggagccatatgcggctatcgccgccacttcgcctaaaaacagtccactggactgttttctttacggctcagcccctcaacgaggggagccagagtatatatatggacatcagtctgccggccagtgaccgcgcttcgggtaacgcggcttgggaagcctccaacgacgcatctgaatcgaacggctccaagcgtaggagaaggagcgggagcccttggacacggactgttcgccgtacttggcgatgagcttggccttgagcttgcgccacatcagccatacgtcgatgatcacggcaatcaggtaaccgtacataagcgccatcatgatgatggaagcccactggttctgcatcaaagaagtgacgaacatggagacgatcagaatcgcgaaggccaccgggatgaaccattcgccaaggttgaaacgggcatccacataatcacggatgtagatacgccaaggcaggcgttccgacttgggcatgtggttgatgtcgcccttctgcatcgcctcgtactcggcgttctccctctcgcgcagacgggctttggcggccttggcgctggccttgcggtccaccggaaccagcggacggataccggcggcctgagcctgcttcatcttcggggtaggacggccttttttctcagaaggatcggcggtcttcttcggggcctgctcaacgggaacttgagcctcttcttttttcctaaacggattccatgtcatgctttgaggttacggtgacgttcagacacttgtatactggcgcagccattgcaatgacgccgcttacacacatataaaggaggaccatcatggcaacgctcaccgctgacgagattcgttcgcgcgtcgaaaccgattggaaccgcatcgtcaaggtgctggccgaaaaggttgcgctgcagtcgatctccgccaagggcatcaccgccgaacatatgaagcgctccgctgaattcgtggcagacgaactgcgcctcgtgggtgtggatgccaaggtggtccaggcttccaatgccgacggcactccgggcgcatgggaggtcatcggctcgcatatcgtttctccggacgcccccaccgtgctgctctacgcccatcacgatgtgcagcctgttccggacccggccgagtggaacaccgacccgttcgtggccaccgaaatcgacggccgcctttacggccgtggctccgccgatgacggcggcggcatcgccatccactccggtgcgctgaaggctttgggcgacgacctcaacgtcaatatcaaagtgttcatcgaaggcgaagaggagatgggctcgccaagcttcattcccttcatcgaggctcaccgcgacgaattcgccgccgacgtgattatcgtggccgattccggcaactggtcggcggacattccttctttgaccacctcgctgcgcggcaacacttgcgtggacgtgaccgtgcagggccttgagcacccggtgcactccggtcagtacggcggcccgattcttgactccaacacgttggccgccatgctcatcgcttccatgtacgacgagaacggcgatctggccgtgcccggcgtggccgcggaagagccaatcggcggtttgcaacgcgaccttgacgaaaccaccgtgcgcgaggattccggcgtggtggccggttacgagttcgccggcaccggttcgctggcctcacgcctgtggaccaagccgtccgtgaccgtgatcggcttcgacgcccacccggtcgagggatccttcaacgtgatcgccccggagacccgcttccgtctgtcgctgcgcaccgcgcccacccagcgccctgaagaagcgcaggaagcactggctgcattcctcgaatcccacgcgccgttcggtgccaaggtcactgtcgaacgcggcgaaaacggcatgggctgggccatggacccgaccgccgtggccaccaaagacgcgctggaagccatgaccgaggccttcggcgttgagcccatcaacaagggcgagggcggctccattccgttcatccccgaactgcagcgcattttccccaacgctcaggtgctggtcaccggccccgaagacccgaaggccaacgcccacagccccaatgagtccatctccctgcccggcctcaagaacaacgtgatcaccgaggctttgctgctggacaagctcggcaagtaaccgaaccgcatcggtaatggtggcgagctgccgtcaggtaggtcacggatgtggctattgcctttgacggcggcttgctttatagtcggggagttgacacgggagctgccgttaggcggctgagaggagattcatagtctcgaccgatggaacgtgaccggataatgccggcgcacggaaatgtcgctcttacccacccgtgcctgaaccaacccgcgcgtggccacgaacatgtgcatcatgtgcgtacatatatccatgtatgttcggcctgcgtacgagcagaagaaaggcacattcatgactgaagctgtggccaaagccaattacaagtggcgcgtcgtcgatatcgtcgtcgccgcaatcatcgccgtcgcatccggcgtcattttctggggctgggacattgtctgctccgccccgctggccctgttcgaaggcgtgacccccggtttcgagggtctgctcaacggattctggctgttcgccggcccgctcgccgcaatcatcgtgcgcaagcccggtgccgcactgtttgccgaaaccctcgccgccttcctcgagcttacgctgggcaaccagtggggtgtcggcggctcgctgatcgtcggcatcatccaaggtctgggtgccgaaatcgccttcgccgtcttcgcctggaagaagtggaacatcggcaccaccatcctgtccggtgcgctcgccggcgtgggctgctgggcctactactgggccaccaacccgggctggaacggcctgcgcgtcacttggtatctggttggctccatcatctccggcgtcgtgatcgccggcgtggtggtctggtacttgtctcgtgcgctcgccgccaccggcgctctggaacgctttgaatccggccgcagcaaggcgcgcgtctgatgcaggttaatccggctgcggtagaggccagcggctggggatggcggcacgccacgcgtaaggacttcgcgttgcgtgccgtcgatttcaccatccggccaggtgaacgtgtgttgctgctcggtgcttcgggggcgggcaaaagcacgatgatggccggtctcgcaggcgtacttggcggcgatgaggaaggcgagcaggagggctcgctcaccatcgatggcgtcgatgcgcgcgaggcgcgaggccgcgtgggactggtgcttcaggacccggactcgcagatcattcttgaacgactgggcgatgacgcggccttcggctgcgagaacctcaacgtgccgcgcgaggagattcggcagcgagtgcgcgaatcattggatatggtgggactcggcggactcgaactggatcggtccacccgccatctgtccggcggtcagcgccaacgtctcgcgttggccggcgtgctggctatgaagcccggtctgctgttgttggacgaaccgaccgccaacctcgaccccgaaggcgtggtcgaagtgcatgacgcggtcaaaaaggtcatcgaggccaccgggcagaccatggttgtggtcgaacatcatatcgatgtatggctcgatctggtcgatcgcgtgatcgtgctcggccgacccgatgcaagttcgcccacgggcgcggtcatcgccgacggcaagccggacgaggtgttcgccgagatgggcgacgtgttggccgccggtggcgcgtgggtgccgggccgtgcgattcccgattactcgccgaagcgggagcctgcgcacgatgcgccggtgctcagcaccgagaacttaagctttggccgtggaaccgctcttggcgttggcatcaatctggatttctatcccggcgaagtaacggctctgatgggtccgaacggcgcgggcaaatcgaccttggccctgaccttggccgggctgctcgagcctatcgccggcaaggtgctcatcgccgacaacctcaagcccgcgcatgccgggcgtgagccgattgactggaaaagcaaggaactgctgggccgtatcggcatggtgttccaggagcccgaacaccagttcgctgccaatttcgtgcgtgacgaagtcgccatcggccccaagtcgatggggcagagccaagacgaggcttatcggaccgccgaccgcatgcttgagcagatgaatctcacgcgcttcgccaaagccaacccgtataccttgtctggcggggagaagcggcgactgtccgtggcctccatgctggccgccgcacccaaagtgttggtgatggacgaaccgacattcggacaggatttcagtacgtggaatgaaatggtcaagctgatcgccgccatccgcgaccaaggctcgtgcgtggtcatggtgacgcacgatgaggcgctggtggatgcgctgggcgcacgacgcgtgatgttcgaggaggcgaggcatgagtgacgtggtaaccgtcagcccgcaggaaacgcgcgtggagccggtcaaagcctcatcgccctcatggttcatagcgcgcatcaacgcggtcagtcgcatcatcggtgcgctgttgctgtgcgttccgatgttcatcagtctggatgtggtatccgcatccacggcgctcggcatcgaattcgtgctgctgtggattggtggcgtggctccgtggaccgtatgccgtaagacctggccggtatggatcgccgccgccggcagttttatctccgtgtttctctacggccgcacctcgggcgagatcctgtggcagggtggctggattgtgatcagtgagggatccattaatctggccatcgccacggctatcagggtggcggccattgccgtacccggcgtgatcctggccctgggcctcgatcccactgatttggcggacggtttggttgagattctgcacttctcaccgcgattcgtatacggcgggttggctggattgcgcatgtttacgctgctgcaggaagattggcgcgcacttggcttgtcccagcgttcgcgcggccttggcgacggtaacgccatcgcccgtgccctctcccaagcgttcggactgctggtgctttccatccggcgcgccaccaaacttgccaccgccatggaagcgcgcggcttcggctccagcgccccacgctcccaagcccgtatctcgcgtctgaagcctatcgactggatcttctacgtcatctgtctggctgtcccgctggcctccataggcgtagccatcggcaccgggaattggcacttcgcctttcaaggtgtctgaaaggcgacagactggcacagtgcctttcaaggtgtctgaaaggcttacgatgcctccgccagcgggagcgagccacgactgacgtaatgacccggcagtagggtagtggctatgcccatcaacgcccagattcttgataatccgaaatccgaccgcgttcgccgcatcgccgatctgacccgcgccaaaggccgcgaacgttcgggccgttttcttatcgaaggcccgcaatccgtgcgcgaggccgtcacttggcggccggacgtggtgcaggacctctatgtggaggtttcgcaggcgttggaacatccgcgtatcatctcctccacgttggagaagatcgtcgaaacctcgcaggatgccacgatttatgtgcactactgcaccggcgacgtgatgcaccgcatcagtccagacgcccagggcatcgtggccgtcggcaatgccgagtccatgcacgccggtgccgatgacgtcgaacttggcaagaacggccggggcccgcagatcgccgccttctggcaggtgcgcgacccgggcaacgccggcaccgtgatccgtgcggccgatgcggccggttgcgacgccgtaatcttcgtggacgactgcgtggacgtgctgaaccccaaggtcatccgctccaccgcaggctccctgttccatctgccggtactcgccatgagcaccgacgaattcttcacctggacaggcgaccataatatgggcgtctgggccgccgacgtatacggcaccgaagaatgcaagccggaaagcctgcccgcagtactggcggacaaggcggcggtcgaggctccgaaagccgtgctgttcggcaatgaggcgcgtggcttggaaccggacatcctcacacgctgcggccgcatcgtctccatcccgctgtacggcaaggccgaatcgctgaacctcggcacctcggccgcggtgatgttgatgtcgctgtctatgtcgggtcatgttgaaagaatgtgaaaccggtaaaaacgctgtgaaacgctgagaaaacatcagacgaaagggttctcgtggcagaacaaatggtgttcgacgccgaccaggtgaccgctgaggttgccaagggcatcgagaaaatccagaacgcctccaacctggaggagctcaaggccatcaagacaacgtacgcaggtgccgattcggcgatgaccaaggccagcaaggccattggctccctgcccgtcgaccagaagaaggaagccggcaagctcatgggcaagctgcgcgccgacttcggccgtgcctatggccccaaggaggtcgagctcaaggaagccgccgagaaggccgcactcgccgctgaaaccgtggacatgacgctgccggtgaaccgcaagcctctgggcgcccgtcacccgctgcccaagctgatggaagacgtcgaggacttcttcatctccatgggctggcagatctcctccggtccggaaatcgaagccgaatggtacaacttcgactccctgaacttcggcccggaccatccggcccgccagatgcaggacaccttctacgtcaagggcaatcaagccaaggacgccgccggtttcgtcggctccaacatggtggtgcgtacgcagacctcctccgatcaggtccgtgccctcctgacccgtggcgtgccgctgtacatcgcgtccccgggccgtgtgttccgcaccgatgagctggacgccacccatactccggtgttccaccagtgcgaagccctcgccgtcgacaagcacctgaccatggccgacctgaagggcgtgctggacaagctcgccgtcgccatgttcggccctgaagccaagacgcgcctgcgcccgagctacttcccgttcaccgagccgagcgccgagctcgacctgtggttccccgacaagaagggcggccccggctggctcgagtggggcggctgcggcatggtgaacccgaacgtgctgaagtccgccggcatcgacccggacgtctacaccggtttcgccttcggcgtcggcatggagcgcacgctcctgctgcgcagcgacatcaacgacatgcacgacctggtcgaaggtgacgtgcgtttcgccgaacagtttgtgatgggggagtgattcagccatgcctatgatcgatatcgattggctcaaggaccatgtcgaggttcccgaaggcctgacctacgaacagctcgccaaggaccttgtcaaggtgggtcttgaggaagaggagatccactcctcccaggtgaccggcccgattgtggtcggctacgtggtcgacgccacccccgaaccgcagaagaacggcaagaccatcaactggtgccacgtggactgcggcgacgaatggaacgagaccgacgaagacggcaacaaggtgccgcgcggcatcatctgcggcgcgcccaacatgaaggccggcgaaaaggtcgtcgtcaccctgcccggtgccgtgctgcccggcgacttcaagatcgagccgcgcaagacctacggccacatctccaacggcatgtgtgcctccgaacgtgagctgggtctgggcgacaaccacaatggcatcattctgctgcgtcagtacggcttctccgaggctgaatatgaggctctgaagcctggtcaggacgccatgcacctgctgcacctcgaccagcctctgcttgagatcaacatcaccccggaccgtggctacacgctgtcctaccgtggcgtggcccgcgaataccaccactccaccggtgccgcctacaccgatccggccgtggcactgaacgagaaggccccggaacctgctgactaccagcccggcaccccggtggacatcgatgttgaaatcgacgataacaatccgattcacggcgtgcccggttgcgaccgctactacgcgcgcatcgtcaaggacttcaaccccaacgcccacacgcccaactggatgcgtcgtcgcctgatccgcgccggcatgcgctccatctccttggccgtggacgtgaccaactacgtgatgcttgacctcggccagccgatgcacgcctacgacctcgacaagctcgaaggcccgattgtcgtgcgccgcgccaacgagggtgagaaactcaccaccctggacggcaaggaacatgacctgagcgtcgaagatctgcttatcaccgattcgccgaacggcgaacgcggctcgcgcatcctcggccttgccggtgtgatgggcggcctgtatggcgaagtgaccgctgacaccaagaacattcttctggaggcagcgcacttcgatcaggtgaccatcgcccgttcggcccgtcgccacaagattccatccgaggcctcccgccgcttcgaacgcggcgtcgacaccgcgctgcagcccgccgccacccagatggccgccgagctcatggccaagtacggcaacggcgagcccagcgaacacccgaacgacgtgaacaacacgccgcgcgccaaggtcatccacttcaaggcctccgaagtggcccgcgtggccggcctcgacgtggacatcaaccgcatctccgacatcctgaccgacattggctgcacggtggccggcggcggcaacggcgagttcgccgtaaccgcgccgagctggcgcccggacttgaacgagccgtgcgacctggtcgaggagattgcccgactggtcggctacgaccagattccgatcaccgtgccgccggcaccggtcgagggtctggtgggcctgaccccggaccagcagcgtcgccgtcgcgtggcggacgagctcgccgagttcggcatggtcgaatcgctgagctacccgttcgtgggcgacgacgattacaaggccttcggcttcgacccggaagccaccaagaaggtcagcgtcgagatcgccaacccgctctacggcgaccgtccgtacctgcgtcgcgagattctgccgaccctggccaccaccgtgcagcgcaacatccgccgcggcatcgaaaacgtgtccctgtatgagctcggccacgtctacctgtgggatccgaacgcgcccgccatcccggcactgcccggcggcgtgcgccccaccgacgaacagctcgccgcgcttgacgccggtctgcccgaacagcccgaccatgtggccggcatcctgaccggtctggccgaggacgatggctggatgggcggcaagcgcccggtcgactggtccgacgccgtcgaggccgtgcgccgcatcgccggccgtatcggtgccgcaatcgaactcgaccagcccgccgccgacgatgtgcccgtccaatggcaccccggccgcgtcgcccgcgtcatggtgggcgacgtcttcaccggctgggttggtgaactgcacccgcgcgtcaacgaggcgctcggcttcccggcccattccgcggccttcgagctgaacctcaccgcgctgttcgccacgctgaccggcaagcccgtccaggccaagccgatctccacgttcccgccggtcaagcaggatttggccttcaccgtggacgagaccgtgaccgcaggccagcttgagaacgtgattcgcaaggccgccggcgcgaacctcgaatccatcgaactgttcgacgtgttcaccggcgaacaggtgggcgagggcaagaagtccctggcctatgcggtggtgttccgttcaccgagcaagacgctgtccgccgaagacagcgacgccatccgcaaggccatcgtggctgaggccgccgaaatcggcgcccagctgcgcgcctgacccaaccgatcatccgaatcgaggagcgtcatgagccaaccggagcaggacaagccgaaatacgggcagtaccagcagcctgaatatggtgctatgtctggccaatacggaccgaattacaacccgtatatttatggcgctcccgagccggataccaagaaggattccgccgcagccgctggcatcaacggtggcgcggcgcaatcccagcaggccggccagccgtacggtcagcagccggcgtggcccggcaatcagcaggcgggcggctggccgtatgctcaaggcggccaacagtccggtccgggcgcatatccgggcgggtacccgggcatgcaggggcagtcgtatggtcaacagccgaacggtcagcctcaccagccgcattattaccacggcatcgacctgaacgatccaaaccagaacccactctacgggcactgggattcgtatgcgatcatctcctttatcctcgccctgttcttcccggtgccagtgctctcggcactgatgggcgcggtggcaatgtggcgcacgcgcaccttccatatgaagggcttcggtttggctgtggccgccgtggtgatcaacgtgctgtacaccatcgccgtcatctggatggccttcaatggctatgacgccatgagcctctaccaggaagccctccagcaactcaccggcggcaccggctcctcctccgactccatctccgcataagtagcgttcacataccaacacacccactgcataaatatgcaatagtctgcataatcgcgtatactcatcccaagacacatcagtgaaaagagatgagtatggcgaaatatacagtggccgtggccggtgccacgggctatgccggcggtgaagcgctgcgcattctggccgcgcaccccgacttcgacatcacctgcgtggcaggccattcctcagtgggggagtcgatggccaagcacatgccgcatattccccaactggccaatctggtcgtcgaagataccacgcccgaagtgctgaacgggcatgacgttatcatcctcgcactgccgcacggtgcttcgggcaagctcgcctcgcagctcgatccgaatgccgtggttgtggatttgggcgccgaccatcgtctcgaagagcaggccgcttgggatgagttctacggcggcgatttctatgagcattggacctacggcatgcccgagctcatcaccggcaaggccgcggacggctcatacacccgccagcgcgcggcgcttcctggcaccaagcgcatcgcaggccctggctgcaacgtcaccgccaccacgctggccctccagcccggcatcgccgaaggactggttgaatcgcaggatatcgtggccgatctggtcgtcggatactcaggtgccggcaagaatctcaagcgcaccaacctgcttgccgccgaggccctgcaatccgccctgccgtattcggtgggcggcaagcaccgccacattcccgaaattctgcagaacttcgcccacgcggccggcaagagcgcggccgaagccagcgaattcacgctcggcttcacgccgattctcgcccccatgtcccggggcatcctcgccaccgtgtccgcccgcatgacggacaaggccaaggcactgagcgatgaggagattcgcgccgtatggtccaaggcctatgaaggccaggacttcatggtgctgctgcccgagggcacactgcccgccaccggcaacatcatcggatccaacgcagcccacctgcaggtcgtcaccgaccgcaaggccggccgcatctacgcttttgccgccatcgacaacctcaaccgtggcaccgccggacaagcggtccaatcactgaacatcgcactcggcctgccggaagacgcgggcctgaccaagatcggagtagcaccgtgagcgttacatttgcacaaggtttctccgccgccggcgtggcggctggtatttcatccgtcgaaggcaagaaggacttggccctcgtggtcaacaacggcccgctcgacgcggctgcaggcgtgttcacctcgaaccgtttctgcgccgccccggtgcagtggagccgtaaggtcgtcgccgacggtcacgtcaaggccgtgattctgaactccggcggtgccaacgcctgcaccggcgaggccggttacgcccagtccgtcaccaccgcggaaacggtcgccggtctcatcggcgccgaaccgaatgatgtggctgtctgctccaccggtctcatcggtgaactgctgccgttggacaacgtgctggctggtgccaagagtgcccatgaggctcttgccgccaccgccgaagccggcgccgacgcctcccacgccatcatgaccaccgacaccaagccgaaaacggtcgaactgaccggctccaacggctggaagatcggcggcatggtcaagggctcgggcatgattgccccgcagctggccaccatgctgtgcgtcatcaccaccgatgcggtcgtctccgccggccagatgcaggccgcactcgccgtggccgccgaacattcgttcaaccgcatcgacgtggacggctgcatgtccaccaacgacacggtcctgctactcgcctccggtgcctccggcgtcgaaccggacaaggacgaattcaacaagctggtgcgtgaggcctgcgtctccctgtcccgccagatcatcggcgacggcgaaggtgcctcccacgacatccgcatcaccgtcaccggtgccaccagcgaagacgcggcacttgcctgtggtcgtgccgtcgccgcctcgaacctgctcaagtgcgccatctccggcaacgatccgaactggggccgcatcgtcagctccctgggcactgtgccgcctgaagtcgcgccttacgattcgaacaaggtgaccgtggacgtcaacggcgtgcgcatctgcgagaacggcggcgccggccgcgaccgcagcgaggtcgacatgaccccgcgcgaagtccacatcgacatcgacctgaacaccggctcggacgccgaggccaccgtctggaccgacgacctcacccacgaatacgtccacatcaacgccgactacgaaagctgacaaacagcccagtgggctgtttgtagcagccggcagcgatagcgtcgccggcgtcgcatataacgcaaacagcccagtgggctgtttgtagcagccggcggcgatagcgtcgccggcgtcgcagaaaagagaaaaattggctacagaattgaagggacctgggttccatttcgacgtgcacaccgatttgcgcgccgatcagaaggcagaagtgcttattgaagcgctgccttggctggaggagttcgccggccagcgtatcgtcgtcaaatacggcggcaacgccatggtcgatgaccatctgaagcagtgcttcgccgaagacatggtcttcctgcgtcaggtgggcctgcatccgatcgtcgtgcacggcggcggcccgcagatctcccacatgctcaaggccctcggcatcaaatccgaattcaaaggcggcctgagggtcaccacccccgaggccatggacgtggtgcgcatggtcctgaccggcaaggtgtcacgcgaactggtcggcctgatcaacgcgcacggcccgctggccgtaggcctgtccggtgaagacggcggcctgttctcggccatgcagcgcaggcccatcatcaatggcaagcccaccgatatcggcttggtcggcgatgtggtttccgtcgatgcctcggcagtcgaggatctggtggccgccggtcgtatcccggtcgtctcttccgtggctccgaacgaagaagatgccactgaagtgctcaacgtgaacgccgattccgccgccgccgctttggctgccgctgtgggcgcacgcaagcttgttatcttgaccgatgtggatggtctgtacgccgattggccggacaagaattctctgattggccggatcggtgtggaaaacctgcgcgatatgctgccggacctggaatccggtatgcgacccaagatggaggcctgtgtcagggccatcgacggtggcgtgccccaagcccatatcatcgacgggcgcaagccgcattcgattttgaatgagatattcacctccgcaggcatcggtaccatggttatgcccgatgaaggactggaaatgaggagctcttatggctactgagcatgaggaaaaactaggtacggaggacagcaagtggctgggagagtactctcaggtccacatgaatgtgttcggtacgccgttgcgcgtcatggatcacggccaaggtgcccacatctgggatgttgacggtaacgaatacctcgatttcctggcaggcatcgccgtcaattccctcggatacgcccaccccaagtgggtcaaagcggttgccgatcaggctgccaaggtggctcatatcagcaactatttcgcgtccgagccgcaaattgagctggcatccaaactggtcaagctggctggtgcacctgaaggctccaaagtctacttcggcaactccggtgctgaaggcaatgaagctgccctcaagctcgccaagctgtatggccgcaccttgcctggtgccctgccttccatcggcggcaagcccgcacgcattctcgcaatgactcacggcttccatggccgtacgatgggtgcgctgtccgccacatggaaacccggtatccgcaagccgtatgatccgctggtgccgaacatcgaattcgtacgcgccggcgacaaggtcgccctgcacgacgcttttgcacagaccggtctcggccgctatggcaagggtccggtggctgctgtgattctggaacttatccagggcgaagccggcgtgcagccgttgggcgccgattacgtcaagttcgtgcgcgaactgtgcgatatcaaccacgcgctgctcatcatcgatgaagtacagaccggtatcggacgtaccggcaagtggttcgcattccagcgtgacgatctgtccggcggcgtgacgccggatatggtgactttcgccaagggcgtggcaggcggattcccgatgggcggcatgatcgctttcggcgagaaacttgcggctctgttcactcctggttcccacggctccacctttgccggcaatccgctgggtgcggctgcgggactcgccactcttggcgtgattgaagacgagaatctggtggccaacgccgaagctcgcggcgaacagctgcgcgatggcattatggccaccggtaatccgctgttcgtttccgtacgcggccgtggtttgctggacgccgtcgagctcaagcatccctgctcccacgcggtgatgaactactgcctcgaacacgggctcatcgtcaacgcggtggctcccaatgcgctgcgtttcgcaccgccgctgattgtaaccgctcaagacgtggatcaggcacttgccatcctcaaggatgtgcctacggacctgcccgacgactgatttctcgccgtcactgccgacccaccgatccaaggagatcatcatgaccccagaacttcgccacatgctgcgtgacgacgacctcaaccatgaggagcagaagcaggtgctcgaacttgccatcaagttccaccatgaccgcttctacaagcagccgttcgccggtccgcaggccgtcgccgtactgttcgacaagccatccacccgcacccgttccagcttctccatcggcgttgccgagcttggcggctacccactggtcatcgacaagtccggctcccagctgggccgtggcgagcccgtggccgataccgctcgtgtgctcgaccgcatggcttacggcgtggtgtggcgcaccttcggccaggaccgcgtcgaagaaatggccaagtactccacccatccggtggtcaacgccctgaccgatgacttccatccctgccagattctcgccgacttccagaccatcgccgagcaccgaggcggcgtcgacaacctgaagaaccagaccatcgcctacctcggtgacgcggccaacaacatggccaactcctacctgctcggcggtgccgtggccggcatggacgtgcgcgtggccggcccccacggctacctgccccgcccggacatcgtggccgacgccaagcgcgtcgcggccgagaccggcggctccatcctggtcaccaccgatgccaaggaagcggtgaagaacgccgactgcgtgttcaccgacacctgggtctccatgggcgaggaggccgaatacgccatccgttccaagccgttctgggattaccaggtcaacaccgaacttatggcattggccaagccggatgcgctcttccagcactgcctgcccgcctaccgcggcaaggaagtcaccgctgaagtgatcgacggcccgcagtccgtggtgtgggacgaggccgagaatcgtctgcacgcacagaaagcgttgctgacttggttgaccggcaaggcccgtggagacgaaagcctgctcgcatgagtgaaaccggtccgtccctgcagcgccctgccaccagggcggcgcggctgagtgccatagaacaggcgctcgccacgcatatcatcacctcgcaatcacagctgtccaaaatccttatcgacgagggcattgcggtgactcaggcgaccctgagccgcgatcttgacgagatgcatgcggtgaagacccggctgaaggacggcacggtggcctacacggtgggtcgcagcgtcgttgcttcagaaggtgaggatgtaggggagcgcggtgaggcacagatgtcccgcgtgctgaacggactggtcacctcggtggccgccgccggaaatctggttgtggtgcacacgccttccggtgccgcacaatacgtggcctcggtgattgacaggcagccgatcgaaggcgtgctgggcaccatcgccggagacgacaccgtcatggtgatttgcaccaatgacgacaccgccgtctcccgctccgactggctactaagcctcgcctccaaataaccaacacgccgtgcataaatatacagtcttctgtatatacttgcatcagtttgttttttcagaccttgaacgaaagggaagcaatggcagataacaagcgcattgttctggcctactccggcggtcttgacacctccgtcgccatctcgtacctgaaggagcgcaccggcaaggacgtcgtggccgtgtccctcgacgtcggccagggcggcgaaagcctcgagaccatcaagcagcgcgccctcgcctgcggagccgtcgaatcctacgtggtcgacgcccgtgacgagttcgccaacgaatattgcatgaaggccctcaaggccaacgccatgtacgaaggcgtctacccgctggtctccgccatctcccgtccgctgatctccaagcacctcgtgcgcgccgcccaccagttcggcgccgacaccatctcccacggttgcaccggcaagggcaacgaccaggttcgtttcgaggtctccattgcctccattgacccgacgctgaaggccatcagcccgattcgtgacctgtccctgacccgcgatgtcgagatcgcgttcgccaaggagcacaagctgccgatcacccagaccgagaagtccccgtactccatcgaccagaacgtatggggccgcgccattgagaccggcttccttgaggatccgtggaacggcccgaccaaggactgctactcctacaccgacgacccggccttcccgccggtcgaagatgaagtcgtcatcgagttcaaggaaggtgtgccggtcaagatcgacggacgtgacgtcaccccgctgcaggccatcgaagagatgaaccgccgcgccggagcccagggcatcggccgcatcgacctcatcgaggaccgtctggtcggcatcaagtcccgcgagctgtacgaggctccgggtgccgtggccctgatcaccgctcaccaggaactcgaaaactgctgcctcgaacgcgaacagcaccgcatcaagcgcgacatcgacaagcgctggggcgagctggtttacgatgcgcagtggttctccccggcaacccagtcgctcaacgccttcatcgaagacacccagaagtacgtgtccggtgagattcgcatggtcctgcacggtggccgcgccgtggtgaccggccgtcgttccgactcctcgctgtacgactacaagctcgccacctacgattccggcgataccttcgaccagaggtcctccaacggcttcatcgacatctatggcctgccgtcccgcgtggccgcagcccgcgacgtcaagttcggcaacggcatcgaggtcccgaagaacaccgtcgagtaattcttactcagtcgcccccgctgcgaggctgtcggcatagctgactgggagtggtctttgaaaggactgtcctcagtcacactccatgtgacagccctcgccagcgggggcaactgtatgtttgaacacattgctacgcttaaacacagctattttcacttttcaaggagccttcatgactgagaacaacgaacatctggccctgtggggtggtcgctttacgtccggtccgtcgccggaattggcccgactgtccaagtccacgcagttcgactggcgcttggccgacgacgatatcgccggttcccgcgcccacgcccgtgctctcggccgtgcgggacttttgaccgccgacgagctgcagcgcatggaggatgcgctcgacacgctccagcgtcatgtggatgacggctccttcgcccccatcgaagacgatgaggacgaggccaccgccctcgaacgcggtctgatcgacattgccggcgacgaactcggcggcaagctcagggccggccgttcccgcaacgaccagatcgcctgcctgattcgtatgtggctgcgccgccactcccgcgtaatcgccggactcctgcttgacctcgtcaacgccctgatcgagcaaagcgaaaaggccggccgcaccgtgatgccgggccgcacccacatgcagcacgcccagcccgtgctgctcgcgcaccagctcatggcccacgcttggccgctgatccgcgacgtgcagcgactgatcgactgggacaagcgcatcaacgcctccccgtacggctccggcgcactggccggcaacacgctcggcctcgacccggaggccgtggcgcgtgagctcggcttctcccgcgtgaccgacaactccatcgacggcaccgccgcacgtgatctcgtggccgaattcgcgttcgtggccgccatgaccggcgtggacatctcccgcctgtccgaggagatcatcatctggaacacccaggagttcgccttcgtcaagctcgacgacggctattccaccggctcctccatcatgccgcagaagaagaacccggatatcgccgagctcgcccgcggcaagtccggccggctcatcggcgatctgaccggtctgctggccaccctgaagggcctgcccaccgcctacgctcgcgacctgcaggaagacaaggaggccgtgttcgaccaggtcgatacgctcgaagtgctgctgcccgccttcaccggcatggtcaagaccatgcacttcgacagcgagcggcttgaagaggaagccccgaccggcttcgcgctggccaccgacatcgccgaatggcttgtcaagaacggtgtgccgttccgccatgcgcacgagctctctggtgcctgcgtcaagctcgccgaaggccgcggccaggaactgtgggatctgaccgacaatgacttcatcgagaccttcgccgcgttcctgccggccgacaaggctccgggagtacgcgaagtgctctccagccacggttcggtcgactcccgcaacggcaagggcggcaccgcttacggtcgcgtgcgcgagcagatcgccgacgccaaggccgaggtcgaagaactcaagctcttccccgcatccacgtcggatggctccgcctacaaagcccccggcacgttctagtcccaatagagctccctcgtcagagggagctctattttgctgttgtcactgcaacggcatacactgagaaatcgtaacgaacgggagccgtgaggctgagaggaagtcgccagacttcgaccggggaacttgacgcgggtcatgccgccgtaaggaatcgttgttgcagatttgccgggttctccgatacagctttcattccgtttgcataattcagccgtgagacggtcgtgatggagccaatacatcacagcggtcgaacggtcgcatgattgggttcatgaatgggcgcaccacttaaggtacggttcgtttcgtgcacccttttttactatctgaaaggatattatgcaggtcaacggagagcaggtcacgctcgagacgccggtcagcgtcgccgattatctcgaagcgcacggattccgcgccgagcgtgtggccatcgaactcaatggtgagattatcccgcgcgataagcgtgccgacgccatgctcgacgaccagtgcgtcatggaaattgtgcagtttgtacagggtggatgaaaggaaaagctatgagcaatattaatccggttactgaagcatctgttgaggcgactccgctgccgccgcagcccgccgtcaccaatccggtcggtaccgccgcgccgattctgccagtggaagacaagccgctgaccctgggcggtcacgagttccagtcgcgattcattctgggctccggccgctacgacctgaacctcatcaaggccacggtcgaacatgcaggcacgcaaatcgtcaccatggcactgcgccgcgcgcagaccaccgagaacagcgtgctcgactacattcccgaaggcatcacgttgctgcccaacacctccggtgcgcgcaacgccgaggaagccgtgcgtatcgcccgactggcacgcgaagtgtgccacaccgacttcgtcaaggtcgaaatcgaacacgagaccaagtacctcctgccggacaacgccgaaaccatccgagccaccgaaatgctggccaaggaaggcttcgtggtcatgccctacatgttcccggacccgattgccgcacgccagctggaggaggccggtgccgccgccgttatgccgctcggttcgctgatcggctccaacatgggcctgcgcatgcgtgacttcatcgagatcatcatcgccaatgcgcatgtgccggtcatcatcgatgccggtattggccgtccgagccaggcctgcgatgcgatggagatgggtgcggatgcggtgatggcgtacacggccgttgcctctgctggcaatatcccgctgatggctgaggcgttcaagcacgccatcgatgctggtcgtgcggcgtatctgtccggtctgggcaaggtgaccgagggacaggccgtgccgtccagtccgactacgggatatttgcactgacacttttattagctcccctctctgaggggagctggccgcgtagcggactgaggggagctggaaacatggagaaaacatggcattgactgatgaacaggtggagcggtacgcgcgccatctgattttgaaggggctgggcgtcaaagggcagaagcggttgttggcctccagcgtgctcatcattggagcgggcgggcttggctctccggccgccctgtatctggcggcggtcggcgtcggccatatcggactggtggacggcgatgtggtggatatgagcaatctgcaacgtcagatcatccataccactgcacgtgtcggagcgcccaaagtggaatccgcggccacggccatccgcgcgctcaacccagatgtgacggtcgacacctactacgagctcgtcgatgccagcaacatcgccggcctcatcgaaccgtacgatctggtgatcgatgccaccgacaacttcgccgcaaaattcctcatcaatgacgcatgtgtactggccggcaagccgtatatccatgcgggcgtggtcgggttctccggccaggtgatgaccgtcatcccaggcgaaggcccctgctaccgctgcatcttccgcgatatgcccgccgcaggtgaaattccgacctgcaaggaggccggcgtgctgggcgcggtggtcggtgtgatcggcagtctggaggcgactgaggccgtcaagctgattgccggcgtgggggagccgctcgtggctcgtatgctcactgtggatgccctgaccatgaacatccgccgtgtgccgttgccgaaccatgtgcccgactgcccggtgtgcggtgagcagccgaccattactgctattgatccggccaactatattcagccggcctgcgcgatttagagctatgtggcacccctccttgaggggagccaagatcggaacgagaggggaagaacatgcctattgctttgcgtaatgcggtcgatgacgatgagagcagtgaagcatcgtaccgccgcatcacgccggcggaatttgccaagctcgacccgaatacggtcacgctgctcgacttgagggaaccagccgacttcgccgcccacccggtcgaaggtgccatcaatgcaccactcgaccctctggcccatgtgctcaaaaccgtgcccacagatcgaactgtcgtagtctattgtgctcaaggatggtggagcgaggaagtagctgaaatccttgccgatcgcggttacgatgtagcaagcctcgatggcggttttcagggttatctcgactatcttgaaacccaccacgattaacggttcccgttgtcgttcttttggatgagtgtgcacggacatacgtgtgccctacaatcggtcacggtattactcgatggattcttgaatatcgtcgggtaatcgtaattcacaacaagggattgcactgaaccaacccgaacggagggtcgaaaccgtgggacatctgctcacccgaacgcagattcaacgcctggtcgccaagcacggccgtgaggtcatcgagcatcgccacatgcagatcgaacgctgctgctaccagcacggcaacgtcaccacgttcgaacattccgtgcgtgtcgcctgcctggctgtgtggatggccgaccgcgcgcacctgtggtaccgcgtcgacctcaaatccctgattcgcgcggccctcctgcacgattacttcctgtacgactggcacgactgggataacggcgaacaccagtggcatggcttcacccatggccacgccgccctggtcaatgccctgaaggacttcaagctcaacgatatcgaacgcaacagcatcgagaaccacatgttcccgatgaccctggtgccgccgcgctatatcgaaggctatctggtcaccttggcggacaaatgctccgccaccgccgagaccttctcgttcgaccggttcaacaagcgcgcgttgcccgccgcgaagccctacgccgagatcgaagcccgtcgatgatcatcacactcgaacattatttcctctggtttctgttctacagtttcgtcggctggatgtacgaatccattctcgtctcctgccaacagcaccgcttggtcaaccgagggttcctcaacggcccgctgtgcccgatctacggcaccggcgcgatactcggcgtcgccattctcggcaacgtacataacccgatcatcatcttcctgatttcgatggtgggcgccacgatactcgaatacacaacctcgtgggtcatggagcagctgttccacgcccgctggtgggattactcgaatttccgcttcaacctccaaggccgcgtctgcctgctgggcgcgttgatcttcggtctcggcggcgtgggcgtggtacttggttcgcagccatatgtcgagcgggtcacggatatgattccgctgccgatgctgcatacgctggtcacggtcctggccctgatcaccatcatcgacttggcggtcacggttgcgggcatgctcggattcgagcaggtgctcgattccgtctctcaggtggtgcaggatgtggcggcacgcgccggtggcacgtggcagtggggctcccgtgcggtatccgacaggatgcgtgagctttcgcaggatacggttgagcgtctgcgctgggccatcaatggcgtcatcaacgcacagcagaagcgtatgctcaagtccttcccgaagttccaggtgccggatcgtcaggacatcatcgactctttgcgcgaacttatgggcccgcgccgctagaataaggcgttttactgaatcgcgcggctcggctggtgttcggcactgtcgccatgttctgcgaaacttgactgtgcccaattgggcagtctcattcacaattcgatagggagaagcgacaagctatggctcacgtcaccgacttcaaggaagcgggtttcaacaccctgcttgaggaactggaatggcgcgggttgatttcccagtccacggaccgggatcgactcgcagaagcactgaacggcgagcccatcacctattattgcggcttcgaccccaccgctgcatcgttgcatatcggcaacctcgtgcagctcatcaacatgcgtcacctgcagcttgcgggccatcatccgattgctctggtcggcggcgccaccggactcatcggcgacccgcgccagtccggcgaacgcacgctcaacccgaaggacgtggtggccggctgggccgatcgtctgaagaaccagatcggcggcattctggacaccgaaggcgcgaacgccgtacgtttcgtgtccaattacgattggaccgcctcgatgaccgtcatcgacttcctgcgtgacgtcggcaagaacttccgtctgggcaccatgctcgccaaggacacggtcgcccgccgcctgaactctgaggaaggcatctccttcaccgagttcagctaccaggtgctgcagggcaacgacttcctccacctgtttgacgaataccactgcacgctggaactcggcggctccgaccagtggggcaacctcacctccggcctggacctgatccacaaggtgcgcggtgtggacgtcaacgtgttcaccagcccgatcatcactgatgcttccggcaagaagttcggcaagtccgagggcaacgccgtctggctcgacgccacgatgctcagcccgtacaagttctaccagttctggatcaaccgcccggacgtggagatggaaagcctgctgaaggcgttcaccttcctgcccaaggccgaaatcgaacgattggtcgaggaatccaagaccaaccccggcaagcgcgaggcccagaagacgctcgcctgggaggtcaccagcttcgtgcatggcgaggccgctacacaggctgccatcgatgcttccggtgcgctgttcggccgcggtggcaacctcgaagacatcgacgaggaaacgctggaatccgtgctcgacggcttcaaggtggtcgacgagaacggcgagcacgccttccccgtctccaagccgggcgatcgcgtaatcgacgccgcccaggctgccggactgttcaagtccgcttccgaggcacgccgcgccatcaagtccggtggcgtgtatctcaacaacaaccgtatcgaggatgaggagcaggtgctggccgaagccgacttcctggccggccgcttcgcgctcatccgtcgtggcaagaaggcgctcggcgccgtggaaaaccgttaatcaacaacgaattaaggaaaacaagtaatggcagaaggtaacgagcgttccggcaagtcctacggcggcggccataaggggtatggcgatcgccgaccgggcaaccgcggcggcaagggtttcaagccgcgcggcaagggcggtttcaagccgcgtcatgacggtgaaggtttcaagccgcgccgtcgtgaggatggcgaaggctacgcgccgcgccgtgatggtgatggcgagggccacggcggctaccgcaagtcgtacggcaagggtggcgacttccacaagggcggccgctctggtttcggtggcaagggcggctatcgcggcaacggtccgcgccgcgatggcgatggcttccgtccgcgccgcgaccgcgatggcgagggcttcaagccgcgccgccgtgaggatggtgagggttacgcgccgcgccgtgatggtgatggcgagggccacggcggctaccgcaagtcgtacggcaagtccggtggcttccacaagggtggttaccgcggcagtggtccgcgccgtgacggtgaaggtttcaagccgcgccgcgaaggcggctaccgttcccacgaaggcgagaacggcgagaacccgcgctaccagcaccgtgacaacgatcgtcgtgatttccgtcgcgatgatcgccgtgacttccaccgcgatggtgagcgtcgtgacttccgtcgtgacaatgatcgtcgtgacttccgccgcgatgaccgaagggataacgatcgccgtgatttccatcgtgatggcgatcgccgcaacttccgcagggacgaccgccgcgacaacaaccgtcgtgacggcgaattccgcgagttttcgcaggaagagaagcgccagtaccgtgaggagaagcgctctgaatacatgaggcgtccgcgc

SEQ ID NO: 858 - DNA, 5724 bp, Unknown
  R14_18m  MAG No. k141_12654
gacgatgctgcaaccatacggcgtcatacccgcatgacgtgagttacactatgtagtaaagttatttactgaaatactgcgtattgttacgtactgaggcgtggaaggctcaactatggtcacgatgaaggaaatcgcacagaaatcaggcttctcgcaggccacggtatcccggctgctcaatggggacccgacattgtctgtcaaagaggagacgcgacgtcgcatcatcgaggtcagcgagcagcttggctacgctaccggatcacgccgtatcgcattgccacgccgtgtggccgtactcgacaacgccacccgcgaggaagaactggcggacgcctatttcgatgaactacggtccgtgctcggcgacaatgccagagcccagcacatggaactcacgtcgttttcccatatcgacgatctgattgccgacgccggtgatttcgacggcttcatctccatcggaccgtccgtactctcttcggatagactgttgaagctccatctggtattgccctatggcgtattcatcgacaccaatcctgcgcccagcctgttcgattcggtacaaccggatttaagccaaaccattttggacgcattggatatgttggtgtcctcgggcaaacgacgcatcggctatatcggcggtactggcttcacgatgggtttgcacgaatatccggaagacggccgattaaccgcattccgcaattggaccgagcgtttggggctggatgcggaaggcctgatttacgcgcaaggcgcgttcactgtggacaccgggcgcactctaggggaggaagcggttaacgatcatcgagatgacatgccggatgcgttcatcgtggctgcggactcgattgcagtcggcgtactgcaggcgtttaccgctgcgggagtgctggtgcctcgcgataccagtgtgatcagtatcaataaccaggccatcgcccagtacacttcgccgacattgaccagttacgatatcgaccagaatgagctggccgatactgcgattacgatgcttgccgaggccatctccagtcggcgcacgctgcaccaccataccttcatctccaccaccctagtggtgcgtgacagtttcgtaccagcacgataaagaagctccctctgtgcgataaagaagctccctcgtcagagggagcttctttatcgctgttagaacagttccagattcacgtcgagcgtgtaggcgcgatcggcgggcagctggtactgctcatggacgggcgcgccccatgaatcgtctccgcccacgcccatttgcgcggccaacaggcgcaggaacgtgtgacggaccggcggcaactcgttctggtgggtcgcctcttccagcatgagcgagctgtacggcaacaggctcgccgcgaaatgttcgctgccggcctggctgatacgcatgccgtgtccttgggcgtcaagcacttcggtccaacgcaagtcttcatggttgccggtctcctgcggcaccagatacggtgcattgtcttcggccgcggtgtgctcgaaaatgccgagcttgccaccgtgcagacggtcgtgataggtttcctcggggccaaggccgtagaagcgcaggttctcgtactgcttgggaagtgtccattccaatccgaatgccggcagcgtcggcgcatcggtggcaccggcatatcgggcggtcagatgtacacgtccgctggcggcatccacctcatagcgcacggcaacttgggtttcgcccggttcggccaacgtatgacgaatgccgccaacgggcaccaacctcgttgacggcattcgtctttccaggacaccgcaatcgcggatgcatgccgtttacgcgttgaatacgtattggtcaaggcggcgcatggcctccttgacgcggctcaagggcaatgcgagattgacgcggatgctgtagggggcctggaacatgctgccgtcctgccaatcgacgcccacatcccaaccgcgtttctccaactcgggcaggctcaggccgtggcgttcgcaccactgctcgcagtcgagcagcagcatgtaggtgccttccggtttggccagactcactccttggaaatgcttggtgatgtagtcgtaggcgtaatcgacgttgccggtgagcaccgccttcagttcgtcgagccactcatggccttcgggccggtaggcgccgatcagcgcgtgcatggaaagcacgttcatgtcgttgtagtggcatttcgagcttttggccacgatgcggtcccggagtgtgggattgtagatgatgtggtagcttcccaccagtccggcgagattgaaggtcttgctgggcgcgtagaacgccacggtcctgttgcgtgcgtcctcgctgaccgattgggtggggatgtgctggtggttccccagagtcaaatcggaccaaatctcgtcggaaatgaccacgcaatcgttggccttgtacacttccatggccttctcgatttcccaacgttcccacacgcgcccgcaaggattgtgagggctgcagaacacggccacgtggatgtgatgctccttgagcttcctgtccatatcctcgtaatccatgcgccatacgccgcgctcgtccagcgtgagcggactgtggacgatgcggtagccgttgttttcgatgctccgggtgaacccgatgtaggtcgggctgtgcagcagcacgccgtcgccgggggcggcgaacgcggtcagcgcactgatcacaccgcccaggaccccgttctcgtagccgatcgcctcccgggtcaatccggtgaccccgttgcgcgtggactgccagtcgatgatggagctgtaatagtcgtcggtgggggagaagtacccgtaggcgggatgcttcgcccgttcgatgatggcctgcggaatcgtgggcacggtcgggaagttcatgtccgccacccacatggggatgacgtcgaaaccctcgcgtggcgggtccggcgcgaatcccgggtcggtgcccagtccgtcgaccgcgatcgaatccatgccatgcctgttcatgatggacgtgaaatcatacgtcattgtccgacaatcctttctcggtccgtggtggccggtcccaatctaaatcgggctcctgacggtgccgtggccgtgggcggcgatttgaccgcgtggcgtgttaggatatgcaccgttatgaggcagtgatccgttatcagcggggagtcttcggaagaacggcggcaatcgcccagtagaaccgacgggatcggcccgagacagccgaacacaagcggtcgcgcaggctcgcggctccgagtgcaacagttcggagcggcgcaaccggtgcgataagcgaggtggtaccgcggtgcggagcgcataccagcgctcgtcatcgtcctcgtaggcaggaacggcagacatggctgttccgggcggaacacagtcggttccggctgcgaggcgattgactaatcggcccacggttcggtacgtgacattcgtgaaaccagccggcacacgtcggcgcccggcaatcgccatcaatgacgctcctgtaggaccagtgcacagtactaacaggagatttacggtgagcgaaaacgtatatcccaaggcgagcgagggcggcgagaccgcgcacgtcgcgccgaaccccagcttccccgacatggaggagaccgttctcgactactgggacaaggacgacaccttccagcagtccgttgaacgcaacccttccggcgaccacagccagaacgaattcgtgttcttcgatggcccgccgttcgccaatggcctgccgcactacggccacctgctgaccggctacgccaaggacgtgatcccgcgctaccagaccatgaagggccgcaaggtcaaccgcgtgttcggctgggacacccacggcctgcccgccgagcttgaggcgcagaaggagctcggcatcgactcggtcgaccagatcgagaagatgggcatcgacaagttcaacgacgcctgccgcgcttctgtgctgaagtacaccaacgaatggcagaactacgtgcatcgtcaggcccgttgggtggacttcgagcacggctacaagaccctgaacatcccgtacatggaatccgtgatgtgggccttcaagcagctctacgacaagggcctggcctaccagggctaccgcgtgctgccgtactgcccgaaggaccgcacgccgttgagtgcgcacgagctgcgcatggacgccgacgtgtaccaggaccgccaggacaccaccgtatccgtggccgtcaagatgcgcgatgaggacgacgcctacgccgtcttctggaccaccaccccgtggaccgtgcccaccaacttcgccatcgtggtcggcgccgacatcgactacgtcgaggtccgcccgaccgaaggcaagttcgctggcaagaagttctacctcggcaaggatttgctgccgcactatgagaaggaactcggcgagaattacgaggtcgtgcgcgaactcaagggcaacgagctggcaggccgacgctactacccggtcttcccgtacttcgcgggtgacgaggccgaatccgaaggccacgtgcccggcccgaacggctacacgatcttcaccgccgactacgtcgacaccgtcgaaggtaccggcctggttcaccaggctccctacggtgaggacgatatgaatacgctgaacgcgcacggcatcaagagcaccgacgtgctcgacgacggctgccgcttcaccgcgcagtgccctgactacgagggcgatttcgtgttcgacgccaacctgccgatcctgcgcaacctgcgcgccggtgacggcccgctcgccgagattccggaagagcgccgcgcgatcctcttccaggagaagagctacgtgcactcctacccgcactgctggcgctgcgccaccccgctgatctacaagccggtctcctcctggttcgtgtccgtgaccaagatcaagccgcgtctactggaattgaaccagcagatcaactggattccgggcaatgtcaaggacggtcagttcggcaagtggctcgccaacgcgcgcgactggtccatctcccgcaaccgcttctggggttccccgatcccggtgtgggtgagcgacgatccgaagtacccgcgtgtggacgtctacggttcgctcgaagagctcaaggccgacttcggcgactatccgcgcgacaaggacggcaacatcaacatgcaccgtccgtggatcgacaacctggtccgcgtcaacccggacgacccgaccggcaagtcgcacatgcaccgtatttccgatgtgctcgactgctggttcgagtccggttccatgtcgttcgcgcagttccactacccgttcgagaacaaggagaagttcgaacagcacttcccggccgactacatcgtggaatacatcggccagactcgcggctggttctacctgctgcacgtgatggcgaccgccctgttcgaccgcccggcgttcaagaacgtgatctgccacggcatcgtgctcggctccgacggccagaagatgtccaagcacctgcgcaactacccggacgtgaacggcgtgttcgacaagtacggttccgacgccatgcgctggttcctcatgtcttcgccgatcctgcgtggcggcaacctgatcgtcaccgccgaaggcattcgcgacaccgtgcgccaggtcatgctgccggtgtggagctcctactacttcttcaccctgtacgccaa

SEQ ID NO: 859 - DNA, 11751 bp, Unknown
  R14_18m  MAG No. k141_12762
accccagtattcccggtcaaacgtttcgccgccgtgtctgcacagaacgtgaagaacgtgcagttcgattacacgaacatgcccacgtacaacacgatcaccaagtagcgcgcactgccgcactgatcggcggcacttgccgcatacatgaatggccggtgtgctgcggattccttaccaagaatccgcagtacaccggccattatgatatatgccgcaatacaggggggcaatcagccctgcaccttaccgccttgcgcgctacggtatccgaagttcatcatctcgctgttgtaggcgaccacgccacggccgaccgccggcagaacgatcatgccaccatcgccatgatgcgcggcgacttcgtccaaagtggccgtcgcggcatcctcgacgttctcgccggcgaaacgcacacgatccgacacctgatgggcggcgaccaccttgatgaatgcctcgccgatgccggtgcaggacaccgccaccgtggactggttggcgaacgtgccgcaaccgggcagcggcgaatcgcctacacgaccgtgcatctggttggtgatgccgccagtggacgtgccggcggcgatattgccttcggcatcgcgcgccacggcgccgatggtgccatgcttctcccactcatcgccaccggactgagcctcggccaaggactgacgacgctgttcggtgatgaagtactcgttgctttcggtcgcgacgccccaatcggcgatctcggcatcggtcgggtccgcgaacagcacatgcttggtctgctctttgacggcacgcgccgcatcgatcgggttcttcacggtgcttacgccggtgaccgcaccgacctcgccatcgccggtcatcaggcaggcgtccatctgggcgatgccatcgctggtcagggcggcaccacggccggcgttgaattcgggagcgtcttccatgacgtggatggcggcgaccacagcctcatgcgccggtgctccggattccaacaactggtatccggcatcgagggcgcgctgcagatcaagttcgacctgggcgatgcgttcaggcgtgctgcgcttgccacgactgcccgctccggcgtgaatgataagcgtgatgccggtttcgctgcccgccagttcagtggtcaccggagaaacggaggatgtggtcatatcgtgtccctttctggagtcagatggatgtgctgacgccaacgtatcgttgcttccgcatgtatgatagccgttgatggccgcgaccggttccgcatttcgcatcatcggctcgcgatggcgtgactcgttactgcgccacctcgccactacgccaggggcaatgcgatgccggctcgatcggccaggtcacgcaacgaccacgtggtctgccccgttcgcccgacaacgctatgcgcatgccacagcgaactgatgatggcttcctcgcttattcattcgtcgaatgcacccatcgatgtgggtatgcagccatcaaaaaactcgacaaccgcaatgagccagtcacttggctacatctgtgctatcgtctcgccaatgattcgaatgccggtatcaatgtcagcagcatccgggcgcacaaagttgagacgaatatgggaatcatccatttcgtcaacgtcgaacacgctgcccggcatgaacgtaacgccttgggaacggcaggattccaatacatccagagagcgcacgccgtccggtaaggaaacccaaatatagtagccgcctgcaggcacggtccaatacacttcatccggcgcataccgctccaatgctgcgattgctgcatctcgtcgaatgcggtaagtcttgatcaaaccgcgcaaatgttcggcgatgcggccttctttaagcagttccaggcagatgcgctgcgatgacgtgctcgtatgctggtcgaccatgcgccgcagagccgccagccggttaatcacatgcgggtcggccacaacccatcccgtgcgcaggcccgaagtgacggttttcgagaacgtcgacaaatacatcacgtatcccgcattctccatgcccttaagcggtatggggcgatgtgcgtcggacgattccccgccgtaccacaaatcgccgtaagcatcgtcttccacgatcagacactgatagcgccgcgccacgtcgatgagttcgctgcgtcgttcgggcggcagcgtggtaccggtggggttttggaatgtcgggacggtgtagatgagcttgggccggaatcgcgcgcaatacccatccaacaggtctgtacgcataccgtgctcgtccactggaacgccgatgatgcgcgcatccgccgagcggaaggtctgcaatgccgggaagaacgtggattgttcgaccagcacgcagtcgccggggttgatgaacgcgcgcacgatgaggtcgatgccctgctcggagccggagagcaccatcacgttgcggacgccgcattgtacgcctcgtgtgcgcatatgttcggcaagcagcgcacgcaactcttcgaatccctcgataggtgattccggttggccgtcgaattcccgcgattcgaacgcctcgatgctcaccttgcgcagcagatcgtccgggatatccgccgggttcggcgaaccggtggcgaagtcaataatggtgtcgccgcgctgcgcccgctcggccgaggcgatgtcatggtaggtaaaccggttggaataatcagagaacaacaccgaccatggcggacgcacgacggttggctccgggccctgaaccgagcggctttcacgaatcgtatggaccgccgcagagctgctgccctggtccgtcgtcaagaaaccagtggaggtagcacgttctacgtcgccggaagaggaggcttgcgatgttcccatttctgccgacgatcgtgttgttcgcgttattgcattcccgaagtcactgtttgacgtgtgcggtgttcggcttgcggaggcagccggcagcacgaacgtgcctttgccgactttggaggagataagaccttcgtccttgagctgctgatacgcctgcaacaccgtggtgcgattgacttcgagacgcgaggacagctcgcgttcgggaggcaggcggtagccctcggccatcgcgccggagacgatctgttcacgcagctcggcagccagctgccggtacatcggcaccttgctgcgtcgattcagctcaagctgcatggcagatcgtctccttgattcgtcagtcggataccagtctaacggcagacgaatcgactacagcgacaggaagagctcgtggatgcgggtatcgtccgtgagttccgggtggaaggcggtggccaggatattgccttgacgcaagcccaccacgtggccatcgacttcggtttcgaccgtggcctcagggccgaccgacaccacgtacggtccgcggatgaataccagtgggaagtccgtgatacgctgcggatcatccgctgcaccaaaatcggcggtggcctggaaactaccgagctgacgaccataggcgttgcggcgtacgacggcgtcgagcgcgccaaagtagacattgtcgtcattgtcgagctttttagccagcagaatcatgccggcgcaagtgccgaataccggtttgcctgccttgatgtgggcggcgatcggctcgaacagtccggtcgaatgcaggagcttgccctgtgtagtggattcgccgccaggcagaatcacgcggtcgatggattcatcgaaatcctcggccgcgcgcagcagtttccacggcgcaccgagcttgtccagcaccgccgcatgttcggcgaatgcgccttgtacggccaggatgccggtcacgccgtgcttgacgttttcgacgtccgcggactcttctttggaaatatattcaacagctacaaccatgttgtcctctccggcttcgactcccgtcactcgccgcgagcggccatgatggtctgaatctcgtcctcgttgatgccgaccatggcttcgccgaggttttcggacagcttggcgagcagatcggcgtcctgccagttggcggtggccttgacgatggcggcggcgcgcttggccgggtcgccggacttgaagatgccggagcccacgaacacgccttcggcaccgagctccatcatcagggcggcgtcggccggggtggccacgccaccggcggcgaagttcacgacgggcagacggccgttgtcgtgcacgtacttggccaggtcgtagggcacggccagctgcttggcggcctcgtagacctcgtcgtcgcgcaaggccacgagctcgcggatctgcttgttcatggtgcgcatgtggcgcacggcctgaatcacgtcgccggtgccgggctcgcccttggtacgaatcatggcagcaccctcggcgatgcggcgcagcgcctcgcccaggttcttcgcgccgcacacgaacggcacgtcgaactggttcttgtcgatgtggtacacgtcgtcggccggggaaagcacttcggattcgtcgatgtagtcgatgtcgatggcctgcagaatgcgggcctcggcgatgtggccgatgcgcaccttggccatgaccggaatcgagacagcttcctgaatgcccttgatcatggccggatcgctcatacgggagacgccgccggcggcacgaatgtcagcggggatgcgctccagcgccatcaccgcgcacgcgccggcatcctgcgcgattttcgcctgttcgggcgtggtgacgtccatgatcacgccacccttgagcatctgggccagattacggttgagttccgcacgattctgcgtcatgagtttcccttcgttcgacgctgcttggtatcgcgcttcattattgaacggattggattggccccacccaaaccagtccaatttggatggggccaatctgcaacttctgcacccatccaatccggcaaccggttgtatggccttatgcatccggcacgtattcgaagatgcgcgcaatcagtgggaggtattagccgacggtgttgccgtagatttgggcttggaggtctttacgggcggtttccatgcgggtgatctggccgaggagggttatcttctcttcgccgtcgggcagctgggccatgcggcgtttggccaagccgatctggcgcatgaagcccatgtccagtagccgggtgagcagttcggtggcatagcgctgctcttccggcgtggcagggcgtagctgtactgcggcggcaccgccattcacgccaacacctcctcccgacacgttggcctgcaccggctgcgcaccgctaccgatgtcgtcgccaggcagtggcaacggcatgacggccagctcgttgatcacctgattcagcatcggcccgccggccttggtgaggttgtgcatccacagcccctgcggggtatcgtcggatggcagtccgccggcggccgcgatcgcctggaacagggtgcggaacaccgaagtcatgaaatggtcgatggtcagctgcccgaacatggtgcggtcgatggcgcgcggcacctgaatcagcacggccatgaactgctgttcggcgatgaatacggcgtcgtcgatcttgaaatatgcctgttcggcggcgtcacggcgctccaacgccttgcgcgtggccggattggcgtatgggttggtgccgggttccacacgcggctcgtcacgctcgaatcgacgtttgggcgtgtaggcgtcctcatcgcgtacatgcatctgccggcgcgcgttcatcacctcgcggcgcatcacctcaagatccacgccgatacggcccgcggacttgcgcgcgtaagcgtcccatagggagcggtcgcgaatctgcgccaccagcggggccacggctttcatcgcacccacttggccgggcgtgtaggtcaggtcgaaccggccgatggcggcgtcgatcacgaagtcatacaacggtttggcgcgggcgatcagcgagcgcaccgcctcgttgccccgttcgatgcgcaggtcgcacgggtcgagattgtcgtcggccacggccacgaaggtttgggagaggaaggccgaatcaaggccgaaggcatgcagcgcggctttctggccggcggcgtcaccatcgaacgtgaacacgatgcgcgagctcaacggctggtccttgaccttcaacggcccgaccagctggaccgcgcccagcgaatcgtcggcgatcaggcggcgcacaatcttggcgtgctcggcgccgaacgccgtaccgcacgtggcgatggcggtgtcaatgccggccaagtgcatggccatcacgtccgtatagccttcgacgatcaccacctgtcgcttcttgacgatggcggatttcgccaaatcgatgccgtaaagcacctgggttttgcggtagagctgcgtgtccggcgtgttgatgtatttggcggcgatctgatcgtcttcgtatagtttgcgcgcgccgaagccgagcgtgcggccggtcgaatcgcggataggccacgtcacgcggccgcggaaatagtcatagatgccgcgctggccttggcgggccaagcccgcgtcgaggatttccttctgcgtaaaccccttggaggccaagtggcgcacaagattatcccaaccttggggcgcgtagccgcaaccgaaacgttcgcagtcggcttgggagaagttgcggcctccgagcagcttgcgggcgggcagtgcttccttggtcaggatctgggagacgaagaagcgttgggcttcctcgcaggcttccagcagtcgggtgcgcttggagccggtgttctcgcggttcgggccgttgccgctgttctcgtagtgcagctcgatatggtacttgtcggcgagcagttccacggcttcgcggaagtcgatgttttcggattgttcgacgtatttgaatacgtcgccacccaagccgcagccgaagcagtgccacacgccgagtgaggggcgcacgttgaagctgccggttttctcgtcgtggaacgggcacaggcccacgaaggtgccggtgccggagggcttaagcgttacggtcgcagatacaatgtcatacaggtccgcggcggcgcgcaccttctcgacatcctctttcttaatcattccgaccataagtctctagagtaccgcctcacctgagacacggtaaatttttaccgtcggttatcatttcttccgcgaaactcccttcagtcgcctacagcgacagctcccctcacccgaggggagctggctcgcgcagcgagactgagggaagcacccgtccaacacgccctcagcacaagatggagtgcagggccagagcggagttgtcggtcaggcttgcgacctgatcgatggcgacgcgcaggcgctcgttgtcattggtggattcattccaatcggccaggaactggctttccaaagcgtcggatgggagcggcgaatcggccataagcacatcgaccaaatccgatacgatcttgagctcctcctgatggaatggctcgcgctcgcgaggcgccatgacgaagtacacggcgatgcccttcaacgccacgatctcgtaattcgtgtcctcgggaatcacgatgttcgcggaataccgggtcaacggcccgggcccatacgtgtcgcgcgtggcggtttccaccgaccagcagaagcgaccgatcaaatcggacgtgatgttcttgagctgtgccaacgattcgcgcgaaccattgaaatgtgcagggaacaaatgctctcggcgcaatcgcatgaacgcggccagcagcttgtcggcatcccacttcgccccataccatgcgcgcgtctgctcgatgatgtggtccagcatcttcggatcggcgagcacaatcggatcgaacgcgccggtggcgatggaatcctcgacatcatgcacggagtaggcgacatcgtccgaaaggtccatgatctggcattccatgggtttggcggcctggggcgcgccgattttgagccagcggaacaccggttcgtcatccgggtagacgcagaacttcttcgaccgctcccccttggggtgtcggtcggcttcggccaaggtccacgggtatttgacggccgcatccaaggccgcacgggtcaggttcacaccggccgaacgcccgtccgggtgaaagatcttgggttcgagccgggtcaggatacgcatggtctgtgcgttgccctcgaagccgccgatattgctggcgatgtcggcgagcgcacgctccccgttgtgcccgaacggcgggtgaccaaggtcgtgggccagacaggcgcagtcgaccacgtccggatcacagccgagcaatgcgccgatttggcgaccgatctgggcgacttccagcgtatgcgtcagtcgggtgcgggcgaaatcgtcggtaccggcaatcagaatctggcttttcgcgcccaaacgccgcaaagcggacgaatgaatcagtcgcgcgcgatcgcgttcgaaagccgtgcgcgacttggatttgggcggctcgggtgcccaccgctcctcgtcgaaggcgctgtagccctcatcgctcagcacctgttccccatccaacgtcgtttccatatgccaagcataggcacacatatcggccgcagtaatcccgacttcccgaatatgtgccactgacgtcaactcaacggcacatattcgggagattggggccgatttcccgaatatgtgacgctcagcacatgtcagtggtacatattcgggaagaagggattacggggtgccaccgtatggcggtaatgcaccttatagcagcgtggcggggtcgagcttggcgaggtcggcggcgggcagtacttcggcggcatgctcgtaaaggcgcgggatgcggttgcgcaggcaggtgaagatctcgtagctgatggtgtcggcggcgcgggcccaatcgtcggcggtaggctcaacgtaatcctcgccgcggcccgggccgaacagttcgaccgtgtcgccctcgtgaacgccgagttcggcggcggatccgtgcaggtccacgatgaactggtccatgcacacgcggccgcacacgcggtagagcttcggaccttcagtggtcatgatgcgcaccgggccgcccggcttctccacgtgcttggcaccttccatatcgaaaccggaagcggagcggtggatgccatcggcgtagcccagcggcacaatagcggtcgaggtgttgttcggggtcaggtaggtgcggccataagagatgccatggccggcctccacatccttgaccgtgccgagctgcgcctgcaggcgcatggccggggtcagatgccagtcgcgcggggtgcccatcgcgggatcgggctcgtagccgtacaggccgatgccggggcgggtaagttcgaagtgaatctccgggcggtccaaagtggccgccgtgttggccaggtgacggatctccggcggaatgccggcctgttccatgcggcgcgtgaagtccttgaacgttgcgatctgctggtcggtggaggcgacgaattcgggcacatcgggcgaatcggccacggcgagatggctccactgacccacaatatgcaacacgccctctttggcgagcggcacgagtttggcgagcgcggcgtcgaatccagccggcgtgaaaccgttgcgaccgaagccggaatcgaccttgacgtgtacgcgggcgggcttgccgagcttgcgtgcggcggcggccacggcatcgatgccgggcagggagccgaccgatacgtcgatatcggcagcgatcagctcatcgaatggcacttcggtgccgttgtagacccaagtcagaatgcggcaacggtcggggccgatgccgagtttgcgcagcagcagtgcttcatgcgattgcgcggtgccgagccatgtcgcgccgccggcgagcgcggccagtgcggcgggcagcagtccgtggccgtatgcgtcggccttgaccacgcccatcaccgccgtgccggagttcgggccgccgaccacggagaccaggtgggccatgttgtcgcgcatggttttgaggttcacgatggcctgtgcggggtattggcggcgggtggccgcatagttggccttgccctgctcggacgagaatgcgatttcgggtgctgcgttcatgctcataggcacctattgttgcgcaggaatgtgacgtgtggtcacaatcgtttgttttcgcccggcagtcgtacactaatgaccgatatgcggtttctcggaagccgcctttgattcccggcgttgaggcgtgccgggatcccggaaatccgtccggtctagccccatatcttaagtttcatgagagaagaacatggatctgtttcgtaagaaaagcgtggatcagcttgtcgccgaatccactcccctgaagcgcacgatgcgcaccttcgatctgacgatgctcggtatcggcgcgatcatcggcaccggtatcttcgtgctcaccggcaagggcgcgctcaccgccggcccggccctgtccgtatcgttcctgctggccgccgtctgctgcggtttcgccggcctgtgctacgccgagttcgccgccatggcaccggtgtccggctcggcctactcctatgcctatctggcgttcggcgagctcatcgccttcgtgatcggctgggatctgattctggagtatgctctgcaggcggccaccgtgtccgccggctggtccggatacttcaacaagttgttggaaggcttcggactgcacctgccggtcgagctgaccgccgcctacggcaccaacccggacgtcaccacctacttcaacctgcccggtttcgtcatcgtgctgatcatcacgtgggtgctctcgatcggcatcaaccagaccaagcgcaccaatgacgtgatggtgctcatcaagctcgccatcatcgtgctgttcatcgtgtgcgccgtgtggtatgtcaagccgtccaactggcagccgttctccccgtacggcatctacactttccagcccggctccacccagccgtacggcattgtgccggccgcatccatcgtgttcttcagcttcatcggattcgacgccgtgtcctcttccgccgaggagaccatcaacccgaacaagacactgccgcgcggcatcctgctgtccctggccgtttccaccgtgctctacatcgtcatgaccatgatcatgaccggcgtggtgccctacaaggagttcgccaagtacatcgacgccccagtggccggcgtgattctggagaccggcatgaactggctcgcggtgatcgtgaacctaggcgccctcatcggcatgaccacggtgatgctcgtacagctgtacggccagtcccgtatctgctacgccatgagccgtgacggcctgttcccgaagttcttcggccacgtgcacgagaagtaccgcaccccgttcaagggcacctggttcttcggtctgctgaccgcgttcgccggcggcttcatcaacatcaacgtgctgttcgagctggtgaacatcggtacgctgtccgcgttcatcatcgtgtcggccggtattctatggatgcgcaagacccagccgaatgcgccccgcggcttccgcgcgccgggcgtgccggtcaccccgattctggccatcgtattctgcttcgtgctcatcgccggtctcaactgggagacctgggtgcgtttcgccatctggttcggtctgggcctgatcgtgtacttcggctacagccgcaagcgctccaagctcggccttgagcagaaggccggggctgacaccaaggtcgctgcgactgaggactgaggtctatcggctgaccgatag

SEQ ID NO: 860 - DNA, 4443 bp, Unknown
  R14_18m  MAG No. k141_13080
cgtgctgccgcgcaacaacgagatcgaagccatgcgcgagtacgtcggccagctcaaggacaccggcgtggacgcgctgatcgtctctgacatcggcgtgatgatgatggcccgccaagtggctccgaacctggaattgcacgtatccacccaggctggcgtgactaattatcaggctgcgaatgccttctacgagcttggtgctcgccgtgtggtgttggcccgcgagatggacttgcaggccgtgcgtgatattcgcgccaacattcccggtgacctcgacatcgaatgcttcgtccacggtgccatgtgcatggcgttctccggccgttgcctgttctccaactatctgaccggccgcgatggcaatcatggcgaatgcgcgcagccatgccgctggaagtattcgatcgtggaagagaagcgccccggccagtacttcccgatcgagcagaccgagaacggcgcctatctgttcaattcgcaggacatgaatatgctggggcacttggatgatttgattgactccggtgccaccagcctcaaaatcgaaggccgcgcgaaaagcgcctactatatcgccgccatgaccaacgcctacaaaaccgcggttaatgaatacatgattcaacgcggttttgaagacgctgatggcaatgttctgaagcctttccgtgaccgtgtgattcgcccgggcgaccccgattttggccaaggaaccgaagatcaagtgatgagcaatgccgatgccgcgttcgccggtgtggccgatgagggatatgaccgtggctctgatactgcggttgccgattcggtcaccggctcggttgccgcagaacgtgaccgcgtgacggttgctgatgccgccgactcaactgcctctggtacgtcggccggcaccgccgtcgaacccgacggcatgagctcccacgcccgctccacgcgccgcaagtccaacaccgcggtcgaacagatcgagaccgattggaagcatgcggccgttcgcccggccccgcacgtcgaactgcccgaatggctgctcgaggaaaccgacaaggtggcccaccgcgactactccaccggcttctattacccggagcacaaggtcacacagaacaccgaccgctccgcctacttccgctcatggctggtagtgggcgaagtgctgagctggagcgcggacgaaggcggacgtgtcacgctgatgagccgtaacaagatcgagcccggtcaacaggttgaattcctgctgcctggcgagagaccattggtctttaccgtgccggaaaccggcctgcgcgatgccgatggcgcgccagtacccgccatcaataatccggcgcacgtgttctcgatgccctgcccgcaccaggtgcccatcaacgccgccatccgctcgcgcaccaaaaagcccaccctcaaagccgaataacctaccactccgcccccgctgactgggggtggtcatgggaatcatgaacaccgcccgcacccaagaaagaatgccttatgcctgaatacagcgaagaaatcctcgattccaacagcatcagctctaccgataaagccggtcgccctattccggtgaccatccccatcgcactggcccccggcatcaaggtggtgtacaccacgcgactgggcggactgagcaccggcgattacggcaacctgaacctcggcggcaagtccggcgacgaacctgaggccgtgctgtcgaaccgcatcgcactcgccgaagcggtgcaagcccgcctatcgctggtctcccaagtacattccggcgtggctgtggacgtggacgactcgttcgtcatcaacacccccttcggcttcgacgtgtccggcacacatggtgagactgacactccgcacgtcatcgaggcggacggccaggtcaccgcacaatccggcatcgccctaggcatgttcgcggccgactgcctgccggtgctgctgggcgacccggtcaccggcatcatcggtgcggcccactgcggccgtcgtggtctggagcgtggtgtgatcggcgccacggtagacctgatgaagagcaagggtgccgatccggcgaacatcgtggccacactcggcccgcgcatctgcggcgactgctatgaagtgggcgacgagatcgccgaccagttcatcaagcgcttcccgctgaccaagacgaagacccgtttcggtggtgccggcatcgacatcgccgaagccgcgatgattgacctcgccttcgccggcgtacaccaggtggtcgattcgatgccgcgcgtgcacgccgccacccagtaccttgaggaagacccggaactctccgaactgtgccgcacggacggcgaaggcccggccgagctcgcggagcgcatcgacaacatcagccacagcatgtgcacgctcgaaaacccactgtggtactcgcaccgccgcgccgcgctcgccaacaaaacacacgaaggccgcctcctcgccctcatcgtgcgtgactaaacggagaatgcgggcacattccgtggagaagatgtgatgcagttcacggacggccagccctcaccctacggtggtgcctatgactgagagagatttcgatacccccgtcgagacgcctaccgtccaaccagcccccgctcagggcgtcaaaccggcacaaaccgtgccggtggtggccgtggtgctggccgctggcttcggtacgcgcttcgaccccgacaatcccaagcagcttgtctccgtgggcggcaagcccatcgtgtgctggagcattgatgcctttgaacattgcgatcgcgtcagcgacatcgtggtggtggtcaatcccaaggtgcgcggtgaagtggaaacgttggttggcgagatgggctacaccaaggtccgcgtcatcattgacggcggtgacgagcgtgtggacagtaccgccgccgcgctcgacatgctggctacggctggcattccggacgatgccaagattctgatccatgacgccgtccgtccgttcgtggaacagtccgccatcgacggttcgattgatgcgctcgaccagttcacggccgcgaccgtggcctacacctcaaccgacaccgtgctgttgaccgaggatctgggcgatttgaaagtggtcaagtcggtgccggaccgcccgaacaccttccgcgcgcagaccccgcaatccttccgcttcgcgacgattcgtcacgcttacgatctggctgccgccgacccggacttccatcccaccgacgacacgcgcgttgtggtcgattatctgcctgatgaacccgtcgccattgtctccggtgcggaaaccaacctgaagatcaccacgctggaggatattcccacagctgagcgtatcgccgaggagattctcggtcgtgatcccaaggaagaggcccgcgcccgcatgcacgccctgctggcccaagcggccggccagatgcatcgctagactggcattatgcgtgaactcaatgttgtgatctccggcttcgaccactatgacggcgtggaggtcaatcccgccgtcgaagtgcccaaggccatcgccgagcaggggttgggcgtctcctctgctccggacgatccgttggagcaggtcgccgtcaccgtccatgccgtcagcatcccggtgagcttcgccaaagcctggcccacgctgaaagagacgattgaggccgccaagcccaatatcgtcatcgccaccgggctcaagcacgcagcccgaggcgtgatgcttgaacgatgcgccaccaacctgatggacgcgatcaagccggacgcggacaacgtgaccccacgccgcgaacccatcgaccccaatggcccggccgcctattggacccgcctgccgttgcgctcgatcctgaatgatttcacggacgattcgattccggccaccctgagctcggacgcaggcacgttcgtatgtaattcgctgttctacaacttgctgaactggaccgccacccaggagcgggtgctgggcggattcgtcagcttcccgccggtcgtgccggcggattccagccagcatggtctgccactcgaccagcagatcgccgctggccgtgatgtggtgcgcgaagccgtgcgctactatctcaagccctccagctccggcatcctcatcgcctagcacgctgcgcgccacgccggaatagaacatggttcgcacgcattgtaacgattgcgcgtcactcaacgcccagcgctagtgcgatgcgctacagtgcttcaaggatgtgccaagagctttatgcgtgtgcgaaaggaataaacagcgatggtggatcgtttcccggtggtgctgcgaggatatgacaaggagaaggttgatgctgccttcgacgctactcaggagagtgtgaagcgtgcgcagcagacgttggccagcatgcgtgagcagattgcggcggatgacgaccgtattctgcaactgcaggccca

SEQ ID NO: 861 - DNA, 8508 bp, Unknown
  R14_18m  MAG No. k141_13308
cattcgacgagcgtatcgtgcgctttcctgtattcctgcagttccttgatggtcaggagcgggatctgatgctcctgggcgaaccgggtcaggtcgggggtcctcatcatccggccatcgtcgtccatgatctcgcagcacaggccgcattcacgcaatcccgccaaccgcatgaggtcgacggtcgcctccgtgtgcccgttccgttccaggacgccgcccttcttcgccaccagggggaacatatgccccggtctgcggaaatcgaggggttccacgtcatcggagacgcacatgcgagccgtcaatccccgttcttcggcggagatgccggtcgtggtgccacggtaatcgatggacaccgtaaaagcggtttcatggttatcggtgttgtgctcgaccatgggcggaagcatcagcttgtgggccagttgctcgctcatgggcatgcagatcaatcccttggcgtgggttgccatgaaattgacgttccatgtggtggccgactgcgcggcacagatgagatccccctcgttctcccggtcctcgtcatcgatgaccagaacgagcttcccttcccgcagcgcctgcaacgccgcttgcaccgactgatggttcatgattcatgcatcctttctcagaacccgcaccgggacagcagatcctgcgtcagtcccgtccgggtcgtcatcatgttccgcacgtattttcccaatacgtcgttttcgagattgaccacgccgccgacccgtttctcgcccagcaccgtctgcgccaaggtgtgcgggatgatcgataccgagaagtccctttccgtgatctccgcgaccgtcaggctgatgccgtcgacggcgattgagcctttctcgacgatgccttcgagtatctcgtttcgcgccgcgatccggtaccacacggcattgccttcgcgccgcacggaggatatgctgcccgtgccgtcgatgtgcccggtgacgatatggccaccgaaccttccgttcaccggcagggcccgttccaggttgacgccgttcccgcggcgcaatacgccaagcgaggttctgcgccacgtctcattcatcacgtcgacggtgaagcgtcgccggtcgaaatcgacgaccgtcagacagatgccgttcaccgccatgctgtcgccgatatggaggtcctccatcacgttcgtggcatcgaccgacagcgtgcagttggcggcgctcctccgtatgtccgccaccgttccgacttcctccactattcccgtgaacatgaatacaccacctcgctttccaccagataatcctctcccacccgggagcaggcgcggggccggagcatgacggcgtcggaaggcagggcgactccttggccgcccaccgggcttttcgcggtgccgccgaatatcttcggcgcgatgtacacgtgcgcctcatcgacgatccgctgttcgagggcgctccaattcatcgcgctaccgccttccagcagcacgctgtccatctgcatatcccccaggcgccgcaccacgtccgccagatcgacgtggtcgcccttccttccgacggcgagtatttcgcagccgtgccgccggtagtcctccgccttgcgttcgtcatcgcaggcggtggcgatataggtcctgacgtcattcgccgtctgcacgatccgcgaggtgaggggcgtcctcaatcgcgtatcgcagacgacgcgaaccgggttccttccgtgtgccatgcggcatgtcagcaacgggtcgtcctcgatcaccgtgttcacccccaccatgaccgccgcgacggatcgacggagctgatggacccgacgcctcgactcctcgccgctgatccaccgtgattgattggtatgggtcgctatcttcccgtccatcgtcatggcgtatttcatgatgacatacggcgtatgcgtggtgatgtatttgctgaacacccgtatcagatgccggcactcgtcggccagcacccccacatcgacccgtatgccgtggtcttcgagcatgcgcacgcccttgccggacaccacgggattgcagtccaaggttccgacgacgacccttgcgatgccgctttccacgatcgcctccgtgcatggcggcgttttgccgtaatggcagcacggctcaagcgtgacgtacaacgtcgccccggcgggcgactgcgtgcaatgccgcaacgcgttcctctcggcgtgcaatccgccgaactcctcgtgatacccctgcccgatgatccgatcgtccttgacgatcaccgcgccgaccatgggattggggttcacgtatccggcccctcgcttcgccagctcgatcgcgagtcccatgtactgcgcatcgtccatgtacgcctccaagcatgttgcgcccatacgctatccaaggcatacaaaagaaggttcatgcgaacacgaaaacgccctgaaatgatatggcatcatttcagggcgtacgacgaagcatgaacgtactttcatcttctctcatccagactgtactgtcggctttggaatctcaccaaatcatgccttgcggctcgtgggctgtaccaccggtagggaatcgcaccctgccctgaagatagttattcgttttgcccgtgattgtactcgccgacgctccccctgtcaacggaagcggcctcacgcagcgcccgggccttctgcatcgtctcgtcgtactcgaagtcgaaatcggattccacggtgatgcctccgcccacgccgagcgacgtctcgcctccctcccgcacgatggtgcggatcacgacgttgaaatcgcaatcgcccgtatcggagaaatacccgatgctgcccgtgtacaatccccggggcgcgcgttcgagctcgtcgatgatctgcatggcgcgaaccttcggggcgccggtgatcgaaccggtggggaacgcggcgcgaaccgcgtccacggcgcaacgatccttgcgcagcgtcccctcgacggtcgcgacgagatggaatacggaaggatacgtctcgatggcaaagtcggggtccgtgccgacggaacccggttcgcagacgatcgacaggtcgttgcgttcgaggtccacgaccatcagcagttcgctgtggtccttctcgctgcgggcgagttcctctcggttcgcccgatcctcgtccggcgtgccgccgcgcggccgggtccccttgatgggccgcgtcaccacatgccccgagcgaatctccatgaaccgttccatgctcgaacagcacacgtcgagacccggtgcgcgcagataggcggaaaacggggccgggttgtgggtgcgcagataacggtagatggcataggggctcccggatgtctccaggcgcaggcgctgcgccatgttgacgacgtaggcgtcgccggcgcgcagatgatcgacgagacgggccagggcgtcgccgtacccggcccgcgtgaaatcggaggagcatggggcgagcgaacgtcggcgcgcgggatgaggggcgggcgggcatgaatccaccaggtcctgcgcccatgtcagggcgtgggcggccgtcatcgtccgcccctggcagcaacagaacaacgaccgcgaccggacgtcctcgatgagtagcaggtcgtagaagaccatgctcgcctccggtgtggccgcgacgggatcgtgcctagtcggcacgccgcacgattcgcggccgaaatcgtatcccagatacccgatcgcgcctcccgtgaggggcagacgcggatcgcgcgcgccatcgcagggtccaagccgcttcttcacgacatcgaggaaatcaccctccacggcaacgccgtcgacgaggcatccgccccgcccgtgttcgatcacaagataggggaagagtcccaggatcgagtagcgcccctgcgcccccggcatcgaggagtccaggaacgcgaagcgttcctcgccgcgcacgcgctccacgatgtcggcaagcggtcggaacgtcctgagcttgaacacctgcgcgctcaccggaactccttcgtctgcgcccgggcccgcgtccgcgccaccatgcgggcataggcgtcgttcacgtcgcgcgacacgctccccggttcgaattccacgccgccgataccggccacgggcatggcacccatcagggagttggtgaggaacacctcgtcggcccgaagcagctcgtcgggcatgatcgggcgttcgacggcccccgtgaacccgatcacggcatggcgcatgaccccgggcagcagaccgcaggagacgggaggcgtcacgacgtctcccccgatgacggcgaagatattggagacggccccttcggcgacctcgccccgcgtattgaggaacaacggctcgtcgacggcgcggtcacgggcgcgacgcttctccatgatgttttcggcatacgccaacgtcttcatgcgcgcgaggggagaggattcgttcctgcgcacatcggcgaagtcgcagcggaagacgcgcttcgcccccggcgcggcatacgggttgcgtctcaacgagacgacgcggttgcgctcggtgaccgtgagcttgagggccgaatcgtccgatgcgccgagtccggcgcatgcgcggagaaccatcgtctccagatcggcgcgacgcgcctcgatgccgaggtatcgcaacgtctcacccaaacgcgtcagatggtcgtccagaaacacgggcgcgccgccggataccgcgatggtctcgaaggcccccatgccgaagaagaatccgtcatccgcatccacacgcgcccgggcaccggggccgatcacgcactcacccatcgatcagcgccccctttcccgtctcgcactgccatcaatcaggctatcagtcatgaagacggtaggtgcgccgccgacacgccgtccgtccggcgattccgtgcgtcacgaccggaccgatgcgcaatatccggcttccgcgttacactagtacggttattcgcgcgcgcgtggcgccctctacaccccgagccgcgaggacacgtggattccggccggtcatgccccacatggcaaaccgagaacccgcacacctagcattacaaggagagccattttggcaaccaagattcgtctgaagcgacagggcaagaagttctacgccttctaccgtgtggtggtcgtcgattcccgcaagaagcgtgacggcaaggtcatcgaggagatcggtacctacaaccccaacacccagccctcgaccatccagatcaagtctgaccgcgctcagtactggctcggcgtcggcgctcagccgtccgagcccgtcttcaagctgctgaacatcaccggcgactggcagaagtacaagggccttgaaggtgccgaaggcaccctgaagaccgttgaggctggcccggacgccgaggcccgcatcgcggccgttgagaaccaggctcagaagctgaaggccgccaaggccgaagctgccgccaaggccaaggctgaagccgaagccgctgccgccgctgaggaagccccggctgaagaggccgccgaagaagctccggccgaggcctgagcggaaacgaaaggctagctatgcttgcacaggctgtggaacacctcatcaagaacatcgttgattttcccgacgatgtttccgtcaagtcccatgagaacgcgcgcggcgaactgcttcgcgtacgcgtgaacccggaagacatcggccgtgtgatcggccgtggcggccgcaccgccaacgcgattcgcaccgtgattcaggcactgtctgaccacaaggtccgcgttgacatcatggacgtccgtcgataaccgataaggaacaattcacagcatggcacagcaagacatgcacgacgaccctcagcagctcgagttgctgagggtcgctcgtattggccgcgcacagggcctgaagggcgaagtcaccgtgcgcctgtacaccgatgatcccgagtggcgcttcgagccggactccgtgctctacagccaggatggcgagaccgagtacatcgtcgagggctcgcgcacgttcaaggatcgttggattctcaagcttgagggcgtcgacgaccgcaatgccgccgaggccctaaacggtgtcgaactctatggcgaggccgacgacgcagaagatatgctcgaagccgacgaatggtatcccaaggatcttattggccttgaggcccgtctagtcgagggcaacggtctgggactgcccgccggccaagtggtcggcaaagtggtggatgtggtcgactcccccgctcagtccctgctcaagattcgtttgaccgagccggtggtaaccggccagaattccaagggcgaggatgtggtcgagaagaccgcattggtcccgttcgtggaggccttggtccccgacatcgatctggaggagcaatacctcacgctcgatccgcccggcggtctgattccgggattgtaaacctcatatacgcgtgagaccaaaggactttctggctatttgttggcagaaagtccttttgcgtatgagcagaaacatcgagacgctaaaccttcctcattccggtatcgcatagcagataatcaatagtatactagtgaataaatgattttattcatggaaaactatatgttataacactcggagtatcgcaatgaagtatgtgcccaccaccaccaaacgcgatttacgcatcctaggcgaacagttctcgcaacagcgcaaactactgatgttgacggttgcggatgtagcacaccgctctggtgtcagcccgaccacagtgtcaaatctggagcaaggcaaggctgtccggtcagattcgctgttaaccatcgcgcgcgtgttgcaacttgctgacacactcgtagccgcatgcgacccctattccaccgatcttgggcgtctccgcgctggccaacaactcccgaagcgcgttcggaggtgaatccctgatggcaaaaactatcgaatcaactgtactgattacgctagggcctggaatggaagctcctgccggcacattgtatgcgactggcgacgacctatcgttccgctatgattcgacgtacacaatcagcagcgattccttcgacctcttcccatctatgccccgctcgctggccccattcttcttctctggacttggtccattttcggattccgccccagaccgttggggcagaaaggtgttttcccgcagtcttaaacggacgcgtgtcagcgagtcggaatatttgttcggcgtcaacgatctgacaagacagggtgccattcgattcattgttgatggcaagccagcggcaggagatgaaggagtacccgtactgtcaaagctgccggagttattggacactgcggatgcggtggaacagaaccgcgaggtaagtgatgtctccttacgcaggttgtatcgggcaaccggctcactcggaggcgcacgacctaaagcttcggtgtcggatcgtaatgcgctgtggctggccaaatttccgaaaccgaacggcgatgattgggatgttatcggctgggaagccgtcaccttggaaatcgcgaacatggccggcatcaaagtgcccgaacatcgcgtcattgcaataaaggattcggaggagagaagccggaccgtgctattgactcaccgttttgatcgcgtgtctgcaccatcagttgagcgaatggagcgattaccttatatatccgcaatgaccgcgctggaagcaagagatggggacggcggagactggttggatctagcagaatttacgcgtagggcaggaggagacaccatagagctatggcggagagcaatgtttggcgcggccatcggcaacactgatgaccatctacgaaaccacgggtatttgcgtaagaataattcctggcaattggcacccgcttttgacatgaatcctgaaccattcgatccgtcgctacccgactcacaccagatgtcattattaggtgacaccgaagtcgatatagataaattgatgtccgatgagagtctgtctttgttcggtgtaagccgtaaatatgcggatcattggttgccgacattgcgatcagccttatctcaggcattatctcgagcagcgatgcgccgcattgacatgcattccatcaatctgatggccgaacgttttgataaggcggttcatgctctgcagtagagcgatggggatctaccgcaaactgttactcgtctcgtggctccggcctcggtatgtctctggtatcgcttaaaaagtcgcggcggtcctcataccggagagcaacgattgcgatgactgcgtggccgacacgtcatacggcagctgattggcatcggactgctaaaggtcagttcaggcagatgacaaagttccgagaattctttccttacgttttctccatcggttacaggcacgttcgatacgtttatagccaattagctcggacggcaccaaatgaaaaatccttgcctacttccctattcgagcatccccaaaagggcacgccaccgctgcaatggcgtgccccgaatagagcgccgctgggctcagagcgcagagaagcc

SEQ ID NO: 862 - DNA, 4021 bp, Unknown
  R14_18m  MAG No. k141_13384
tgctccaccgcctgctgcgccaccgtcagaccgaacaggcccgcgccgacaatgactaggtctgggtattgagtagtttccggcatgcgcgcattccctttcataaagtcaatatatcaattattatgttcgatttccgagaaaatatcttactcacccaattgcaaatcggcaatcttcctagacttaccagcagactggacacaatccaagaccagacgacagactcaaggcaaaacgatggcatgttcttacatttctgcgtctttgcccggacccgttcgccgccacaaagacagagtgcagaacaacgcaaccaccaatataagcccccgcactcaggcaaacctcaggttacgattggtagatatgagcaattccgaacaggccctcgactcaaccaacgaagcagtcaacaaagcatccaacgaagcaaccaacccatcattcgcgccgcaacacattctggttaccggtggcgcagggttcatcggcgcgaacttcgtgcactgggtggcgcgcaaccatccgcaggtccacatgactgttctggatgcgctcacgtatgccggcaaacgcgagaatctcgatggcgtgccggccgcgaacctgacctttgtgcatggcaatatttgcgatgccgagcttgtggaatccctgttttctgggctgaaccaacgctctgcagccgcagtacccccgattgacgccattgtgcacttcgccgccgaatcgcataacgataattcgattctcgacgcctccccattcctcaacacgaacgtgaccggcacgtacgtgttgctcgaggccgcccgccgccacgatattcgattccaccacatcagcaccgacgaagtgtatggcgatctggctctggacgaaccgcgcaaattcaccgagctcagcccttacaaaccatccagcccgtattcggcgtccaaggccgccagcgaccacttggtgcgcgcctggcaccgcacgcacggactcaagaccaccatcagcaattgcagcaataactacggcccctatcagcacgtggagaagttcattccccgccagatcacgaacattcttgccggcattcgcccgaaactctacgggcaaggtctggctgtgcgcgactggatcagcgtggaagatcactgcagtgccatctggacgattctcacccgaggccgcatcggggaaacctacctcgtgggagccaatggcgaatacaacaacattgatgtgctgcgcatgattttgaagctcatgggccgcgacgccaacgacttcgaccatgtgaacgaccgccccggtggcgataagcgctatgccatcgacgccaccaaacttcagaccgagctcggctgggtgccaaagtacaccgatttcgaggaaggtctggccgcgaccatcgactggtaccgagcacacgaaaactggtggatgcctgataaagctgggactgaggaaaagtaccggaagcaagggcactgataggccattgacaggccgccgataggtcactgacagcgcaatcaatgaataccgattgcgagatttggtggcgaaaatatatcttatgttgtacaataatcatgtatttcaattataaattgattattatgacttttaaagaacggtaatgcgatgattcgtttacaaagacttgttctagacaacatgaggaacatatcgcacggcgtcttggattttgacgatctgcccgctggcggcagcgtaacgggtatctatggacagaatggatcaggcaagaccaccgttatcgatgccatcgggatactgcgcgcgctgctatccgggaatatgctgccggacaccgccggcgatgccattagcgtcagcaccggtcttgcaaccttgacggcgacgctcctcatcggaggaaaacagaagcccagctaccttgaatacaaggtgtccctgcgtagagcgaacccggattcgacgcgagcgcgcgtcgtttccgagtcggttcgcatcggcgacgatctctcacgcctaggcagggaggcgttggggcatcggacggaggattctgagaccgatggtttcgtgtcaactccggtatatgtgtggcgctccatcgaggcggtcacctcggtgaaaaccgtggtctcacgcaccgctgatcgtgcgtacatggaggggcgctcattcctgttctcgcggtgtgccacgcttgaagaccgacccgatgccgagttcctcatcgactgggcggtctcccgcgtacgggaagcgaatggtgtgtccgccagatcactgacatacatcaacgaacgtttcgatgagttcgtacgcctacgcaaggccttatgcgattacgcgaccaatgatgtcttcgtatccactacccgtcgtggctcctatgccgcatatgcgttcatccccatcatggaggaggattccgcaggtcgcaacacagagtttctgttcgacctgttgcaaccgaacccgctgaccacgggccaggcgaaacgacttggacagaccgtggagtccttcgaccgcatcctgcccaccctcgtgcctggtctgcatgtcctgctgaagatcggaaccgcgccttccggcaaagatggcgaggatcgggtcaccgcggagctgttctcgcgtcgtggcgatatcacggtcccattccgctgtgagagcgaaggcatcatacgcatcaccgcgctgcttggctatctcaagcacgcgtataacgacgagaacgcgctggttgccgtggatgagttcgactccggcgtgttcgagttgctgctcggtgacatgctgtaccagttggcggacgggtgcgcagggcagctggtgttcaccgcccataacctgcgtgcgttggaagtgctgccgaacggctgcattcgcactacagtgaccgatcccaataaccggttcgcgatcatcccccgcaagtcctccacgaacaaccagcgccgacggtacctgacggccagcgagctcggatggagcggccccgacatctatgattcgcccataccacgcatgttcggcaacagtctctatgccgccggccatcccgatgaggacgatgacatcgacgacgatctggcagcactcaacacctccggaacgaaggtgaaccgtggctaaacgcaagatcgtcctgctggtcgtagaaggagcaagcgacgccagcctgctcgtgccggcattctcgtcgttaatcgagaaccgcctattccaagggcaggaattccactgcgacgtgttgactgcgccaaaccaccgtgaggagttccgacgtcgtaacgggttctatccagcggacaatcctgtccagacggtgcgcgaactcgtggagtactacctcagagaccacgaccgcacctggggccagctcggccatgtcatccagatctgcgacctagacggggcgttcacatctgacgaccgagtgcgggaagacccattggtggatggaacgcaatattcaacgaccgacatcatcacgccaaaccgcactatcctgattgcggatcgcacgaccaagcgaaacggcgtggatgccttgctgaaactcgatgggttcaggaagaagaacggccgcgccacgctcatggtcccgtaccgcctgttctacgtcagccgcaacctcgaacacgcatttcgcggtaggattgacaatctagacgcacagcacaagcagagcagcgccatcaaactagcagaccgctttacccgcaacccgaacctgttctctacaacccttcaatctcttcggcgaatacacggcaatccgacaacgtgggaggaatcttggcaatatgccatgcaagacctccactcactcgaacgcggtagcaacctcgcattcgtggagccatacttggcaggcgaactgcggtaaatccatcagaatagtttcagaaccatagctggtccgagcccagctagacaccaaagttggaaaacgtagcccagtgcaccttattctggttataaaacgtaagaacagggctcaaatttggttggaaaacgtaaa

SEQ ID NO: 863 - DNA, 18375 bp, Unknown
  R14_18m  MAG No. k141_13594
gcgcagcatgcgctccagtgccaccttggcttcgcgggcggtgtcttcgtccacggtgatgcgattgaccacgttgccggcttcgaggttctccaaagcccaagccaggtaagccgggtggatgcggtacatcgtggagcacgggcagaccaccgggtccaggcagaacacggtcttgtccgggtactgcgcggccagacggttcaccaggttgatttcggtgcccacggcaatggcggatccggcgggtgcgttggcgatctccttgacgatgtacgcggtggagccagtaccgtcggcggcgtcgaccacctgcatcgagcactcggggtgcacgatcaccttgacgcccgggtatgccttacgggcacgttcgacctgttcgacggtgaaacgctggtgcacggagcagaagcccttccacagaatcatcttggcgcgggcgtagtcggccggatcggcggcgccgccctgtgccttgaacgggtcccacagcggcatctcgctcagcggaatgcccatcgcgcgggcggtattgcggcccagatgctggtccgggaagaacagcacgcgcttgccgcgggcgaacgcccattccagcacggcgtgcgcattggacgaggtgcatacgatgccgccgttgcgtccgcagaacgccttcagcgcggcggatgagttcatgtaggtgaccgggatgatctgctgcaagccatcggagtccggctgggtgccgcagatctcgccgagctggtcccagcattcctggacctggtcgatgttggccatatcggccatcgagcagcctgcggacaggttgggcagggtcacgctctgttcgggcgtggagaggatgtcggcggtttcggccatgaagtgcacgccgcagaacacgatgtggtcggcgtccgggcgttcggtggcgttcttggccagctggaaggagtcacccacgaaatcggcgtgcttgatgatctcgtcacgctggtagaagtggcccagaatcaacagtttggagccgagacgctgcttggcgtcggagatgcgctgctgcagttcctcgtcggaggccttgcggtattcgtccggcagcacctgctggcgcggcgcgttggcgggcagacggtcaagcatcgaggcaccgggaccgtagctgggtgtggtggtgtcgaagtgccatgggtcctgggtcagtcctgcatcgcaggtgctttgcgcgcccagcttggcgatgatctcgtcaacggacggcgcagtggatagtgcggtcatagtggttcctttccctatatacgtctgtgatgccggcccgaagcgggtcggcgggaaaaatcagatgcgcgcggatggaatcagcgcgtcgagagcgtcttcacgctcaccttgtctggacagttccacgatgtcgtcgccatcggattcgtggggcatgccattctcgacaggtcgtttggggatgtagcggtagacggtggccggtcgttggcggccttcgcgcaccttctccccggtgtcttcaagatcgcccgaggcaagcattttgcggcggaagttcgccaagtcgagggtttcgccgccaatcgcctcatagacgccgtgcagttggcgcagggtgaacgtggggccgagcagtcgggtggccacgtcggagtattcgattttggagcgcaggcggagcagcgcgtagtcgatgatctggcgatggtcgaacgccagctcgggcagttcgtcttcggggaaccatcgtacgttgtcaccgtcctcgaaacccgcggcctcggtctggccgacgagcgcccaatacacgacggataccatgggcaatccgccatgagaccgggtcgggcctccaaaggtgtacagctgttcgaggtatcgcgggtgcaggtctgtggtcgattcgagggccgcgtaggcggactgttccaacgaccgatcggagcgcaggtcgccgccgggcaacgcccagcagcccaggaacggctgacggacgcgcttgaccaggggcagccagagacgggaatgggccgagttcgcggcgttgccggaatcggcggcactgttgccggtatcgcctttcgggccgagtgccagaatcaccactgacacgccgacctgtggcggtgcgctgcggcgctcggacacattgccgaatcccatgccatgcctctttccataccggttgttctccctgcattgagagcatagcactacttatagtcacaatgaccataaatcacatattggatggtctagcgcacgaatattggtcaggtagcgggccccaatcgctacgaaatcacgtccgtatcccccgatttcgactgtgtcatttcggcgacggacgggaggaacggcgctagggagggtagttcgtcgagactcttcaggcccatttggtcgaggaaggattcggaggtgaccaaaagggccgcgcgggattcggggtccacgccgtcttccttgataaggccgcgtaccgtgagcgagcggatcacgccatcggagttgacaccgcggattgcggccacttgggctcgggtgacgggctggcgataggccacgatggcaagcgcctccagtgcggcctgactgagtctcgcagtctggccgtcggtgacgaatgatgagacgaccggctcgaacgcggcgcgactggcgaactgccagccacgagcggtgcggcgtagttcgaagccgcgcgggcggatgccacgggattcatcgccctcatagtcatcgtgcagggcttgcaatgcctcttcgactgtgttgcggtccaatgccaaaatgcgggccagctcggtggcggtctgcggctggtcggcgaccatcagaatcgcttccagacatgcgggcagcccgccgggaaaatcgtctaccgtgaaatccacgtattcggggcgcgtctcctccactcccctcacctcggcctttgcggattcagccgtcgattcggcatccgccatgtgctcggttgcattcgttgcgtcaatccgttcagtcaccagtcgccgtccttacgcaaaatcgccttcggaaatgttcacgtcgttcatcgtttcgtctacgccggatacccacctcaggtgcagttcggcaaacggaccatcttgctgatactgcagcacaccttgtttgaagaacacgagcacggccatgaaccgagccaccacctcaatacgagaagtgcagtcccgggtcaattcgctgaacgacatcgactggtcgcccttggattccagtgctgcaatcagccggtcgcgcaccaccagcgattgggcccgcagatcgaccagcggcacgtgcagctggtggatcgatacttcggaggcgggcgcgttggcgatgacctgggcggccagttgggcgagttcgagcggggtcagcgtccataccagctcaggcaacatggcggcaatgccctcgtccatggccgccggatgcgggaatcggccggcattggcggcgatacgcgcccggaaatcaccggcggcctgcttgtaggcgcggtattggaggagtcgggcgaacagcaaatcgcgttcgcgcagcgcctcgagactttgctcgtcgtactggttgtcttcgccgccgggcagaatcgccacacttttggcctcgaccaaaatagaggcgatgtcgagaaaggcgctggcctcatccatgtttttcgtgaagtcgagcccacgcacgtatgtcaggaattcctcggtgatcgaggagagggaaacttcggtcagctcgagtttgttgttggcgatcatgccgagcaaggcatcgaacggaccggaatagacctcgaggttgacttggaagccggaggtggaggattcctccgtgctgatttcggcttccgcggagctcccctcaatctcgctacgcgagccagcttccctcagagaggggagccgagaaagggaagtctcattcatcgtttatcgaaacaatcgttacgccacgatgccgcgagcaatgagctcacgtgccacctcacggtattcctttgatgtcttgtgctcaggggcatagaccaccacgggcgcggcggcaaccgtggaatcgggcagtttgatggagcgggagatgaacgtgtggaacaccttttcgctgaacgcctcgtaaatgcgctggcagacctcttcgcagtgcagtgtcttggtgtacatggtgatgagcacgccatccacttccaatgcgggattgatgcgggactgcactttttcgatggactgcataagtagggccacgccacgcaaggcgaagaattcggcggccacgggaatgatcacgccatcagctgcggcaagcgcgttcacggtgagcaggccgagcgatggctggcagtcgacgatgatgagatcgtattccgacttgagcttgcgcagcacactgttcaggatctgctcccggcccacttctgtgaccagttggacctcggcggcggacaaatcgatgttcgccggaatcacatcgatgttctcgaatgcggtgtgctgcaccacatcatgtgggtccacggaaatatcgaacagcgcggtgtaaatcgtgttctccacggtattcgcgttgacgcccagtcccacagtggcggcgccctgcggatcgaaatcgacgataagcacgcggcggccatactgggccaacgcaccggcgatattgatggagctggtggtcttacctacgccgcccttctggttgcacatggcaatgacacgcgccggaccgtgctgttgcagcggttcgggtgcggggaaggtttcgtattcacgtccaagcaaatcggtaggcatactgtctaccttatcaacatccgggttcgctgggggtgcaacgacatacgttcccgccataggcagcgttccttgacggaatgcgctgtctttatcgcggatgtctcgccagtcgtccatcgttgccctcgccccctttgccgggaatacctgctcgcctatcctaatgtactcgccgggctcgcctcggaacaccgttttgcagcgggcattccagtgttccgaggtttatggatctcgtctcgtactatgtcgatgcgcttactcggtgcgcagtgcggtggccgggtcttgcttggctgccttgcgcgagggaatcaggccgccgatcagcgtgagcaccacgcttaggatcaccagcaccacgccgccggtcaccggcagggcggcattgacgtccgcattgccgatgaagtgatgcaacacggcgttgatcggaatatcgagcagcacggtcaagcccacgcccaacaggccggagcataggccgatgatgccggtctccgcattgaacacctgggacacgttgtgcttcgaggcacccattgcgcgtaggatgccgatttccttggtgcgctccagcaccgaaatgtaggtgatgatgccgatcatgatcgaggaaacaatcaacgagacggacacgaacgcgataagcacgtaggaaatcacgttgacgatggtggtcaccgagctcatcatgagccccacataatccgtgtaggtgatcttgtctttcttcgagacggtgttgttgtagtcggtaatcgcgtcggcgatgtggtccttgtcttcgaagctgtcggcgtagacgttgatcgagctgggcgcgtcacgactcaccacaccgaatgcggcgaggttgtcgtcgtaggtgccggtcgacacgtactggtcgtagatcgcgacaagcacgtcgttcgaagccgtggcgatatacgagtcgaaactgtcggcgagctgctgttcgctcatcgcggccatcgcgtcggcctgatcgccggcacccgccgcgccagcgccagcgccagcaccagcaccagcaccagcaccagcaccagcggcatccgatgcgcccgtaccggaccgctgcccggcactcatcatcgacttggccatgttcgccttctgcgtcacgcccagcgaaaccacgtaggtgcgcgcgtcggccgccttggtggcgtcgtccgagggcgagaacgtcatgccgttgagcacgttcgtgttcgggttggccttctgatcggtgacgatggcgctggaggccgcacggtcgatcagatcattggtcagagcgcgcgtgtatcccacgccagcggccaacggtgtggccgaagcatccttcttcgccttgacgacgcccaccaccttgagtttggtggccgtttcgaggcgctgttcgattacatccttgtcgttgccgatgaatcggtagtggccgtcatcgcccttgacgtactggtcggatgccggaatcatgtacagcgtctggtcgagcgccttagcatagtcgatcttgtcttgtggagtgctgaccttgtcgccggcgttgagcttggacatcatctcgtggtagtcggaggcgggcagcaggccgagctcgtacagcgtggtcagcggcacgctgttgttgtcgtcgagcaccagcaccacctcgtccttggacttcggccatgaaccgttgaccacttggtagttgtcggtgatgaccttgcctacgagcttgctgtcgtccgctccaggcatgatctcattgaacgagtcgggcgcggcgttctcatcggttttgccggtcagcatcgacatctgctgcgaggtgatcgacgaggtgccggacatgccggacgagcttgtggacgccatctgcgaggccattgaagtggagtcgctggcaccgatcgtcacgccgtccgcattgaccagcgtgccatcggggtcgtggtcgaacacggagaatttcacgtcatacgtgtactggataccggcggaacccacatactggtgaatctcgctcttggaattatccaggtatttcttgaagcgggtcaggttgttttcggtaatcgaactggtcaggctggatgcctgcttgacgctgcggtcgtccgggtagatgccgtcggttctgtgcgtcttgccgccgtatccgtcatcgccgcccatctggccgcccatcatgctgctcaggtcgaaggtctgggagtcgatggtgatcgggtaggcggtcatcgtgtcacgctggatgtcgctgatgtatgcgttcacgccagtcgacaccgatagaatcagcgcaatgccgatgatgccgattgagccggcgaacgaggtcagcagggtacgcgccttcttggttttcagattgttgaagctcaacgccagcgacgtgacgaacgacatcgacgcgcggcccatcgtcttgtgcacggccggctgttcggccgtctcatccacgacaaacgggtcggagtcggagcggatcacgccgtcgcgcaggttgacgatgcgcgtggcatattgttccgcaagttcggggttgtgggtgaccatgaccacgaggcggtccttggccacgtccttgagcaggttcatgatctgcacggacgtgtccgaatcgagcgcgccggtcggctcgtcggccaggacgatgtccgggtcgttgaccagtgcgcgggcgatcgccacgcgctgcatctggccgccggacagctggttcggctttttattgatgtgttcgccgagtccgaccttctccagcgccttgcgcgcacgttcgcgacggtcggccttgccgatgccggaaatcgtcagcgcgagttcgacgttcgacagaatcgtctgatgaggaatcagattgtagctctggaacacgaagccgatggtgtggttgcggtacgaatcccaatcgcgatccttgtattggcgcgtcgagatgccgttgatcaccaaatcgccgtcgtcataccggtcgaggccgccgatgatgttgagcaaggtggtcttgccggaacccgagggacccagaatcgcgacgaattcgctgtcgcgtaggttcaggctgactttgtcaagcgcctgttgaacgaaatcaccggttttatagcgcttcgagatcgatttgatctgcagcatgaatacctcttcctggctgacggttcgctgttatgtactgtattgtcacgccttgaatttccggccgactttggtgctcccccccccgccgcgattccgctatgggcggacgcgtcgcaaaatggtgtgtctcaccgcgctctggggtgtgaggtcagatacgtttcgatcagggtttcggggcttacgtgcgtgtagatctgcgtggtggtcacgctggcgtgcccaagcagttcctgcacggtgcgcacgtccgcgccgccttggatcaggtgcgtggcgaaggaatggcgcaaggtgtgcggatggagtggtttggtgatgccggcccgctccccggttgctttgacgatttcccataccgattgccgcgagatgcgcttgccgcgtttgttgagaaacagtgcgcgtctctcgggaatcttggcgctggagcgccgttccagctcgccacgccccgcattgaggtatgcggtgatggcccggcatgcgtagctgcccaatggcacaagccgctgcttggagcccttgcccatgagtcgcgcgatgtgctcgtccaggtcgatgtcgtccagattcacaccggtggcttccgagacgcggcagccggtggcgtacatgaattcgagcagggccttgtcccgcaataccaccggatcggttgagccgccggctgccgccgcgtcgagcagacgggttacctcgtccacggtgagtacgtcaggcagggtgctggcacctttgggtgccttgactgcggcagaaacgtcggcagtcaccgcgtgctgaccgagcgcgaagcgatggaattcgtggatcgaggccagtcttcgagctttggagcgggcggactcccccgcctggtcaagggcggcgatgtagtcttcgacgtcttgtttggttatggcgtccggttcgtggatgccgcgggtttcgagccaatcaatgtatttggcgatatcggattcgtaggcggtgacggtggccgtggcgagtcctcgctccacgccgatgtggacgaggaactgctcggtgagtctggtgaatccgttggtcatgtgtttgttctcttccccacccgctgcgcgggagcccccctcgtcagagggggctaataataggaaaccccgctcggaagcggggtttctagtgtgaagtcacgacttcaagcaatcaggcctcaaccggagcgttgacgtcctcaggcagggcggccttggcggcggccacgatggtcttgaaggtgtccgggtcggagacggcgatctcagccagagcgcgacgatccagctcgatgccggcgagacgcaggccctggatgaagcggttgtaggtgatgccctcagcgcggacggcagcgttgatgcgctggatccacagcttacggaaatcgcccttgcgagccttgcggtcgcggaagttgtagttaaaggagtgcagcagctgttccttggccttgcggtacaggcgggagcgctggccacggtagccggaagccctctcgagaacaacgcgacgcttcttgtgggcgttcactgcgcgcttgacacgtgccataatctattcctcagctttctaaagtcttattatttccgggtaagccctatgctcacttctgcagaagctggtgcagcttcttggcctggccgccgcgcagcacatcgtcggcggacagttcacgacgcttgcgagcggacttgtgctcgaggttgtgacgcatggcggaaccgacatgcttcaccttgccggtgccggtgatcttggcgcgcttggaagcggcggaattagttttcatcttcggcattgctgccctccttgctggtttgcttcttgtcggaagtcttctgagaaatcgcggactgcgcgtcggccgcggcctgagcctgagactcctgcttggccgcgagacgagccgcctggcgagcctgacgctcggcgcgggactcggcgccacgacgacgctgctcggactgggtgtggaccttcttgcccttcggcgcaagggtcatgatgatgttgcggccctcctgcttcggcttggactcgacggtgccgtattcctcgacatcgtcggccagacgctgcagcagttccacgccaccaatcgggcgggagatctcacgaccgcgcaacatgatggtgaccttgaccttgtcgcctccgttaaggaagcgggtcacatggcccttcttcacgtcgaaatcgtggtcgtcgatcttcaggcggaaacgaatctccttgatttccgcggtgctctggttgcggcgagcttcacgagccttgatcttctcgttgtacttgaacttgccgtaatcaatgagcttggcgaccggaggcttcgcgttcggggccacctcgacgagatcgaggtttgcctccttggccaggttcagcgcgacggaagtcgcgatgacgcccacctgctcgcccttcgggccgatcaggcgtacctgcgggacgcgaatctcgtcgttaatacgtggttcgtcgctgatgatgactccaatcctctacttcaattccgtggcggggcctttgctggagtcctgttcaatgctttgggttcatggcaagccaaaaccagcgccaatatgcgctcagcttctgcagacgcatatcagttctttgcgtcattcctgattgcgcgttgtatatcgcaatcgctaggctgtttgccttgaacccgaggccttgaaaggcttccaggtggggttgccccgctttcttgatttctcaagccaaataggaatcttaccacatgcccggacattcgcggaccgtgtgtcgatgggtggataccggctacagtaggcataatgactcaggtatgcgtgatttttggtgcgggcgaatactatgcgggcacgcccgtggttcccaccggtgcgtatgtgattgcggccgatggcggactcgaccatacgcgcgagttgggcatcgtgcccgatgtggtggtgggcgacttcgattcgctggagggccggccgccccgtaccgatgtgcgcaccatcgcgctgcccgcgttgaaggacgacccggacatgctttccgcgctgaaggtcggctggtcggcgggttgccgcgagtttcacgtgtacggcgggcttggcggccgtattgaccatacgatttccggcattcaactgatggcgctgctggcccgacacggggcaagcgggtatctgtatggcgacgggctcatcgtcacggccatcaccgatggcaggctttcgttccccgcgcatccggtgcccgaggacggccgcatggtgtcggcgttctcccactccgatgtttcgcttggcgtgaacgaaccggggctgaaatatgagcttaaagacgacacgctgaccaatacggtggtgcagggggtcagcaacgagttccgcgacggcgtggacgcggccatcagcgtgaaacgcggcacactgatcgtcaccttccccatcgaagtggcgttgccacaggtgagcagattccatgaattcggcggcgatatcggcgagctggacaccgaagtgtccaagctgctggttcgctgacttgcatgccgcgcgcttgctcgtgatgattcgagacattcctccaaaggagaggaaaatcacatgtcggttgcgggcaatccaaattgtgagcgctcacaaaaaatacggcattttacccaaaacgcacgctgaaacgttgccatgtgtacagagtcggcattacagtagcaactgttggtaaacaatggcccggtgtgccaaagcgcgccaaggccaccctacaagggagaattacatgacagttaagattggtatcaacggcttcggtcgcattggtcgtctcgccttccgtcgcatcttcgagctgcaggctcgcggcggccaggctggtgacattgaagttgccgccatcaacgatctgaccaccccggctaccctggcttacctgctgaagtacgacagcacccacggcaccttccgtcatgacgatggcactccggttgacgtcaaggccaccgaagactccatcatcgtcgacggcaaggaatacaaggtctacgccgagaaggacgccaacaacattccgtgggtcaagaacgacggtgtcgagtacgtgctcgagtgcaccggcttctacacctccgctgagaagtcccaggctcacatcaacgctggcgccaagaaggtcctgatctccgccccggccaaggatgacaccaccccgaccgttgtgttcggcgtgaaccacgacatcctcaaggcttccgacgtgatcgtctccgccggttcctgcaccaccaactccatggccgccatggtcaagctgctggacgagaagttcggcatcaaggccggcttcatgaccaccatccacgcctacaccggcacccagatgctgctcgatggcccgcgtggcaccaagaccggccgcaacctgcgcgccgccgccatcaacaccatcgcccactccaccggcgctgccaaggccatcggcaaggtcgttccgtccgtgaacggcaagctgcagggccatgcccagcgcgtccaggttccggacggctccgtcaccgagctgaccaccgttctgaacaccgagaccaccgccgacgagatcaacgaagccttcaaggctgccttctccgacaccgattactacggctacaacgatgagggcatcgtctcctccgacatcctcggcgacacccacggtggcgtgttcgacccgacccagaccgacgtcaacaccattgacggcgtgaccctggctcgcaccgtgtccttctacgacaacgagtacggcttcacctccaacatgattcgtaccctgctgtacttcgctgagatctccgagtgaaccactgcggtctaggccgctacggttcgtttgagaactaagctgtgagacccccgccttgtgcgggggtctcttcgtagtagaacggtaatcatggcaaagaaaagcaagcatgataagggcgcgggttccaccccggcgacagtccaactggagaaggcgggcgtggaattccacgtatacgaatacgagcactccaacgaccatatggatgacggctacggcgtggaggcggccaccaagctcggcttcgacgagcatcaggtgttcaagacgttgatggcggacaccggttcggagcgtgtggtgggcgtggtaccggtcagcggacatatggatttgaaggccctggctgcggctgtaggtgccaagaaggcctctatggccgatcccaaggtggcaatgcgtgaatccggctatgtggtaggtggcatctcgccgttgggccagaagacacgtcataagactgtgttggatgaaagcgccctgcaattcgaccagattctggtctccggcggcaaacgcggactgtccgtaggcgtgaacccgcaggacctgctcaaggtcttgaacgccgttgccgcaccaatcggcacgtggtgaccgttcttggcttccctcggtgaggggagccaaggatgactacttcttcctgcgcaactccgacggcagcacgaagtgcatgttttccttgatggtttcgacggacttcataccggtgaagcccaagttttgcagagcgtcaatcacaccggacaccagttcgtccggcacggaggcacctgaggagatacctacggattccagaccctcgaaccatgccgggtcaagctcgctggcatcatccacgcgatacgctttgccgcgctctcccaagccctcctgcgccacctccatcagtcgcacggaattcgaggagttggccgatccgacaatcaccacgcaatcggactgctgggccaccagtttgaccgcagcctgacgattcgacgtggcatagcagatatccgaactcggcggctcttgaatccacgggaacttggccttcagcgcggcaatggtgccggcggtctcatccacgctcaacgtggtctgcgagagcagcaccagcttgttgtcgggcgcaaaatccaacgaatcgacatccgattcatgctcgatcaagtgcacatgttcggggttctcccccaccacgccgactgcttcatcgtggcccttgtgcccgatatagacgatttcatacccctcgcgcacgaaacgcagcacctcacggtgcaccttacccaccagagggcaggtggcatccaccacatgcatgccacgacgttcggcttccgccttcactaccggagatacgccatgggcggaaaacaccaccggaatacccgcttgggcagcagcatccggaatctccgccaattcctggacgaacaccgcgccttgcccggccaaatcctcgaccacatgcttgttgtgcacgatctgccggcgcacatataccgggggcagcccatcctcgcgcgtccgctttccggaagcctccgcggctttgagaatggtctgtacggtaagaatcgcacggtccacacccgcgcagaagcctcgcggatcagcgagcacaacgcttttggtcatcggaacctcctgaacgtcaatagtgttttccagtgtaatgcagggattacaggaatctgccgtcacaactattccgcgtctcccacgaatcaccggtttccaaggaatccatgtgcttctcgcatgatggtgtgagactcgtcactccacgtattgctaccgtgtttgtacgaattgtttattatatgccggctatcgccaatccccgtctcgatagaggagacgcgctagactggggccagcgatagcaggagctaccggcccaccaacctcactacgggagtgattccatgacgagtaaaacaccacgcaccggaaatcagtattcgattcactatggcgattattccgccgtcatctgcgaactcggcgccaagattcgccgattcgattatcaaggcaaggaaattttctgcccgttcggcgtcaacgacctgacccccacctgtaacggctatgtgctggccccgtggccgaaccgcatcgaaaacggcgaatacgatttcaatggcaagcattactgcgcgccggtcaacgaatatcatcccgcaccgcgcaacaacgcgaaccacggatacgcctaccactacatgtggaagcttgaatcgttgaccgatagcgccgtgacgctttcactgcgcttccccaacctggacggatacccgttcgatgtgaccgtgaccgtcacatacgaactcggcaacaacggcatgaccgtgaccgtcaatgcccgcaatgatggcgacgagccggcaccgtgggctctcggcctgcatccgtggctggccaacggcaagcagggcgcgacttccgccgagcgtgacgccgactccgccgcctgccacctgcagattaaggccgccagtcatgtgacggtgaacgaggcgctgattcccaccggcaccgaaccggttaccggcatctacgacctgaacgatggcccgacgctcgaaggccgcgcctttgatgatgcctgggttgacgtggagcgtgccgccgatggtgcgaccaccaccacattcacccgcccggacggtatcgaagtgaaaatcattggcgatgagacgattaatgcttggcagtgctacaccgccactggcgcaccgttcgccgagcatccgtatggcatcgccgtcgagccgatgaccgccccggccaatgccttccgcactggtgaccacttggtgacgctcgcccccaacggcgactacaccactgtggtccgctacgaagtagtccagaagtagttctgttacgctggctcccctccagaggggagccaattttttatccttatgtgccgccgcgtcttgggacttatgcgatacgattgtgagcgataacaatttgttccacaaaggagtgtgcactatggctttgaagcctcgcactggtaaccaatatgtcatctcgtccggcgaatggagtgccgtcgtcaccgaactgggtgccagcctgcgcgagctgaagtggcgcggcgaagacctcatcgtccccttcgacccgaacaaggtcattccctgctgcaacggctgggtgctggcaccgtacccgaaccgcgtgaccaatggtcagtattctttcgatggcgaagactaccagatgccgatcgacgagttcgaccgccaatcctccctgcacggctacgcctaccgctacatgtgggagctcgttgatttgcaggaatcacatgtgacgctctcctggcgttcccccgacatcgccggctacccgtttgatatcaccatcaccgccacttatgcacttgacgagaacggtctcacggaaaccttcaccgtgcacaacaacgacagcgtgaaggccccgtgggcatttggcatccacccgtggctggccaacggcaagcacgccaccggtcaggccattaccgccgacaacgagtcctgccgtcttgagctgcactgcgatacccacgtgaccgtagacgaacacctgctacccaccggcgaagagccggtttccggcatcttcgacctgcgcgataaccccacgctggagggacgtggcttcgacgatgcctggaccgatatcaccaaccgcggcgaagacggcagcacttccgccgtgttcacccgccccgacggcatcaaggtcacgctgaccggcgacaagaccatcaactcctggcaggtgtgcaccggcaacgaaatcggcgggaaggctcgtcaggccggcgtggccgtcgaaccgatgaccgcctacgccgacgccttccgcaccggcaaggatctggttgtgctcgagccgggcgatgactacaccaccgtggtcaccttccacgccgaacaaatctgaaaaaccgaataaccaagcctgacgatcatcgccacatggacacccgtgttgcatcacgtcgtacttatgtggcataattccgaaggcttatttttttactgcagcaaaggagtccatcatgggcatgcgcggacgtaagcgcaaggatcgtcgtaagaaggccgccaaccacggcaagcgtcctaacgcctgattcttcgcgtttcttatagaacgctcaaggcccgtctgatgatacatcagacgggccttgttgtatatgtcgttacttatcttcgccgcagcagtgatcaagcgtggccttgagccgggccatcagacattcgggtgccacatccgggcgcaagtaggcacgcaacgcggcaatcaacgcctgttcacgctcatcgcagcaggtacgggggtcaaaacagtcgccctccgtaacgatatgcacgtctgtctggaccgacgcagtggccgagccggtatctactgaacgatgatgcaccgccgtgatatgcacttcggtctggcttaccgtgccatcggccgccgtacgggttatggagatatggcgagtacgctctaccggctgatcgttcatcagatctcctttcccgaaagcttgcttgactgttgtggcgtgtgggcgtgagtcgcatgactatgtctcactacggcttgcgtgtcgccattgctaccaacagttcgttcactactttcattatggccggaatcggcgattcgaccaacgttttcgctcaacttcgcggatggtgaaccagccgacgaaccagtcgcgtacccgcgctctttcgcatacgaggcgagctcacgcttgagttgcgtgcgggcgcgattcaggcggctcattaccgtgccgattttcacgccctgctcatcggccacctgctggtaggacttgccgtcgatggcggcgtcgatgaacacctgccggcgttccggcgagagttcggcgagcgcggccatgatttcctcgggcgcgaaggcgtccaaatattcctcttcagcggacttgagcccgcccgacgtatgttcggcggcatcgtaaatgtcccaatcgtcgtattcgccagtggagtcgttggcacgctgcgggcgccgcttggccttggcatactggttgaagtaggcattgcgctcgatggtggtcatccacgcctcgaagttggagcccggctgaaatgagtcgaaggccttgaacccgcgttcgaaggtgtcctggaccagatcctgcgcgtcatcgggattgttggtcagcctcatcgcctgcctgtacagtgcattgacggcgggcatggcgagctgctcgaatctggcgcgcttggctgccatggactcgcccgatccggctgactgcccggattgcgtagttgcttcgcttgtcgtcacgtttcaccattctaatcaaatcatgtgcccatatcgtggtcgatgacgtgtgagccacaacacgctgcaccccacctgtagaatggcgtatcggctagataatagggagtaacaattatggctttgactttggcttcggccgctgacctgctcaaggaacaccatctgctgcgtgaaatcatccaaggggatgtctggaccgacgacccggcccgtatcgcttcggcggatgaaccgttcgccggcatcacctacgacacccgcaaggtcacgc

SEQ ID NO: 864 - DNA, 21378 bp, Unknown
  R14_18m  MAG No. k141_13667
catggtcagcagtgagatatactgcgattaagccaaccccgctggggaaatggaagtaagagccggcccctgagtatctcaggggccggctcttgcgctattgagactgactggcaaaaccagtttgatggcctccggctacttggccgagattaccgacgtggcggctgtcgtggcgaagcctttgagcacttcaatcatcacgtcgcgatcttcgacatcaatgttgcgggccgcggcgagcataatcggcagtgactgtgtcaaatgcgaagtgaggtcgccgaatgtgtcgtatccgccagcctcgaagatggcaaacaggttttcgatgaacttgcggcgatgctcgtcgtcgtattttgccatccatccgttgagcgtgcgtgccaggtatcgcgcgctacttgtcagtccatcagcctgtacgaattggccatgatcgacttgccagtgcaatgcgaaatgctgcatgatgctggcaccgtcgctgctgaccaccgtatagccgtcttccacatgctcacgagtctcaaacagcatgccgatgatcgacgatcccggtaccgatttatggattttcggcgcaatgcgcgcgtacccatcctcatcgaagaacgcctcatcgaagcctggaccatcgtgcgaatacacggccgtgatacgtccctgaatttcgccgggcacattggccgccgcgtataccgccagattgccgcctttggaatggccgccgaccataatcggcccggcccagcggccggcaatatcagtcacataccgcacagcggcctcctgcgaggcgaccggacggcggaaggccatcgtgaaatcctccttccacccgacgatcgaactgtcggtgccacggaaagccacgtacagcgtgccgtcgcccagttcgaagacgcaggccgagaactgtttggtggtttcggcgtcgaattcatccacgtattcgccgacgcgcaggtcgcgccagcgcgggctctcccccatcgcacgcagcagatcgacgttcatctgcggcgaccacaccttgccgaacatggcgtcatagcattcggcgcgtagcaggtcgcggatggagaccgtgggaatcatgccgctgacgtccgccgaatcctcgtgatagcgcggaacgttatccggcatgcgcgcgtaggccagctgggacagggcgagactgtccgcctcggtgaacggcagtgcggcgaaggtgtcgaaatgttgccggatatcgtcggtgatgttccccatggcggccttccttgttcgaatgtaacgaacctacggtaattctacgccgagcgggttttcatcacaggcgagtcggtcccagagtttaaaaccctatctcgccttcaaggggctgatttggccttctggagacatctatctccgtttcaaggggctgttcatccgtcatatcccgagtatgagcggcatcaccccaacgtcattccgccattttcatgctgcttctacttgggcatcagcccctcgaaacggaagtagatctctggaaaccacgacatcagcccctcgaaacggagatagcatcaatttaggcccagattgcccgttacagcatcgggtaatacttaccgtgatcgattttggcggcgatatcacgtaattcggcagcatctcggcggtcttcttcattaccttgcgacaacttgttcgctttactgtccagatgatgctcgatgccgaagtaactgcatacccccacgagcgcaaatagccctataccaactaaccagttcatagcacgctccttgccaaagcttctgccttaatatggtactgctgttcatggatcgtaataaaaaaagcgggctcgcaagcccgcttttggttttaggttgaagacgatcaggcgccgtattcctcaaggtaggcggcggcgcgctgctggatatcgtggctgagcaacggggtgccgtcggagttcttcatcttggcggcggcgtcgaagatctcgcgcacgttggcgatggagagcaccgggaagccgaattcggcttccacggccttcacggcggacaggtcggagtccttggtcttctccatgcggtccacggagagcacgagacccacgacctcgacgttcgcctcggccttgagcttggggatgacttcgcgcacggcggtgccggcggtcatcacgtcgtccacgagcagcaccttcatgccgtcggtcagcggggtgccgaccatccagccgccgtcgccgtggtccttcttctccttgcggtcgaaggtgtatccaacggtcatgttgtggccggcgttcagcgcgatcgcggtggacacggccagcggaatgcccttgtaggcggggccgaacacggtgtcgatgttgcggggaatcgtgttgtgcacgatggcctggctaatcttttcggcgtagaacgtgccgagcgcggcgatcttcttgccgtcgtcgaaggcgccggcgttgatgaagtacgggctcttgcggccggacttcagcgtgaagtcgccgaacttcaacgcgttggattccaacaggaattcagtgaagcgatgtgcgagtgtttctgccatgatgttccttacctccaagtctgtcctgcggccagtttagcagcgagttcgggacggctgtccagcaggtcgtcaagttcgcgggcgacgcgcagcggggccaccgggtcgaagagcgcggccgcacccacttcgacggcgttcgcgccggcgtacaggtattcgagcgccttctcaccactgtcgatgccgccgagtccgatgatcggaatctccggcagtgcggtgcgcacccgatagacggctgccaggccgaccggcagcacggccgggccggatacgccgccggtgacgttggcgatgatcggctggccggtgcgaatgttgatgcgcatgcctttgagcgtgttgatcatgctcaacgcgtcggcgccgtgttccacggccgcgcgcgccggcacggtgatgtcggtgacgttcggcgtgagtttgacgatcatcggcttgtcggtcatcgggcgcagccggtccataagattggcgagggccaccgggtcggtgcccacgctcatgccgccggcggaaacgttcgggcagctgacgttgatttccagcatgtccgcgtcggagtcggcgagcttttccacgaccgccgcgtaatcgtcatcgcaatgtccggcgacattggagatgacgaacgcgcccgcggccttgagcttgggcaggtcttcggccaagtaatggtcgatgccggggttctgcaggcccacagcgttgatgttcgcggccggcgattcggcggtgcgcggcgaggggttgccctcccacggcacgggcgaggcgcccttggtgcatacggcgccgagctggctgacgtcgtagaaccagcggacggcggcgtactggaaggtgccggaggcggtgccgaccgggttcttccattccagaccggccaccttggtgtggtgcttccacacgtggggctcgtacaggttgatgtggttgtcgctgccctgcgcggactggttgtttgcgctcatcgtcactccccccatccgagctgttcgcgagtgaacacgggtccgtcggagcagaccttgagccggccgtccacggtgtcgatggtgcacagcacgcaggtgccgtagccgcagcccatgcgctgttccatgctcagctgcgcggggatgccgcgttcggcggcccaagcggccacggccttcatcataggcagcggtccgcaggacaagatgatcggcttgcgatcgtaggccttcaggtcgtcgccttgttcgagtttgttgagcaggtcgaccacgttgccttcggcgtcgtcgatgctccacgaccagtccgcgtaccgggagacgtattcctcagcgaagtggtcgttgcggtagccgaatacggcggtggcaaaggaggcgtcgtgttcggcgagcttttgcgcggcgtagattagcgggggcacgccgagtccgccgccgacgagaatgtagttggcgtcttccttgaggttgaagccgcggccgagcgggccgagcacgtcgacggtgtcgccggcctgcagccttgccaactgttcggtgccgtggcccacgacggcgaagatcacgctgacttcatcgccgtcgacttcgctgacgccgaacggacgcggcatgagcatgaagtcgtcgtgcgtgaacaggttgacgaactgggcgggcttggcgtgggaggcgatgaacgggtcgcggaatgtcagtcgcatcacgcggtcggtcagttccgtaacctgcgtgatttcgacgttgtggcgcggcgggaagaatccggccgcagtcgcctccgcaaccacatcatgggtgggggtgaaagttgtcatttcattcctattcagcacatcaagctcccccctatcaggggagctgtcaaccgcaggttgactgaggggtagttaaacacactcggctccggtttccagcccacactcacgtatagcccacagccggacaatctacctacctatatacggcaacccgcagattatcgcgcatgtcgagcgccgcctggcgcgcgctgctcgccacaaggtccagcgcctcgtcggcggtcatggattcggagtacttgccgctcttcttccatgcgccgatgatgccgcgcgacgagttgacgatggcgccgctgccctgcttgtcgaacatgcctgccacgtccgcggccgtgccgccctgcgcaccgtagcccggcacgaggaagaacgtgtgcggcatacgttcacgcaacgccttgccttcctcggggtgggtggcaccgaccaccgcgcccacgcgggagtagccgtggctgccgatggtctcggcgccccagccttccacgagatcggccacatgctcgtagaccttcgtgccgtcggccaggtcgagcatctgcagttcgctggaggacgggttggaggtgcgcacgagcacgaagatgtccttgtcggcttcggcggcggcctcgacgaacggggtgatgccgtcggtgccgagatacgggttgacggtcaccgcatcctcatgccacgggtcgaagtcgcccacgccgttcaggtggtgggcgtaggcggctgcagtggagccgatgtcgccgcgtttgatgtcgccgagcacgtagaggccctgctgggccgcgtattcgcaggtcatcgtgtagatgtccacgccggcggggccgagcgcctcgtacatggcgatctgcggtttgacggcgggcacgatgtcggcgatggcgtcgatgatcgtgcggttgtattcgaagtaggcgacggccagctgcgcggattcgatttcctccggggattcgaccgagtcacgcacctcgtcggcaaagctcgccacgacctgcggcggtaccaacgcctcggtggggtcgaggcccacgacgctggggttctgagtgttgtcaatcgcttcgatcaggcgatccatgctgctccttatgttatctacagacggctgaacatcagctgggagccgatgatcgtggcgagggggcgtccggtgacctgccagccgccgaacggggtgttacgagccctggagtggaactgttcagggtccacggtccattcctcagcggtgttgagcaccacgaggtcgacattgtcggcgtcatccacgcggctcaggtcgagcagtcggttgacgccttcacgctgcggctgagcgtcgctctcccccgcaatcacgccatccggatcatccccagtgggcgcgggttcggcgtagtcctcgaccagcgcggccacgtcggttggcacatgccccatgagttcggcgggtcccacggacatgagctcgatcagacgctcatcggaaatgaagccgccgtcgacgagcaccttgtggcacacgccgtacgcgcattccagtccgatgatgccgttgggcgcctcaaggaagccgagttccttctctgccaacgtgtgcggcgcatggtcggtggccagcagatccacggtgccgtcggcgatggccgcgatggtggctttgcggtccgcttcggagcgcagcggcggattcatcttggcgagcgtgccgtacttgagcagcgcctcgtcgctcaacgccagatagtgcggcgcggtctcgcaggtgattggcaatccttcggccttggccttgcgaatcgcctcgaacgagatggcagtgctcacatgctggaagtgtacgtggacaccagtgcggcgggccgcttctatatcgcgggccacgatcttgagctcggtgtcttccggaatgccgggcacgccaagttcgcgcgagaccgggccttcgttcacggcacctgtatcgtgatgctcgcaatgctcgattaggtacaggtcggaggccttgacgttctccagcacctggtccaggatctccggcgtcacagcggaaccgtcgtcgctaattgcggtgatggggtgcgtgagcatggccggcgtcttggcgtcgtcctcgaatccgggcacgtacctgagccagtcggcaacgtcgcttgcctcatgaccggcgcgatccttggacgcgcacacgcacagatcgtaacgaaccggcaattgaacatcgtgcgcagtatcgtactgctgcaggaagtcgatgacgttgtcgaagccggcatccagaacctctttcgcaccggccgcttccaggtcagacacggtctgcccatccagtgccggcaacgtgttcggcatgatgagcacgttcgtgtatccgccggatgcggacgcgcggcagccggagaccatagattccttgtaggtctggccgggatcgcggaagtggacgtgcgggtcttcgaaaccgggggccacggtcagtccggtggcgtcgatatcggcaccgtcagccacggcggaggtgtcggcgaagtaggcggcagcggtcccgggcaccacgaggtcgatgacttcgccggtgttccagaccttgatgttgcgtagggtgatgctcacagtttggcttcctcgtcgcagtagtcgcagcggtattcgagccgttcagagtgcacgaggtggaacatctgcttgatgccgggctcggtggtggtcacgcagcgcgggttcacgcaggagatcacgccgacgatgtgctcgggcaggttcggctgcttcttttcgacgatcttgccgccgcgcaccacgtctacggtggcctggcaggccacgaagccgagcacgtcgaggtcgatgtccttgtcatcctcgattttgatgatgtccttggagccgtaacgcttggagttggcgttcatgatgagcgcaagcttggttttggccggttcgattttcaggtattcgagaaccttcagcgaggttccggccggcacatggtcgatgatgatgccgttctgaatgctggtgacttccatcaggcctgaacctccttggggttgagcggttcgtatccgggtagttcgtcgcccaccacggtgctttcgagggccatgcgcacgagcatgccgttcttgacctgttcgaagtaggcggcacgcgggtcgtcgtccacgtccacggagatttcgttgacgcgcggcagcgggtgaagtacggccatggacggcttggcgagctgcagcttttcttcgtcgagaatgtaggtgtcgcgcaggcgcaggtagtcgtcttcgttgaagaagcgttccttctgcacgcgggtcatgtacagcacgtcgaggtcgccgatcacggaggccaggtcgcgcacttccacgtaggagcagttgtcagtggcgttgatgcggtcgatcacgtactgcggggtcttgagctcgtccgggctgataagcacgaagcgcacgttgccgaagcggcacagggtctcgatcagggagtgcacggtgcggccgaaggtcaaatcgccgcacagtcccacggtcaggtcggtgatgcggccgaagcgcgactgcagcgtggccaggtcggccagcgtctgcgtgggatgcatgtggccgccgtcgccggcgttgatcaccggcacggatgcggcgcgggaggccaccagcgcggcaccctccttcgggtgacggatggcgaccacgtccacgtagttggacacggtcttcaacgtgtcggcgatggattcgcccttggtcacggaggccagctgcgcgccggcgaatccgatgaccttgccgccgagacgcagcattgccgtctcaaagctcaggcgcgtacgggtggagggctcgtagaacagcgtggccagcactcgcccatcgcaggtatgggcaacctctttgcggtgggaatcgatgtattcggccttatgcagcaggtcgagaatctggtttgtagacaggccgtccagcgttacgacgcttttgccgaccattggcgtttcttcagacaaggctcaccttttcgctcgtggttttcaggtggccacccttgtgtgacctaatataacttacgccatttttcggacagccgcattcaccgagtgttcacctgaaaatccaacgaatatgctgtgtctgtatagctgatatctgctttggaacgccagagctcattcattaggtcgatttgacgttcattaggtcactgcaccctcgtatctgttgttggaatgccgccattccaacaaggtatgcggcggcggaccgacctaatgaacgatgaatcgacctaatgaacgtagtgaacgcaatacaagaaaggtctatcgctgcgcgcggcgtcggttccgctccagtcgcggtgcgatcacgtgcatacgcgggcgaagcgcggtttgcggctgctgcgttgcggcggaggccgtggcggtggttgccgcagtcgcctcgtcttcggcctgcccgtagaacaggcgctggcatacgtcacggcatttgcgcatcacggccagcaggtcgttctcgaaatgctggccgcggtgggcgccgtagccgaggtagacggcgatgccgcccagcgaatagatgtcatcaggcagaatatcggcctggttggcgcgcccgctccacagatagttgccgttgcgggccgcggtgcacaacgtccatgccttgcgcagctgaatcgcatcgatagcgctgatgagcttcttggcctccagcacgtccaatgcctccaatgtgccgttgacgcgcagatctttgatatcgccggcgtgctggagctgcatgagttgcacggtccattccacgtcagacagaccgcccttgccgagcttcagatgacgttctcgacgcacgccgcgcggcagacgctcggcctccatacgggccttgagcttgcggatgttctgcaattcggcctcggtcagctccgtggtcgggtagcgcaacgggtcggcgatgttgatcaggaagtcccgcgccagttcggcgtcgccggccgcgtaccgggcgcgcagcagcgcctggcgctcccaggtcgaggcccaggattcgtagtattcctcgcaggaggcgtaggagcgcacgagcgggccgttcttgccttccgggcgcaggtccaggtcgagttcgatcttgggttccagcgtcgtcgggccttgcaggatgttgcgcaggtcttccacgaccttcttggcgaaggcgttggcttggccgtcgtcggcatcgtcggccggacggtagatgagaatggcatccgcatcggagctgaagttcacttcgcgcccgccgtaacggcccatggcgatgacggtgatgccggccggcgcggtttcgacgccgaacgcggcgatctggtggcgcacggcccaggtcagtgaggcgtcgatgatcgcgtcatacacgtcggtcatggccttgagactgtcggagtcgctgatcacaccgctcatccaagacaggccgatgcgttcgatttcgtggcggcgcatggcgcgcatggaggtggcgaactcgttgatgttcgagccgaaacgttccagcgccgagccggtctgcacatccaatgcctcgcgcgtgcgggcctgcagattgccgtcatcaccgagccaactgatcgattcgaccgacttgttgagcgcgtcgcccaggaatcgcgagttggacaggatgtggcacagacgctgggcagcggaggtggagtcgcgcaggaagccgaggtagccggattcggtgccgaagttctcctccagcttgcgccagttgagcaggcccatgtccgggttctggccctcgcccagccactgcaagacggcgggcaggatgatgcggttgattttggccgcgcgccccacgccggcagtgagcgcctgcacgtggcggatggcggcgtccgggtcgccgaagccgatggattcgaatcgttcctgtgcggcctcgacgctcagcacgatctggtcgttctccatctgggcgttgaccggcagcatcgggcgatagtagatgtcgaggtgcaggtggcgtacttcgcgacgggtgtcgtcgtatttgtcgacgagttcttccgggtgcaggccgaatgcgcgggcgaggcgacgcagctcctggttctggttgagctcatccacgtcgatgtcgcgcttcttttcgaggcctccgaccgaggcccggccgaggtccgggaacaggtgcgtgcgcttcagggaccagatctgctggcgatgctccatcacgcgctcgaagcggtagtcctgggacatgcgcacggcctgtttgcgcgaaacgtagccgccttcggacaggcgctgcagcgagtcgagcgtgttgctggtgcgcagcgattcatcggtacggccgtgcacaagctgaagcatctgcacggtgaattccacatcgcgcagaccaccgcggccgagcttgatttcgcgatccttcagaggtgcgggaatcagatcttccacgcgcttgcgcattttctggcagtcgtagacgaagttcttacgcttggacgcgctccacacgaacggccgagtcatatccatgtaggcccagccgaggtcggggtcgccagccaccgggcgggccttgagcaacgcctggaactcccagttctcggcccactgctcgtagtagttcttgtgcgaggagagcacgcgcaccagcgcgccgtccttgccttccgggcgcaggccgccgtcgatctgccacagcggctgctcggccacgcccatgatggcggactggcagacacgctgcaacatggtgcccatcttggtgcccacgcggatcagcgtctgatggtccacgtccttgtcggccggttcgaccacgtagatgaggtccacgtcggagacgtagttcagttcctgtgcgccgagtttgcccatgccgatgatggtgaagcgcacgtgctcgctgccctcggtttcgtggcgggcgatggccagcgcgccttcgagcgccgcgtccgcgaggtcggacagttcgcggctgatggtcggttggatggaggccgggtcgtccgccacggcatcctgggcgatgatggcggccagttggttccggtagctggaacgcaaggccgtggccgcttcggccagatccttggaggcgacgggcatggccggttcgtccgggtccgcgccgaccgccttgagcagacgtgcacggcgttgcgcgtgattgaacagatggctgttgcagttgtcgactgctgcggcctccacaagctgcggcttgaagcgcatgaacttgcccatcgcgtcggagacgccgagcaccgtgaccagacgcttcagggcgtcgttgtcggggatgacgtgtttcagatcgcgctggctggattgcatcgcgttgacgatatccacgaaattgctcaatgccatatcggggtcgcaggcgtgggccagcatgctcagcagttcggtgcatcgctcatcgggaatgtcgtccgccttgagctggtcgaacaaggtgcgggccttgtcgaggtcttgcagacctgccctgatgagatccatggagctgggtttgaacatcgacgattccataagattccactatatacgctcatgccctccgaatggggcatgagccgggaaggagtcatcgggcgacgctgatgagctccgaggaatccatatcgtaatcggccatggcgtaggaacggatggcggggtcatcataggtgttcatgtaataggtgttggtcttggacgaatatccgctggtgaacagcgtgcgttcgaactggccgtcgcccatcttcgccatgccgtccaccatctgcacggagccgagggtgtggaacaggcgagacacattggcggcttcatcgttctgctgcgggtaatgcgcgttggtgtaggccacacgaacgaagcgcgacggggagctcacgtcgcccgggatgccatgcatgcccacacccgcaccccaggcggtcaaggaggccttgccccatgaagtcggttcggccatctcgttgctgacgcacatgtagttgcgcagattttccatatggaagtcgaacgtcggctgattggtcagcacatcgacgtcatcatgatgcacgtgcatgccatcggccatctgctcgacgacgatgctgcgcttgccgtcgccgatgaaccagtgcagcagagactcctgctgtcccggcacgatctgggagacgagcgtcacgttcctgagcgcctcctcgacctcgtcgacggagtcgaaattacgcgccacccacagcggaaattcgaacgtggcgacgttttccgtgccttcgaccggttcgtggacgaacgaggcgtagccggggaaattcaagccggcgatggccagaccatgctcattggcgcagtcgaaatacatcggcctatcggccatgaccacgcccacgccgatcaccgcgttcggcttcgccttgccgcccgcaccgaacaccgtgtcatagtggtagccgcgcggagtgaccaggatggtctccccatatgagaaactccagtcgagattacggccgaaataggtgttgccctcatcatcggagaaacggacaccagtgcacataacggacttccttccatcgctttggttggcttgtacgttcatgatacccatcggccgctgggggaactctgggtttcgccagcagattaacgtgcggcgcgacgcattgagatgcgccgcgccgcgatatgcgtcaaccttgcgtaccgaggaacaacggttccgcattgcgccagatacggcgcgtggtggcggggtggttcatcgaatacaggtggacgccgtccacgccgtgggccacgaggtcggcgatctgctcggaagcgtagaggatgccggcggcacgcagggactggatgtcgtcctcccacttgttcagcagggtgttgagcttgtccgggatacgcgaggcgttgcgttcggccatgcgacgcacggacttggcaccacgcaccggcatgatgcccgcctcgatcggcacggtgatgccggcggcgcgcgccttgtcgaggaagcgatagaagtcctcgttgtcgtagaacagttgggagatcaggtgagtgacgccggcatcgaccttgatcttaaggttttcgatgtcctggtccagcgagtcagcctggtagtggccttccgggtagcaggcgccgaacactttgaggcccggcttcacggagcggatgtatgacacgaggtcgctggcgtggttgaactcgcctaccagctgctcgccgtcgatgtagtcgccgcgcaatgcgagtacggcgctcacgccggcctgctcgaacatgtcgagggcctcgtcgattttcgccttgtcggaatacaacgcggtcagatgcgcgactgcgggaatgccgtactccttgctgatcgtatgagcaatgcgcgcggtggcggtgcggtcggaatgggtgccgtgaccgtaggtcacggagatgaagtcggggttcagcccttcgagtccgtcgagggtgtcatagatggtgtccacgggagcgttgcgcttcgggggaaagacctcaagggtgaacatcggggaatgcatgctgatttccttacataaacccgagctccctcatacagagggagctcggtgatttccgctacttgtcgagcttggcgcgcacggccttggcggcggcgaccaggttctccaggctcggccaggtctcggcgttaccacgggtcttcagaccgcagtcggggttgatccacaccttcttgacgtccatcttgtcaaggatctcgtagatacgatcctcgatctccttctcggaaggaatacgcggggagtggatgtcgtagacgcccgggccggcctcggtctcgaagtgcgcgtcatgaatggcgtcgagcaccaccagatcgccacgggaggcttcgaaggagatcacgtcagcatccatcgcgtcgatgtcgcggatgatgtcgttgaactcggagtagcacatgtgggtgtggatctgggtggtcggcttgacggcggagtgcaccagacggaaggccggaacggcccagtcgaggtacttgacgtgccagtcggacttgcgcagcggcagcttctcacgcagggcggcctcatcgatctggatgaccttgatgccgacggcctcgagatcgagcacttcgtcgcggatggcgagggcgagctgcttggtctgctcctcgtgggtgatgtcctcgcgcggccaggaccagttgaggatggtcaccgggccggtgagcatgcccttcatcacgtggtcggtcttggactgggcgtacgcagaccattccacggtgatcgggttggcgcgggacacgtcaccccagacgatcggaggcttgacgcaacgggtgccgtaggactgaacccaagcgttcttggtgaacaggaagccgttgaggttctggccgaagtattcgaccatgtcgttacgctcgaactcgccgtggaccagcacgtcgaggccgatctcctcctgcttcttgatgacggcgtcgatctgggccttgatgaactcgtcgtaggcttccttggtgacctcgcccttgcgcagcttggcgcgctcggcgcgaatctccttggtctgggggaaggagccgatggtagtggtcggcagcagcggcaggccgagggcctcgcgctgcagggcctgacgctcctcgcgggcaggctggcgcacgtagtcggcgtcggacagcttgccgatgcgctcggcgacggccgggtcggcggccacgcgggtgccgtcgaacagggcctggttggcggcgagggcggcggatgccttcttctcgtcctcggtggcgtcggccagagcggcgacttccttgagctcggtcagcttttccacggcgaacgcgaagtgcttgaggtcttcggacgagatgccggtctcgccttcagtgctgaacggcacgtgcagcagggaggatgcggtggagacagccacgttggcggtgacctgcttcagggcgtcgaccaggccgagggaggtggcgtagttgttgcgccagatgttgcggccgttgatcacgccggcgaagatggcggtgttggaggccacgccatacttggcgacggcttcgaggttctcttcacggccttcgttgaggtccagtccgatgccgtcgaagccgagcaggttgacggtctcgtacacgtcggcgatgtggccgaagtaggtgttgagcagcaccttgacgttgcccttggcggacaggatcttggtgtacagggtcttgaagagctccacatcgcccggctccttgtcgagcacgaggtacggctcatcgagctggacccatgcggcgccgagttcgttgaacttgtcgagcacttcggcgtagacggcggccacggcgttgaccaggcccttgtcgagctcgagttcggtggcttccggggtgcgggcgagcttcaggaacgtgtacgggccgatgaacacgggcttggtgtcgatgcccagcgccttggcctcgttgaactcgtcgaacggcttggtggagttgagcttgatctccgcggccgactcgacttcgggcaccagatagtggtagttggtggtgaaccacttcttcatcggcagggcggtcacgtcgcccttgtcgccctggtagccgcgggccatggcgaagagcgtgtcctcctggttatcgaaggcgagacgctcgtaacgcttcggaatcacgttgaggaggatggcggtgtccagcatctgatcgtagtagctgaagtcgttgctggggatgaggccgatgccggcggcctgctgcagcttccagtgcttggcgcgcagttcggcggcggtggccttaacggcggcgaggtcgttggcacccttccagtagccttcgatgatcttcttcagttcgcggttctgcccgatgcgggggaagccggagacggaagtcagagtggacatgaatcctccaatgtatgcgttcgtaacccgacttagggtagcaaaacatccggattccaccccttataaatggccgcagagtgtcgttatagatggaatttatatccgctttagtcgaagtctttcacattgatgaccgcgagcagttcgccgctgtgcacctgccattcgtcgaacggtttgttcgatcccatgatcacgatggatgcgggcgaaagtcccaagttgagcaggtcgagtcgttcgccgtcggagtcggcggaggcgagccattgggcgctgatcgacacagtcggctcgtggcccactatcatgaacacgcggttcttggccttgacgtgggcgagctcgtcgaacaccgcctgcactcccccgtcatacaggctgatgcggtagtcgacgatcggcttgtcgccaaaggtcttgagcatgcggtccagtgtctggcgcgtgcgggtggcggacgagcaggagatctggtcgggcaccagtcccagcgactcgatgcccttgcccacggccttcgcctgtttcagacctttgtcggtgagctcgcgctccgagtcacccttgtcgccgaacggctcggccttggcatgcctcatgatgatgaggatatggtcgtattttttcgctgctttggcgactttgctcagcttgatgcccatccgtggctcccttcacgaaccgtctgcccggtgtggcggtgtggtgttgcttccagtatagaggtgtgtgagcgttcacaaactcatcgtcgggcggttattcatgcgtgttgccgagttctcccacctgacggtcgaggtcgcgcaacaccttacgtagtttgtggtcggagatgtcgcgcagttccagttcctcgatctgcgcctcacgctgttcgtcggtgagcgagtcgatgtcggtctgcgtgtccttggtcacgcgatcgcgctttctgagcgcctcgaatccggaggccatggcgcgcgagataacaaggaaaccggtatggccgatcatctggtggtcggggcgtacggcgaggccttgggccttccatgtgcgttcgaacgattcctggatctgcggctcggtccagcaaccggccgcgcgcagggcttcggccagtcgactcatctgcgtggtggtagttacgtaactgaccaacacgccgccgggggcaatcacgcggtatgcctgctcgagtctgttccacgggtcgagcatgtcgagcatgatacggtcgaaccagtgttcgggcagttcggcggccacggagtcgaagtcgccggttttgagatcccaccagctgggggcttcaccgtaatacagcgtggcgttggcctgagccactttggcgaattcggggcgcagctcgatcgtggtcagatggccgcgctcgcccacggcgtccagcagattcacgctcatcgcgcccgagccggcaccggactcaagcacgcgcatgccggagcggatgtcgccgagctggacaacctgggcgatgtccttcggatacatgatctgcgcgccgcgcggcatcgaaagcacataatcggccagtcgcgggcgcatcaccgcatactcccagccgccgatggcgcgcgacgatttccacggcttgttcttgtctttctcggggtagacctggttgacctgcgcctcacgcttggcgtgcacggtgaggatcacggtgccttcggtcttgccgatcacatcgtcatgcagaatcaggccatgctcggtctgcgtggagccgccggccacaagctgatcggtgatcttcttgcccttgcggtcggtgaactgcaccttctcgcctgcggtgagaggcccgcgcctcggctccataacttgctccttgtgtgctcggtgggtcaatcgctacaagtctaatgcatgtaagctcgttggtgaggtgatgacgatgcgaatgcagatgacaagccagatcgatgccggcggcaatgaccccattttcctgatgttccacggttacggcaacgacgaaagcgagatggtgcggattctcgacgccgtatatgcgccgacgcgagccgatgcggccccggccgcaattgccgccgtacccagctatatctcgttccgtgccacctacgcgaggccctatatgggcggcaattactggtatcccgacggctgcggcgtggacgagcgccaacgcgaatgcgcggcggtcggggatgcggtggcttcactgctggatgcctcggcattcgcccatcgcaggaagatattgatcggtttctcccaaggcggttatctgtcgtatcgtctggtcaaggcgcatccgacgttgttcgatgccgcgatcctgctcagtccttcgttcatgggcgaggaacaggcggcgcttgactcccctacccgattcttcctggcgtatggcgcgcaggaccgcacgattccgatgcccgaccagcaaacggcccatcaggtccttgaacgggccgggcatctgacctatcgcgagtattccggcatggcccatgccatctgtgatgaggaaatcgccgatatccgggatttcctacgtgccatatgatgccggaatagcttcaatatggaatatctccgttcaaagaggtaccggtccaagtagaagcggctcaacaatggcggaatggcgttggccacgcccattcatcgcgcgatggttctgcgatcagctcaattcccctgccggctgatgccgcccttatgaccggtggccttgaatggcgtggcgcgtgccgtcaccttcggccccggcagattcgtactggtattggatcgaccgcggagcccggcagccggctgggactcggagcgtcgaccagtacccgtgatgttggtatgccgtttgccgtcgtgcgcccgtttctcaccagcaccttcaacctcgtcaatatcaatgcctttggcgcgcaaagcacgcgcccaccgctcatccatcgaactcctcacacatcccattcgggtttccacgtgtactgcatgtcgtaggcgctgggcgaacggcggcaggtggttcagggtgatcggaccgaatgcggcggcgtcaaaagacatcgtttgcccccttcgatggtgttggccaacaggttccaagggtcaggcacagcgcctttctcaacccgttcgccgccacgatgaccggcagcttgcgttcacgggttcccctgcaatgcgcctcattatggcaacacgaaccgacaggtgccggctgcgcctaggatgggaaatcattgctgcacgccgaaaagggaaggcgactgtcatgaggtatttcacgaccgacacgcatttcgggcatccgctggtcacggtgttgcgagggttcacgacgttcgatccgacgcgctcgcgctatgaggaggtgcgacgcgcatgatcgcaagaccgccgaggattgggccaaggaggagacgttcggcgcgggtctgacgtttcgtcaggtcgccgatacggatgcgcatgacaaggcgattgtggatcatatcaacactttggtcggcccggatgatgagctgtggattctgggtgatatcggtttccgcacatcgctgacccatctgaagaactgcctgtgagcgctcaattgcaagcatctgcatggtgtgatcggcaaccatgatgactggtggcgggaagaccgccccgcacttaacctgttcgaaagtttggagccgcacgatacggttgagattgagggactcggtacggtcaatctttcgcattacccgtatcgggaggatctggcatacagttggcccgatgatgtggcgaagttcagcggcaaggcgttgccgtttgacggtcgcaggctgctgtatggacatacacatcagctttcgccagatggtgcacgcccggaggcactgaatgttggcattgacacagcattgaccgccgttgagatgtatgcacgctgaacacgcgcctcaatggccttggtctcgtcatctctcgctcacaccaacggattgccggcaagacgggtcaattcggcgttcagctcggggaaatgctcgttgccgacgaacggaccgtattccgtgccggattggaatgggcaccatgcctgaatggtcatatgcttcagtcgtgaataaggcaggatgtcaccggtgcgatcggctgcgggatcgctcgccatattgaattggatttcagcgtcgagcatctgtgtatgcattccgccgtgtcgaaatagtcgatgccggaatcatgggccacggccacggtacgtgccgcatcggcggcatccaacgcgtccatgcgcatcacgcccagcgccactcgtgacgcaatcatgccgggttgtccgatttcctgagtcttcatagtgtctcatttctgttatcgtgaatcggcgaacgggcactgtccgcttcgttgccgggcagcaatctccattgccgctgcttatgtcaccttatcgcttgaagtgcacttgaaggcaactcgcaggcaggcagcgcgcgctgccgggcgcgtcttcgcgccttcatgtcttcgctgtgaccgagacatcgttgtgccgtaatcatgcccatttcttgtatgatgacctctatagcaacagagctagggggattccatgaacactaccgattcagccaaagtcaccgatgccaatgccggcgcaaacaatgccatccatatcccgcacaatcccacgcttgccggattggccacgctgacccgcaacgtggcgtacaagaccggggccgatgatctggtgatggatatcatcgccccgcaatccaccggcgatgacgatgaccgccgctaccccaccgtggtattcgtgcaaggcagcgcctggaccacgccgcatcgcgactacgagatcccgcagctctcggctttggcccgcgaaggctttgtggtggccacggtgaatcatcgcgacgcctcgagcgatccccatgacgtgttccccgcatatctcgaggacgtcaaagcagccatccgctatctcagggcaaacgcacgtcaatggcacgtggaccccgaccgtctcggtatctggggcacgtcgtccggcggcaacacgtcgctgctggtggggttgaccgccgacgatccgcggtatgaggac

SEQ ID NO: 865 - DNA, 5311 bp, Unknown
  R14_18m  MAG No. k141_13675
cccaagaaaatcagcgagatcatggtaggcctcgtcgttgagagacacgcgatcctctggagcaagtagttgagccaaacggaatacatcatatttatgcttcttgagatcttttccgtctacgtgctcgccatgttgttctcgggcgttgagatccaaccatgctttcgccttgaaaggaatgagatatttctcgttaagcacgctgatgccttgtattgattcgcggccttgctgcagtagccgatagtagctgtcgttcagcatgatggctgacaggctggaaacgtcgtttgcaatatgcaatggcgtcaggaacgagttcggcacaatagggaagtcagggtgacgtgaaaatagctcgatcatagtgggatacccgtacgtactggggtgcatgaaacggtacaggtgaggctgtgcggagttcttcgtgatagaggtgtatccgccatcgcgaatgaaagaccacaatcgttgtgcaaactcgcgaagatgtccctcggcaatcagcaccatgtcaatatctttggtggctcggaagtccaggtcgttgtcggtcatgatgatgtcacaagcggtgccgccgatgattacgtaagaatcttcgtagccggcaaaggccgttctgatgagctgcaggccttgtgtcatattgtcactcctgagaaagtattgcggatggattcttgtatggcgtcttccaaacgttcgtcggcaatctcgccaagagtcagggccgtggaaatggggtcggcaaggtagtcttcctgcgtatattgagcaagtaggcggggatcgtacctccacagctccagaatatatgcattatctggcaccttttccaaagcggggtcgataatgcatagttccttgttgtgctgcttgagccaatgacgttcaacggcatagattcgcagttttggggtggccagttgcgtcctgcgcgaaagagcaaattcgccggccggaatcagctcgtcggcaatcatctggcgattgcgattcgtgacggtatatttgctgaatattggtgacttcaggagatgccaagatgatttcagtaaatcaagtcggctggtctgccttgaagtcagtagttcgacgctattgctgcggccttgcttggtgcggtgcacgaatgccagctgttctaacagcgtcacggcaacgctgacctgagcttcggtaaactgaagcgctcgggcaatatctgattggactttgctctcgttggagtagagcaaatacagccagaccagctgtgttgcgggggagaagggtcgcacctcgatatcctgtgcgttctccagcggccgtgaggagatgcgctgggtgaacaccatgcccagtgaagggatatacagttgggtaccgggcacgatgaaaggaacgtgattctgaatcaaggcttttcgctggtatgcagaaagccggggaaactgaaagacaatgggcagatccgtccgctgctcaagcctgctggcgtcggcggtgacgcgtgtgatgctgaatgggtgagcctctccgctcgcgattagcatgctcgtgttgtcgatggtgagtttgctgaatgtccgtccgttggtcagaaatagcggcagtgaggcagtgccatcccaagaagtgatttggcagggcagaccaagtgtctcgcgaatgtaatgctcggcatccatgtcgacctcaatccttaacgaaaatctgtaagattcacatctcttgttaagtatatagaatattattaagtatttcggggttggcatgtcgcgaatggaaagaaagggcagtcatccccgaaatggagacagcttagccgggaaaaaggacgacgccagcatccggagaagatggatgactggcgtcgggtaagctcgcaaaagctctacttgataacccacgcagaagtgtcggtggggagctggccttcgggggtcagcgggccggacgccagcaccacggagccatcgggcagcgcgaccggggcattgccgaagttggtgattgaggtgaacacccgcccgccaaccgccgcgcgggtgtacgccaccacatcgtcgcccatgtccacctgctcggccgtggtgtcgcgcgtggcggtcagcgactcctggcgaatcgccagtgcggcgcgatacagcgcgagcatcgagtccgggtcggcttgctccacgtccaccgcgtaatccttgaaccacagcggttgcggcaggtgcgggtcggcggccggcgtcacgccctcagcgcgcgtagccggcgagaagccgaaggaagcgcccgtgccgaactggccggcggcgcacagcggcacatggttctcgccggtaccgtcatcggccggagtcggacggctgaagtcggccaaggccggctcatcggcggcggtccacggcagcggcacgcggcagccgtcgcggcccttgtccatcgtggcctgagcagtgtggaaagcggtcggatcctccaagtgatcccacggaatatcggccacctcaaacaggcccagctcctcgccctgatagatataggcggcgccgggcaggccgagctccatcaaagcggcggcgcgggcgcggcgagtgccaagctcgcgatcctcgggataggtagtgccgttgcgcagcagccagtcgtgcggcagctggtggtagggcgcgcccttgatctgcggcaggccgtaacgggaggggctgcgcggcacgtcgtgattgttcatgacccacgtggtggtggaaccgccggtttcggccgccgccttgagtccggcggcgatggcctcgcggaactcgtcggcataccagttggcttgcgcgaagtcgaagttgaaggactggcccagctcgtccatcgaagcgtacaggtgctggtgctcgggcaccacccacgcctcggccacggcaaagcgcggcgggttgtactcgttgaacaccttgcgccattcgcggtagatatcgtgcacctcgcgacggtcgaacagcgggtggctgaagtcatgattcagcacgccgaccacgctgtattcgcggccgagctcttccaacggcttggattcgaggtccttggccaggccgtgcgccacgtcgatgcggaagccgtcggtgccgtggtcggaccagaaacgcagggtcttcttgaactcctcgtggatgtccggattcttccagttgacgtccggctgcgccttatcgaacaggtgcagataccactggccgtcggccacgcgcgcccaggccgggccgccgaagaaggattgccagtcgttcgggggcagttcgccatgctcgccgcggccgtcgcggaagatgtagcggtcgcgcgccggggagccgggctcggcggcgagggcctcctggaagaacacgtgcttgtcggcggtgtgattgggcacgatgtccacgattaccttgatgccggcctcatgcgcggccttggccatcgcgtcgaagtcttccatggtgcctaggcgcgggtcgacgttgcggtagtcgattacgtcgtagccgccgtccgctaggtcggaggggtagaacggggaaagccagatggcgtccacgccgaggctcttcaggtagtccatcttctcggtgacgccggcgatgtcgccgatgccgtcgccgttaacgtccttgaagctgcgcgggtaaatctggtaaacgacggcctgcttccaccagtcgtcattgaggttatttgcggtcatgccgattccctcctgttccgggtgcgttgtggttgggttgttccggtcgcgcccgaactgctgtgtgaaggcccaaccgttgtattgatgatgacaacgatatcatatgaatcacacatgcaaaaatcgatttatcggcgttttgcggtggtaacgtggtcacgcctgcgcgggcgctgctgtcgcggcaggcggcgcggtggtttcgcgcagtattagcggagtgtccggccgtacgaatgccggttcgattgacttgccggcaatggcatccaataccatgtgcccggcagtcgcgcccattgcgaacgggtcctgatgcagcgtggtcagtcccacggcggcggacagggtggaatcgtcgaagccgatgatggaaatgtcctgaggtacccgccgcccgtattgacgcaggcgatacagcacgggcgcggccatttcatcatcctcaaaacagaaggcggtgatgctgggggaggcgttcagtacggcgttcaatgccgcgttgctttcgccaagaccgcgttgaatgctcaggggcgttagctcgatccccggatgggcggcagcggcatcaatgacgccctgcaaacgagcctcggtactgtagcgcatattggtttcggtcggtgcgctgccgacgaacgcgatatgccggtggccgagtgcaatcaggtgctcgatagccgaacgtgtggcggcgtaatcatcaatgctcacgcctgcgtcgaacccatcggtggaggggatgttgatgccgacaatcggcacgtgcatatgcttcagtcgctccacttcagccggttcgatgtcgaaggagctgacaatcaccgcatccgcattgcgccgcacgggcaaatccgcaaagaagtcgtggcgctcggcggcgttgcgcatggggtagggcacagtgtcgtagccggaggggcgcagcgccgagtcaagaccggcgaagatgttcgaattgaaccaactggcgatggtctcgctggcaagtagtgcgatacggaacgattggccggattttagggcggcggccgagcgtgagactgagtagtcgagcttttcggccgcggccatcactcggtctcgagtctcgggaagcaccagatccggcttggcgaaggtccgggacaccgtggatacggaaacgccggcctcgcgggccactgcctgaatgcttgccttggtcatatgccgtcgctcctttaccgtcgcgaacaatcattgtcatgacaacgataacatgcccataacaagtcgtcgtcttcggctatctcgattacgaggggctgatttagggcattccggacatctacttccgtttcaaggggctccttgccggtgaaaccacaagtgcaaacgactttgtgccaacgtcattccgccgttctcgcgctgggtctacttgggcgccagccccttgaagcggaagtggatgtccgggaaaggccaaatcagcccctcgaagccgatttagaccaatttcccattgcggaatcgatcaccgcttctctcggcgcatcacggcggctagggactgcacgcgtggcaggtcgaagacctcgtcggtatgcaccacgtggcctgagctgtccgccagcggcacgc

SEQ ID NO: 866 - DNA, 22479 bp, Unknown
  R14_18m  MAG No. k141_14060
cgttttccggccacgccagagcttacgatataagctatggcacagatatttgacgcaccctcgaaggcaattctgcgcagccaaatcgcagagcatattgccgaaaacgacaacaacgaccgccgcgtcgatcaggaaggcgaggcaccgctgcccaaggaccgtttcttcgaccgcgagctcagctggctcaagttcaaccagcgcgtgctcgaatgcgcggagaacgaagacatgcccctgctcgagcgcgccaacttcgccgcgatcttcgcctcgaaccttgacgagttcttcatggtccgcgtcgccggcctgaagcgccgtatcgactcgggcatcgccgtgccgtctgccgccggcctgagcccgcgtcagcagctgcgcgcgatcagcgagaccgcacaccgtctgcaagacgagcacgcacattacgcgatcgacaccattctgccggaattggagaaggagcgcatcgtcctgctgacgtgggacaagctcacctcctccgagcaggagcgtctctcgcgttactaccgccagcaggtgttcccggtcctgacgccgctcgccgtggatccggcccacccgttcccctacatttccggcggttccatcaacctggccgtgattgtggagaacccggcctccggcaagtcgcacttcgcccgtgtcaagatcccgggcaacctgccgcgcctggtgccggtggacgacatgaccgacgaggagtccaaggacgagcgttacggcttcatcgccatggaaaagctcatcgccgcgcatctggaatccctgttcccgggcatgatcatcaaggaagcccgctccttccgcgtgactcgtaacgaggacatcgacgtggaagaggatgacgccgagaacctgctcaacgccatggagaaggagctgctgcgccgccgcttcggaccgccgatccgtctggagatcacggacaccactagcccgttcctctcccagctgctcgccgaccagctcggcgtgagccaggacgaggtataccgtctgcccagcccgctggacctgaccgtgctctttgagctcggcagcgtggaccgcccggacctgaagaaccgtccgttcgtgccgaccacgaaccgtcagatcgccgaggtcgagtcctcccgtgcgcaggacattttcgccgccatccgcgagcgcgacatcctgctgcatcacccctatgactccttctccacttccgtgcaggccttccttgcgcaggccgccgcggacccgaaggtgctggccatcaagcagaccctgtaccgcaccagctccaactcgccgatcatcgacgccctgatcgacgccgctcatgccggcaagcaggtgctggctttggtggaaatcaaggctcgtttcgacgaggacgccaacatcgcgtgggctcgcaagctcgaacgcgccggcgtgcacgtggtgtacggcatcgtgggcttgaagacccactgcaagctcatcgaggtcgtgcgtcaggaagcggacggtctacgccgctactgccacgtaggcaccggtaactacaacccgaagaccgcgcgactgtacaccgatctgggtctgctgacctgcgacccggtggtcggccaggatctgactcgtctgttcaaccagctctccggttacgcgccaaagtccagcttccaccgtctgctggtggccccgcgcaccgtgcgcaccggtctaatccagcgcatccgccgcgaggaggacgccgcccgcgccggcaaggaggcctggatcaagatcaaggtcaactccatcgtggacgagaagaccatcgacgccctgtaccgtgcctctcaggccggcgtgaagatcgacatcgtcgaacgcggcatctgcgctctgaagcccggcgttcccggcctgtccgagaacatccgcgtacgttcgattctcggccgcttcctggagcactcccgcatctacgccttctgcaatgcggacggcccgcagatcggcgagggtccggcttccggcccggaggtctacatcggttcggctgacctcatgcaccgtaaccttgaccgccgtgtggaggctctggtgcgtgtcaccgccccggagcaggtcgacgggctcatcaagtacgtggacctgcagatggccgactccaccatgagctggcacatgcagcccgacggcacgtatgtgctgcacaccaaggacgacgagggccgcccgctggtcgacagtcaggaatacctgattcgcaagcaccagcgccgccccaattcgcacaactgatttcactcgatgctccctgtcagcacgagctgactgagggtggttacgatgcccggctcctctttcgagaggatgccgggcatcgttgttcagcgcgcaaaaactacgtagcagcggtccaacgtgacctacaatacaagagatgggtacgaacagtatgagacgaatcgtggaagccgccggcggtattctgtaccggtggaaggatgatgccgagccgacgcaggcatcatctccatcagcgaaatccaatattgccaccgatggcaccatcatcgcgaacaccacggattctgacggcaaggccacggcagcacacggcgcatcggacgcggctcccaccccggacctggcgcaggccgacagcccggccgcggcggacaacgtactcaaccgcatcgaactgtgcgtcgtgcatcgcccgaaatacgacgactggagctggccgaaaggcaaggtcgacccgaacgaatcgcaccggcatgccgccgtacgcgagatcggcgaggaatcgggcctgtccgtggaacttggcccttatctgggcgacatcgagtacccgctgtccgaagaaggcagcaaacagcgccataccaaggatcggtcggcggataccaagcatatccagttctggatggccacgccgatcagcgccatcgacaacctgcggcgcacccatgcgtttggcccggtgcatcgggcggacatcggcgaaatcgacgaagttttgtggctgacgccggccgaggcccgcaagaagctcagccattccaccgataaggacatcctcgcgctattcgttgatcgggtcgaagaaggtgcactggacgcggtgccggtgattatcgtgcgccacggcaaagcggaagcgcgcaagctgtggaagggttcggacgcgaaccgtccgatcacgccgcgcggcgcggctgcggcatacgcgctgaaccgcgagctggcgtgtttcaatccgacccgactggccacgtcgccttgggtgcgctgccaggagacgttggagatgttcgcgtggcagaccggacgagacatggttcatctcgatccgctcaccgaagatgcatacgccgctgcgccggacaccgcatgggagtgtctactcagcgaaatcgagttcgcacttgagcgccgtcagcccatagcgatatgcatgcaccggccggtgattggtggtatgttcggacacctgcgcagcatgtgcgttgcgccgtctttgagcaaacgcctgatcgccaagacaccgttcatgccgaccggcacggcggtggcgctgttcgtcactccgacgcctcatggtcccaaaatcatcgatattcagaaggttcaaccgcttgtctactagacccgcatttcctgattcatccaactcctcggccgctgccgctgcagctcatgccgcgcacaatggtgccgccggcagtctgggcccgggcttcggctcgttgcgtgcggccggagcggcattcggacctgctcgcatgggttcttcacgcccctcgcgcccggctcagctcgacccggctgtggccgatggattggccggtggcatggacccgcaggcgttgagcgagatgagtcatctgtctgctgccgcattgctggatcgtgtgcgccatagcgaagacccggcggttgttgagcgggtgctcacgttggtggagacggtcggcgtggatgaaatcgccgaactgtggagcgatgccgagccggattcgctgcctggtgtgctgtggcgactgtatatgttgcgtacgtggatgcgatcgaatcgcgactcgatcgcgcatctgtggcgcttgggtgagccggtggccactaccgcctccgccatcgccggcgtggatcaggctcccagtgaagatgacatcgtgcgattggccgattcgattctctccggtgcttttgtgggcgattttgccgtggcgcttgagcgtgcggcggcgtttaccgatgtggtggcgttgggcttgcgcgtggaggcgcggcgcatggtgacccgggccgaggccaacggcgccttctcctcggatgccgatgagaaggccgtgcgcaccaaagccgcccgccttatgcacaccgccggcagcctcatggccaccgccaaggatttccagcacggtgccaacctctggcgtcgcggacggttggagtaaatcctgctccgggctccctctgatgagagagctgtcacgggcgatgcccgtgactgagggagaaactcaccaaccgcaccccaacaatcagctaccagccaacaccacacctccccggcgcggcgagccccatcgcaagctatactaagtatccgcgtcggaccgtgcttaagccccgggctccattttttgccgccgcgagcggcccttgcgccgacaggcgctttcgcggttcggcgcttcttttcttttacccgattcacgccccgaacgttgcgatgggcacgaccagtatgccgtcattgcggcgataggccttcccacctcggccggtaaggaacatcatgaactctggttcgcgaacttgggccatggggttgccacagattttgtcgcggaaggatttgagcttatccgcattgtcatcgttcaccttaaggtcactgagttttatttcgatagcaccccacctgccgtcagacaactcgataatgacatcaacttcaagccccttgtcatcgcggtagtaggcgatgcgattgttcgcgcccggcatggccgacagatatacattcaaatcacgaatgcacagcgtttcaaacagatcgccgagcgtctgtgtatcgcgcatcagagtattcggcgcggcacctaaaaccgcagcaggcaacgaaggatccacgaaatatcgcttgggcttggttcgcacacgactctttgcgcggagtggcggctcccaaccctccaaatccgtcagaaggtacaagtccttgagcattcccaaatagctctttactgtctgcgtatccggttcacggcgctcatcgccataggccatatccgcagccagcgtcgcatattttggtgcctgcgatacgttcacggcgagcgcacgcatgagtgcacgcgcggtttcagggttcttgttcatcttgggcacgctgatatcaagcacactcttgatatattcactcggaatttccagagcaaactcgtcatccaaatcaagatttgcgggccacccacctcgacagcaccatctggcaatatcttcaatgctggttgcacattcggcaggctcgaattgtccatcaaacaaaccagacaagctcactacaccggtagattgccctgactcgcacagactcataggccacatacgcaagcgagaaattcgacctgtgccactgtggtgaattgtttctcggtccttcggaatggccgagcccgtaagaatcagctgccccttgcgattcgcattgtcatccacatgacgacgagcggcatcccaaatttgcggcacatcttgccactcatccaccaaatgcggttcattacccatgagtaccaatgccggatcagtctgtgcggccgcaaaggtagcggcatcatccagacgatccatacttcgcgagcgggaaagcgccgtccatgtctttccacaccattttggcccgacgatttccaccgcgccgaatgctttaagtaacttacctaacctgccatcgaccacgcgagcacgataatcaggttgagtcaaggtatcactacgattgttcaaatcgttcattttccggcctttctcagctacccaatcacctcaatatagattttacacctttctcattcccggttttacactatttccattcccggttttacaccattccgattcccggttttacaccgcaaggtgtctagtttcttcctatgacttaatccaccgagaatcaatccaacgaatcttcgcgcacgactgcgagcgctaggccaaacttgacccattccgatgagacatatttcacaataccgtagctttttcagctggtttccagaaaccgttgacttactgtccggttcggcctagatacgctctttttcgaatctcatgaaatcaacgtcaacaccttggggaaactctcatgaaggcaaccatcaccaaagcgactatcgcagttctcgccggactcgcgatcctcgccgatgcctttctgcttttttcgatgaagatatccaatagacgccacgtgaatgtcattgccatagtgacggatgcacgcgcacgatgcgagcgtcgagccgctccacgatgtcgtggtgatgcgtggagaacagtacagtcttgccggcatcagtgaaggcgcgcaatacctcaaccactacgtcggtattgcgctcgtccaagccgtcggtcggttcgtccagaacaagcaggtccggattcatcgacatgcagcaggcaatcgccacacgctttttttcaccgccagacagacggtatggcgcccgctcccgcatccgatccaagccgaacaacgtcaccatgtcatcgactctgcgctgtacttcggcatccggcaaccccatctgcaacggaccgaacgcaatctcctcttccaccgacgggcagaacagctgggtgtcggagctttggaacacgaatccgatgcgctgatgcagcgctttggcgaacaggctgttcttcgcctcgacttcctcgcgaaccaccggagtaccgccaaaccgatactcgcctgagtccggaaattccagcgcattgatgatgcgcatcagcgtggtcttgccgctgccgttcggcccgagcagcgccacgcgctcaccgcgttcgacggtcagcgaaaaatcacgtagcacggcgtgcgacgaggtttcatcgtcggcgtcgccgtaatctttataggaaaagtcgatgtgattcagttcgaccagcgggtcgccgcggaaccatgagttatctggccgcatggttgcagtttgtttatgattacgctttaatccgaacattattgggctccattcattcgaaccaccctcatcccgaatacaccgccagcgcaatcattgcagcaatgcacacggcatacaccccgttgcgccacgtcagcagacgctcgtggtggatatgatacgtaccgtcaaacccccggcacaccatcgattcagccatttgccgcgcctgcgtattcgcacgcagaaacagcgcgcccatcaactggccggcggacgtcagcttggtccggtcgcggcccacgctgcgcaaccgcagcgcatccagcaactccaccatcgaacgaccgagaatatcgatgaactgaatcgtcacgtcgcagatataaatcaccgaatcagggtagccaactgcgcgcagtccggcaatcaggcgattccacggcaccgtacgcgccagtgcgatcaccagcgacaccgccacgaacgcacgcaccaccagccggaccggcgcactgtactgcccaatcagcaggctcggcaccgccacgaccaggctcaggatgcatacggccagcaccgggccgagcaacgccctcatcaggcgcgccggccgggtcgccatcatcagcagcaccaccgccagcatgatgtacgagaacagcatgttgcatgtgatgttgacgcagacaatcgcggccagtatgcccagcagccgcacgcccggattgaccgagcccagcaccttgtcgaccgggctcgactcaatcggcaacgcatgaccaacctgctcgagtacgctgccgaaatgccccaggttgtgttcgatgaaggatgacttgtcagccggaggatcgtaatcctccgactcacgcatccatgcaggtatcgtcaacgcgcggatgtcttgccgttgccgctcaccgcgagcgccagcagacggaacacgatagtgagcacggcgatgccaatcactgcggagagaatgtagccggcgatgtccggcagaccctgcagcgagtagtcaggcaacagcgcatcccacgagaagccatgggcgatgtactgcggcacgtagttgagccccgtggcactcatgaagtcctcggcgccccactcgccccaggcgtcgccggtggcgagcaggccgatcggggaaagcaccgccaccacggccagcgcaatccacgcagacttgcgcagtccggcgtgcgcgacctgtttgccgtcagcaccggcggtctcggcgaagttcacacgggcattgtcttcgataatctccggtgcggtgcggcgcacgaattcgacaaccaccacggtcaccagaccctcgaccacgctggctacggccaggtgcgggatcagcatggcgggaatcgtcacgttaaaggtgaacgggaagtagagcgcctggccgtcagcggctttgaacagcagcggctgcacgccgagttccagcgccacgcagaatgcggcgagcgtgatgccgatatagccggacacgaattcggccacgcgttccttccagccgtcgggcagcaccttgcgtagcaacacgtacagtccgtaagccacaaacggcagcacgaacgccatgttgaagcagttggcgccgagcgtgatcaggccgccgtcgccgaagagcagcgcctgcagcagcagggccaccgacacggagaccgtcgcgtactggggaccgagcagcagagcgatcagcgcgccgccgacaccgtgcgcggtggtgccgccgggcgtgggcacgttgaacatcatgatgaggaacgagaacgccgcgccggcgcccaggtaggccatcttctccggcgtgctgttgcggatcacgtagcgtaggcacagcacccacaccggaatcatgatgacgtagaacaacgccccggtggacggcgaaatgaaattatccggaatgtgcatcgccaatgtgacggtgtcaggtacttcgattatatccaacttccctctttttgttgatttcggagctcgaccacaacctcccgctccaggaacgtgatatgtaatatcacaactgtgattcgtctaatgcacaaccatgcaaaatagcttgcaattactagcgacacaccgtgtaccatatatccggtttccgtgttttcggatatttttccgctatattttttgcatatttcgatcattcgttacaaagtgacgcaacaggctctctacactgtggcatgaaggacgtggggattctcacgccacaagcaattttctccaaggagaacggatgatcgccaaagaaatcaccggcaacatcatcagtcagcagtacagcgacggcaaacttaatgtgtcgattgccttcgactggttcgaaaccgataagaagcgcatgcgcaaggtggccgaggacggcaccgagttcggcatcatggttggcaagaccatcaaggatggcgatgtgctcgccgaaaccgaagacaagcgctatttcgcacgcattaaaaccgcacagctgattgagattccggttaactcgatgaaggaaatgggacgcctgtgcttcgaactgggcaaccgccacctgagtctcaaggtcgagaacgaccgcgtgctggtgccgtacgaccatccgaccatggaatacacgaagaagatcggttatgaaccgcatatcatcgagggtgggtttgacggcttcctgatcgtcaaggcccacgccggcaccggcacactgattccgggcaccaacaagaccacgggcgacgtggccgaggaggagcaggaagccgaggccgacaaggaattcccggccgaggaggccgccggccatctggatgtgcatacacacgacgcaggtgagggtgagcccggcgaatatgagatgaacggcgtgctgcaccgcccggacggctcccacagccacgacggcggccgcacctggcacacccactgatagccccatgaacatcaacgaaaccgaatcgcgacgtctggccatgctgcaggtgtgcgacagcgtcttccccgtgggcgcgttcgcgctgtccaacggcatggagaccttcgtacagcgcgacttcttgcgccgtggcgccgatttcgaggagtatatgaagaactacctcgaagtcgcaccgtacaaggaaatcgggcagatggtgctggccggcaagtacgccaccgattcgcgagtctcccgcaaagggctggccgagcgactcatcgaacttgacgagctggcctcggccctgcaatccgcacgtgaaatccgtgaaggcagcgagcgcatgtgtacccgcctggtcaagctggccgagcagatggatgccggccaggcgcagacctcggatgggcatcgtgggttcgccaagccaagtcctgccggcaatgccaccgcatccgctgcggattcgcgcgaaaacagcatcatcgccgtgcacgagcatcacaccgaacgccaccagctgcacgatgccgccgacggcctgtacggctcgccgtcgctcgacctgtatgccgggctgattcgcgagcgccgctgccgtggcctgcattcgatcgcgatgggcctgtacgcggctgaccatgcgaacgacgtgcgcgacgcggccatcatgtatggatattcgctgttgagcgcgcttaccatgtgcgccgcaaaggcgattccgctcagccagtacgctggccaagtcgccctgcatgattcgttcccgcgcctcgtgcgcgcggtgaatatcgcgatgacgttgaagcccgaggatctcggcatctccggagcttacctcgacatcgccgccatgcagcatgaaatcttgtactcgaggctctacatgagctaattatcctggctcccctcaaggaggggagccaggataacctcacccgcaaaccacatacctaactaattcccacataaaggagaaaccccatgtcatacgtacgcatcggcgtcgccggaccggtcggttccggcaaaaccgcgcttatcgaacgcctgacccgcaagatggctgacgaatacagcatctgcgtggtcaccaacgatatctacaccaaggaagacgccgagttccttatcgagcactcacgcctcgcgccggaccgtatcgtcggtgtggagaccggtggctgcccccacaccgccatccgcgaggactgctcgatgaacctcgaggcctgtgaggaaatggcccgcacccacccggacgtgcagatcatgttcgtggagtccggcggcgacaatctgtccgccacgttcagcccggacctggccgacgccacaatctacgtcatcgccaccgatgagggcgacaagatcccacgcaagggcggccccggcgtcacccgctccgacctgctggtgatcaacaaggccgacctggccccgttggttcacgccgatctagacgtgatggcccgcgactccaagaagatgcgcggcgaccgcccgttcatcttcaccgacctgatgggcggtgccggagtggacgacgtcatcgcatggatcaagaagagcgtgctgttcgaggacatgtgatgttttggcccgcccgtatccaaaaacggacgggccgaaacataccgttgcaccaagtgcggcataattgcccatgtcatcgtcaggcaccaatcataagaaggcagcgattcgtccatgggcagtagcacttttcgtctatccactgcattccgccacggacgtaccaaaatcgacgatatttatttcgaggcgccgttcaaactgatgaccccgttcaccaacggacgtcattcggatttcgtcgtgatgctcgcctcccctggcttcctgaggggcgatgaagcccatatcgatatcgacttcggcccaggcaccgattcgaccatcaaaacgcaaagctacgagaaggtgttcgacaccgcggacggctcggccgaacgcaccatcgaactcagggcgcgtggcaatgccaaagccgtgttcctgccgttcccagtgattccgttcaagaacagctcattcatgaacctgaccaccgcgcatatttccgccgagtcagcattcgtgtatgcggatgtggcgacatgtggccgcgttgggatggatgagcgttgggccatgaaacgttttacgaatcgtatgcgcgtatatgtggccgaacccgaagccgtgaccaaggccgccgcagccgaattggcgcaacagcacgcacatcgccgaggccggccttccaaggcggaagccgccgctgcccgaccgcgcgaacatctggcctttgctgaccgcatgctgttggaacctgatgcttttgactacaccgaactcggcatgtggcgcgaattcacccactgcggcgttctctacgctcacctgcccgaactcgaccctagcgacgctgtacaagatgccgcaactaaagaagcatcctccgccgccatccgcgagcgcatcgagactgcccgcatcgccgccgaagacgcgctcatcactcgcatccatgaacacgcagacgccatcggcttcaccggcgagctcggcgtgagccgcgtaatcaatggcatctgcttgcgtgtactgaccacccgaggcgacgacgccttcgacctcattcgagatgtggccgatttcgtgaccgatttcgtggccgaaggctaaaaccaagtggctctcccctttgaggagagccaccagttctctcagaacaggaagtaccgctgggtaagcggcaactcgtacgccgggtcagagtggaccggttcgccgtccaccgtcacttggaaggtttcgggattgacctgaatgtcggcgagcacgtcgttgaacttcagatccttcttgcctaccgtgcggcagccatgcactggtaacacctggcgctgcagctccagcttgcccttgatatcgtcatccacggcggcctgcgaaacaaacgtggcgcaggacttgccaagcgcacggccgagcgcgccgaacatatcgcggtagtagacaggttccggggtcgggatagaagcattcgcgtcacccatacgagagtaggcgatggagccacccttgatgaccatttccggcttcgcgccgaacatggacggctgccaaagcacgagatccgccatcttaccgacttcgatggagcccacgtattcggaaatgccgtgggtgatggccgggttgatggtgaacttggagacgtagcgcttgacacggaagttgtcgttgcggttgttgtcgtgttcgtcttcggggagcggaccgcgctgcttcttcattttgtcggcggtctggatggtgcgggtgatgacctcgcccacgcggcccatggcctgcgagtcggagctcatcatggagatgatgcccatgtcgtgtagcacgtcttcggcaccgatggtctcggggcggatgcgcgagtcggcgaaagagatgtcttcgggcacattgcggtcgaggtggtggcagaccatcatcatgtcgagatgctcgtcgatggtgttgcgcgtgaacggcatggtcgggttcgtggaactcggcagcacgtttgggaagccagcggcacgaatgatgtccggagcgtggccgcctccagcgccttcggtgtggtaggtgtggatggtgcggcccttgaacgcggcgatggtgtcttccacacaaccgccttcgttcagagtatcggtgtggatagccacctgcgtgtcggtttcgtcggccacgccgagtgcagtgtcgatgacggccggggtggcaccccagtcctcgtggatcttcaggcctgcggcaccggcgcgaatctgctcacgcaatggttcggggctggagtcgttgcccttgccaaggtaggcgatgttgatgggcagcgcttcggcggcctcgatcatgcgggtcaggtggaaggctcccgggttgcaggtggtggcgttggtgccgtcggccggaccggtgccgccgccgaccatcgtggtcacgccaccggcgagggcagtgcgaatctgctgcggggagatgaagtggatgtgggtgtcgagtccgcctgcggtgacgatgaggccttcgccggcgagagcttcagtgccggagcccgcttcgagaccgggggtgataccgctcatggtctgcgggctgccggccttgccgatggcgctgattttgccgtctttgatgccgatgtccgccttgtagatgccggtgtagtccacgatgagggcgttggtgatgatggtatccggcgattcaacgtcgagctgcacggagctttggcccatgccgtcgcggaatgatttgcctccaccgaacttcagttcatcaccgtagtgcgtgtagtccttttccacctcgatgatgaggttcgtgtcaccgagtcgcacgcggtctcccgtggtcggcccgaacattcccgcataatccttgcgcgtaataatcttcatgtcaaaagtccttgctgtttttcagctccccttgtcaggggagctggctcgcgaagcgagactgagaggtagtccgctccccgctggcgggagctgtcagcgaagctgactgagggtggcccttagctcagattcccgagaatccaagctcatgcgccttcttaaacgcggcctcccgcacctcagggtcatccaacttcccctcaaccagtgcgctgaagccgtgaatctcacgcgtgccaccaatatcaatcaaccgcactcgatgcgtttcacccggctcgaacctcacagccgtaccagccgcgatatccaaccgcttgccatacgccgccttacggtcgaacttcaggtacttattaacttcaaagaagtggaagtgcgaaccaatctgaatcggtcgatccgcagtgttcaccacgtccagctcgatgtcttcggaaccttcattgagttccaaatcatcgtcagccagcagatattcccccggcaccaacttctcggtggattcgatggggttatgaatagagacgagcttggtgccgtccgggaacgtggcctcgacctccaccacttccagcatctcggccacgccatccatcacatcttcaggcttgagcagcgtgcgaccgtatgccatgagctccgccacagtgcttccctcacgcgcccgctcaacgcattcggcggaaatcaacgcaatcgcctccacatagttgagcttcacgcctctggctttgcggtctttggcaagctgccccgccaagtacagcatcaacttgtcagtctctcgtggtgtaagtctcataacatcctctgttgttgactggagtttttcaggcacaccaatgtgagccctaacatcgcccaataataagagcgttataagaacgggacgtttctcataacgctctatggccataaacgggggtcgaattaatcacactctcatggattccttggcggcttctacttggtcggggccgccttcgccggtggcgatgaaacggccggaggccaggacgtagtagcggtcggcgcgctcgacggcgaattggaccttctgctcaaccaagaccacaccgatacccttgtcttcggccatcatgcgaatggccttctggatttcggcgacgatattgggctggatgccttcggtcggctcatcgagaatcatgagcttggggcgggtgatcagcgcgcgggcaatcgaaagctgctgacgctggccaccggacagcagaccggcacgtcggccagcaaattccttcaagaccgggaacatttccacggcttcgtcgtaacgggccttggcctctgaaccgtagcggtcggcgaccacgtgcaggttttcgtccacggtcatggtgccaaaggactgctggccctgcggcacgaacgccatgcccttgcggatgcgttggttcggtgcagccttggtaatgtccttgccctcgaaactaatcgaaccggacgaaacgggcagcaagcccagaatcgccttcaacagcgtggtcttaccggcaccgttgttgccgacgatgctcacccattcgccggcggccacgtcgaaactgatgtcgttgacgacggtcactttgccgtaaccggtgttcaaatcctttacttcaagcattgccatgattattcactttctacggcgtcgtgcatattgatgttgaggcgcgttgtatcaccctcaatatgcactgaaaaagcgcattccgggatgcgatggttgttgtcagtgcggtccatattgcgcttcttcctcttacctactcccctcagtcaccttcggtgacagctcgtccgcaattaaggacgggccttgcctgcaacctgctggttcgactatcgtctcgccttcggctacaaacagcccactgggctgtttgcttaacgcctcggcctcagggaggggagacagggagttagttttctccgccgcccaggtagatgcggactacttcttcgttgttttggatgtcttcgaccgaaccctcggcaaggatttcgccctggttgagcaccgtgaccgaatcggcgaactgacgcatgaaatccatgtcgtgttccacgatgatgaccgtgcggttcttgctgcatcgcttgagcagctcaccggtctgcacacgctcggccggagtcatgccggccaccggctcgtcgagcagcagcaggtgcgcgtcctgcacgagcagcataccgatttccagccactgtttcttgccgtgcggcaggatgcctgcgggcttgtttgcatccacagtcagattgcacacgtccatcatgtattcgatgttctgcgaaacgccgcccatcggctggaacagctcacgacccttcttgcggaagccctcggccagctgcagattctccaacacggacagctcttcaaccaccgatgcggtctggaaggtacgcccgacgcccagcttgacgatgtcgttcggcttgcggcccaacagctgctcgccacggaattccgcggaaccagtggccggcaccagtccggtaatcgcgtcgatgatggtcgttttaccagcaccgttcgggccgatcaggaatcgcaaatcgccgtgctgcacagtcaaatcaagattcttgacggccacgaatccatcgaactcaacgtgcagtccacgaacttccagataatcgctccactggccgccgcgatcatccagcaccgcaagctgatcgtgcagcttcgtacgctcttcaacgatttcggccttcatctgggccgcttcgtcgcgcatacgcttggcttcgtcgcgcatctcaatcatttcggcgcgcaactgctccaaatcggcctgcgatgcaggtgcgggagccgatggattcgagctcatgttcttctcctcactcatgcgttcaccgcctttgcagtagcagtaccggtaccggcaacggcaccagcaccagcaccagcaccagccgaagctccaaccgaactctttccgagcccgatcttctccttaatccaaggccatacgcccttgaactgtcccaagcccttcggcacaaaggcaatcaccagaatgaagatcaggccttcgatgtacgtccacgcggacggatacgcctcagacagctgcgtttccgcaaagcgcaccagcagcgtgccgaccaccgggccgagcaaagtggcacgtccgccgatcaccacgccggcgagcatcaggatggacggcgtcacgccgatatcggacggcgaaatgatgccgaccactggcacgaacattgcgccaccaatgccggcgaacattgcagccaccgagaaggcgaacaccttgatggaggcggggttatagcccaagaacttcatgcggttctcttggtcgcgcacgccgataatcaggtcgcccataaacgatttgcgaatccagtagacgataagcaccatggccagcgtcaggaacgcgcagatgtagaagatcatctgcttgttggcgttatcagtcaagtcgtaaccaaagaatcccttgaaatcgttgagaccgttggtgccaccggtggttttcgactggccgataagcagcacggcgaacgcggcaaccagcgcctgcgaaagaattgcgaagtaggcgccacgcacgccacggccgaacacagccagaccgaggattgcggcgataatgcccggtaccgcagccacgccaatcacggcgatgaccggattgcggaagagttcccagaatccaggaaccttggtgatgccgtactgggacatgaagtccggcacttggcccacgccaatgtcctcaagcttcatgtggatagccatcacgtacgcgccgagaccaaagaacaggccttggcccagcgtcagcataccgccttggccccaagccaggccgatgccgaccgcgaccatcgcgtagcacaggtatttggacagcaggccgaggttgtacacgctcagcacagtcggagaaaggaagatcagcgccacggcaatgaccacaccgatcaaagccttatatttcgtggcgtattcgctcaaagtcatcttcattgtcgtttccttacccttctgaagcactcacgcgaggttcctggagcggatggagaccaagccctgcggcctgaactgcaggaacaccaccacaatcaggaacacggcaacctgaccaatcgaggcagaggtcggcagttcgatggacgactggcacaagcccagcacgaacgaggcgataaccgcgcccttgagctggccaacgccgccggccacaacaaccaggaaggcctgcacgatgaaggtcgtaccgaagttgaagctaatcgagttcagcaggctcagcgccacgccagcgataccggcgatgccggagcccaggaagaacgtcacatggtcgaccatcttggtggagatgccggaaacctcagcgaggtcgcggttctcggaagtggcgcgaatctggcgacccagcggcgtgagcttcaggatcgcgtacagcgcagccacgcagataatcgacagaataaagatgaacagtcggcctgcagagaagctgtagccaaagatggtcaccggattggtcagcgcttcaggagccgaagcgtagaccggagtggcaccgaaaatatcgcgtgcgagctgctgcaataccagcgatacaccgaaggtaaccagcagcgtatcaagcggacgattgcgcatacgctccagcagcaacacgtccagcagtaaaccaagcaaaccggctactacgaaaccgaccaccagcgccacggccagggacactgttttattgccgatgaccatgctcatgacgtatgcggtgtatgcgccggccatcatgaattcgccgtgggcgttgttgataacgcccatctggccgaaggtcaacgacaacccgagggctgcgagcagcagaatcgatccgttggacagacctgccacaatttgtggaaataacatacccatgttgttgtgtcctcttctctcagttgctctcgacgctggcgctcaggctcttggcccagctgtaggtcttcaggtacgggtccggcttgatgggaccgtccgacttccagacggtgtggatgagcttgtctgagccgatcttgccgatgtatgaggtcttgtagatgtggtggttttcgccgtccaccttgaccttgccttccggtgcattgaaggtgacaccgtctgctgcagccttgaccttgtccacatcgaacgacttggccttctcgaccatgcccttccacaggtacacagatgtgtacgccgattccatcgggtcggaggtggggcgattggctccgtagcgcgccttgaagttcttcacgaacgtcttgttttgcgcattgttcagcgtctggtagtagttccaagcagtgagctggtccttgacgttgtcaacgccgatagcggaaacctcttcctcggcgatagacatggaaatcaccggcgtggtggcggctttcaggccggaagccttgtattccttgaagaatgcgacgttggaatcaccgttcagcgtgttcaccaccgcatccgcgccggagaacttgagcttgttgacgatggtggtgaagtcggtggagcccattggggtatattcctcgccgaccacttccatgccattgccctcggcgtacgccttgaccacgcgatttgcggtctgcgggaacacataatcggagccaaccaagaacagcttcttgtagccttgctccttaaggtaatcaagcgcaggcacaatctgctggttcggtgcagcacccgagtagaagatgttcgggctggcttccatgccctcgtattgcagcgggtagaacagcagcgcgttatccgcctcgaacacaggcagcatggccttacgcgaagaggacgtccagccgccgaacaccgcggccacgcattccttttcgatgagggtcttggctttttcggcgaacacagccggctcggacttgccgtcctgctgcactaccttgagctgcttgcccagcacgccgccctttgcgttaatctcatcaacggccatgtgcagcgaatcactcaccgtctgttcggaaatggccatcgtgccagacagcgaattcacgaaaccgattttgatggtgttgcctgaggtgtccacacatgatgaggtgtcgcttgccgcagtcgcgttgttctcttgggcctctttctcggccacggtgcgaccccagccacaaccgctggtggcaagcactgcggcaacaatgcacaccgcagcacccatcttcagtctttgcaatcgagtcatatggctcttcctccccacatacgactacattccgcgaacgttgcccgcccgcggaatgtctacgctgattgccgtaccgtgccctgatgcctgatatcgtgctgaaccacttgccggatatcgacggctggcttccggccgactgcactatacgatggcagtgcctgcgtgaatttccgttgcctgaatatttcatatgcgtctcatacataacgctcacgttacaaaatcaacggtgttacgcggcccgccgtcgaacgctgtttacattggtgtgcgatacgcgcgcgactgccgcccaagtgacttccccgcgaactacgggtaggctggggagtatggaacttcacgttttgaatcatccgctggtcgagcacaagctcaccgtgctgcgcgacaagaacactccttcctccactttccgcgagctcgtctcggagcttgtgatgctcgaggcctatgaggccacccgcaacctgtccgtagttgccgcaccaatcgaaacaccggtcgctccgatgaccggtaagaagctggccaaaccgcgtccgatcattgtgccggtgctgcgtgcaggtctgggtatgctcgatggcatgacccgtcttatgccgaccgccgaagtcggcttccttggtatgaagcgcgacgaggaacaccccactcagcaggtcacctatgcgaaccgtctaccggaggacctgtccggtcgtcagtgcttcctgatcgacccgatgctcgccaccggtggcacgctggttgctgccacgcactatctggccgagcgcggtgccaaggacgtgaccgcgatcaacatcatcgcggcgcctgaaggcatcaagttcgtggaagagcacatcgatccgtccatcgacttcaaggtcgtagtgtgcgcggtcgacgagaagctcaacgacaagtgctacatcgtgccggggttgggcgatgccggcgaccgtctctatggcgtaattgactgattttcctggctcccctcagagaggggagccaatgtgatgggctttttatgcaaatcgacattattgcgccgggacgcgtgaaggaacgatatcttcgcgacgccatcgacgagtattccaagcgactttcgcgctactgcaggctcaacatcattgaagtggcagatgagaaaacgcctgaccacgcctccgaaggcgttgaccgacagatcaaggccaaagaaggcgaacgcatcgccaagcatctgaaggacggcgcgtttgttattgcccttgccatcaatggcaagcagctgtccagcgaagaattggccgccaaaatcaacgaccttggattgcgtggcaccagccatattcagctggtcatcggcggctcaatcggccttgacgacgcgattctgcgtcgtgctgattttctgctgagtttctcgaagatgacgttcccgcatcagctcatgcgcgtgattctgctggagcagatctatcgcgcttataagatcaacgctggcgagccatatcacaagtaaaacgccatacctcatggggcgggaaatcccccatggggcggtaattgcctcatggggcggtaaaaccctcatggggcggtatgccaaaatggcttaattccgcggtttcacatattcttcaaaccgccccatgggcaagttaccgccc

SEQ ID NO: 867 - DNA, 19985 bp, Unknown
  R14_18m  MAG No. k141_14329
cattggcggcagtctcgacccggatacgaatgccaccgatattccggatattcccactccgcccagccatgacggcaccacgattcccaagccggaacgggtggacaccacggaaagcgtggatatcgatatggatggcgatggcgtggtcgattattcggtgaacgccgacctggattccaccggtgtgcgtttcaacgatgacggaaccgtgacgctgagcaagaacggtggttcgttcggtgctgattccgcgcagaccagtggcatctccttcgacaccgacgacgatggcgccgatgatgttcatctggagctcaaggacggtcaggatgccagcgtgcgtgtcgttcccggcgccgagggcagcggcacgcgatacgttcaggtggatacggatggcgacggtgtctatgagagtagctatgccgtgcgcgacggtgccgcagcatcgggtgatgcgggctcgggggtatcggacggtgcttccgccgcgactgggacgacggccgaggacagttaccggaccgaggtgagcaagggcgaggaacaggcttggcggacactggccgagaccgacccgttgcaccgatccgttgacgagctcaaggaactgttcaacagacgcgaagagatcgagctgccggaaacgaattcgctttcggatggcgtctggggcggtgccccggcaaatggctcgatcacgattacgtttggtggtaacaagggggtgacggcatgaacgaatggctgaggcatgcttcggctcgtgtggtgttcattgtcgcggcggcgaatggtggcggcgatgtcgagcacggtaacctgtacgagaaccaggattacaatccggacgtcatcgatattggagacaatgacaacactggtaccggcatacaggccaacgagggggacttaatatcttctggatacaaattggctgaggccggtgagaagttccagtccggcaatattgccgatattcgtgacggggttagcgatcttctgggggccacaaatattcagagtatgaatagctctcttgatcgatggtgggacaacagcacatctcccctgagtatcgcggctggtagaacgcaggatcttcgagatggcatgagccatggtttggtgagtgctagaaatgtcactcgatatttttctagtggtttgtcttgggctcgtatgggtattggtgtgatcgacacggtgtgcaatgtcttgcatatcacgaaccccgtcgatgagattctgcgcaagccgttcggtggcgattgggatgaattgtcccagtccgctcaggattggcgtggcatcgccaccaatctggaaacgatgcatacgggattgcagcaggcccagcggcagatccggacatcgtggaagggcgaggcgttcgaccggtattcgttgtgcaacgaccagatcggtcagatgttcgagggcggtcccgatatctgccgtgagatcgcggatggtcttgatgcgttggtggatgtggccaagaagtgcttcgactatgcgctggatgtcattgaggagctcatcgacctgtgcatggacattgttgaatgggcgtggaccggtgtcggtctagccgtcgtggcggccaagcatgcaggacctgtcatttccctcattcagaatggttacgatattgttcagggcttgtatgatgccgcgcagtcgttcaaggcggttacggcggcggcttccccattggcccagcaggcgaaatcatttgctaccagtcttgaacgcacctgagccacggagcagaggaggatatacacatggcttcacaaggatttgaacaattcatggcgcaggtccggcagctgagcacgttggtggataccaagcagaaggagctggatgagctgcgcaagaagaatgccgaggaacgtgaggagcgtcggaagcagtacgccgaggaccgccgtgcgggcaagcagggccgtgcttggcaggtgctgcagcagcgcatcgatatggggcagacctgcgagcgcgacatcatcatgggcttggatacttctgccgaggcacgtgaggtgcgtgcccaggcggccaaggcattggatgccatgcgcaccgcggtcagcgagcttccggaggacgattccacggcgcagcagctccggcagcttcgcgagcgtcagcaatcacgctgattccattgtcgtcgataaaggtgatggtatggatgttgttgaggtttgggatcggtccatgcgggcttgtgggtgggtgccgattccgtcttggccgtggacgttcgataaggtcctgttgcatgatgccatcggcatgcgtgcgccgaagatgccgcgtactgcgaatacgcagtggttttacgccaaggggccttgggtcacgttccagttgaatgtgatggacaatctcagttggtggacgatgtactccgcttggtcgttgcagacagtggtgttgccggtgcgttctcggatgtcggggtatgcgtggtgcaccactacggatttgaagggcaagccgaggcctcagacggtgggtggcttgtctcctgaggtgttccgtatcctgtcgtcgtctcctgcccgtctcaatttgttggtggcggatgggctggcgtatttgtggacgccgattagcgttcatcgtcttttggaatggcaatatatgaccccggaactggagtcgcagatgctgccggtggcgcaggagttgtgccggtacgtgtgatggcgggctgtccgtgctgctgaccgtatgattccctcacgaaacggtatggcgtattcttaggaggagcagccgtttcgaggggtttcggagatgaggagaacggggagaagggcatggctatggcagcgcaggatgcctatgagcgccaacgggtgaatgttgccgtggcatgggctgtggccgcctcgttatgcgtcgcattcgcggtattcggtttcgatggtgtaatgcgtggtcgtgccgcatccaccgattctgccgtgttccagggtttagtcagtggactcatcggtgtggatgcctccgctaaagatgccgtgaccgtaagtgccgttgtatttaatgcgttcaccgccacagtgttggcattactgtcctactacgccgcacatgtgacggtgaggaccgactggcatcgaagcgtcgattatgccggctccttggccacggtcgttgccgccgcgatagctgcgggcccagcgcttgcccgtattgcgcagattatgtcggttactcgttctgcggcactggcggtcttcctctctgcgacccttgtggccgttatggcggcatatatccaatacgcggcttcgggccgcattacagtagcccttgcccgactgctcatcaccgcagccgttattatcgcgctattcattatcgcagtagtaatattcgccattcccgcaccggtaatcgcagcggcctgctccgtgggcggtgcatggtatgtgcatgcccaagcgaatgtgattttgcgggtgccggaccggtacctcatcgaatggcgtcgatacatgtcccagcgttggacggttcgaggcgcggttccggaaaattcacgtccgctctatacccatgacatcagcgaagacatgactattttttctgccgaatacaccatgggtcttgtggttgggcatctatatattgctgccggatatgttgtgctatgcctcactgtgcctgccgaaccggatctcttcaccactatcggcttcggcgcatattcggtgttattgccctgctatctgttgctccggccgcgcaccgcgggcagtgcgctggaacgtatgcttatgcgttcatgcgcggtattattgcctgcagcagccctgatcacgctgaccaatcatgacgattggcgttggctcgtgacatggttggtattcgggctgatagccgtgggcatagtgatagccgccgccacattggcagtatcgggcggcttcaagtcgctgatgttgtctcgtgtcggcgactgggtcaccaccggtagtcttgcattgatgggaccagcggcgttcctcgcctcaaacgccatggatatgattcgggggtttatgtcatgactgcagcgcccatgcccattgcttcccaagctcctgcaccacgtcccggtccgtccgtgacccatcccatggtgggggagggataccgttatgctacggccgggcgacgtatgctcgcgctactgattgacgtagcatttgtaacagtggtgggcggcgtcactttggcgctcagccgcaacgccatattggccgtcttgtgcgcaatacaggctgtcgccctgaactgggggtgggaggcttgccgcggtcgtaccatcggcaaggcaatactgggcttatgtgtggtgcgcaacactgcggatatggggcagccgggcgctggtctgctacctgccggtccgtggcgtgcgttggcgcgtgtattgatcacatcattgggctgtttggtggcgattgtcgccgcatttatgctggaatggacctcttcactagaccaggtacgtcatcgcggattgcaggatcggctgtccggcactgccgtaattgatacgcgtgtgcagtatgtgacggcaatgtctgatacgggtaatgccatcaccgataataccggtaccagtaccagcaccagatttgactctacttttgatgatgaggatgaagatttggaggcgatggtcggcggtattcttccgccagccactgcgcccacaccctccggccgttcggattcattcagggctttgcgcgcggtacctgctgccatagaaccgtcgtccgtacggcctgcccaggtgcatgccgggacattgcaatcatcgtctaccgccatacaggtgcagtctgtgcaaaccgaatccgttcaaccggtgcctgcggcccccaccatctctccagcagtgcccagccctgtaccgtctgttacttccaatacagcaaaacctgtaattcctgcagtgtcccagactgccatgccgcggcacagcagtggtgctgcaacgattgccatccccacgccggcgggcacgacttcagcgcgagtgcatgctgtgccgcctgcattgccaaccgtcggaacaagcccggtcgtgccatcatcttcggcggcaccaatacccactgggccactgcctgttcccaaggccgttcctcaggctgtgccccagcgtcccgtgccggcaaaaccggcagctgccaaacaggtggcggtattgtatttcgaaaacggcaatggtgtgcatctggatattcccagccgtgctctgctgggtcgccgccccaccagtagcgacccaaacgacgtgctggtcagagtaccagacaccaccggcaccatatcccgtacacacgcattgttggagattgcgtccggccggatgtgggtcactgacttggaaagcaccaacggcacggaaattctgaccgaagacggtgccgtgaaacatcttgaggcgggcgcgcgtaccgaaatagcgtttggcacacgtatattcctaggaagcaccgccataagtgtgagcctgctgagaaacagggagaaaaaataatgagtgagataacgccacaggtatcctcccgcatagaccagcccaaagtgccgcacggcaaggtggtgttgcaggccccgcctgaattggagccgagcgacggtgtcaacagtctgttgaccatgctggtaccgctgttgggcagtgtctccgccattgtgatgatggtcatgtccaattccggtctgaccggttttctgaccggcggcatgttcatgctctcctccgtgggcttcgtactggttaacggcgtgcgtcaacgttcgcagcgcaaagcgaatctcacttcgtcccggcgtgaatacttggcatatttggctgaactgagaaaaaccgttcgtaccgcggccaaaaaacaacggcgtgcggaactgtggaattctcccacaccggattccttggtggccatcgcgcaggaacatgtacgccgctgggagcgcatcccatcggatgatgattttcttaatgtgcgcatcggttctaaagacgagccattgtgcattaccttggaggcgccggagctgcctccgctggccgaactggacccggtctccgcttcagcggcgcaccggttcatgatggcccatcaaaatctgcatgatatgccttgcaccatcgacctgcccaagtacaagcgtatcgaaatcctcggtgacgctgatcaggcgcaatctttagcccgcaccttgatatgtcaggcggcggtctggcatgggcctgaatatctgaagatcatcgtgctggcggcccccgaacagcagcacgcgtggcgctggatcggcgagatgccccacgcatggagcgacgagtccaaagatccggcgcttggccatggcgaagtgatgctcgctggcagcgtggaagaagcgaaccgactgattggcgaagacattttgcatcgcagccggtttaccggcaccgggcaatcgactctgccgtacattctggtggtacgtgatggttcagtgccccagggtgacgcgaacaacagcgatgatgatggcttggtgcgccgcgacggatttgacggcgtcacccttatcgatcttcctgaagagtggggcgatcttgaagaagagcacgtgttgcgcgtcatcttctcccaatcctccatcgaaatgggtctgaacgtggtacgcacttccacggtgaaccagattgagatcatcacatcatcggagcgcgtggacacctgtgccccggacagcctgagtattcaggaagccaaggccgtggcctccagactggaacagttgcccagcgaagaggagaacggcgacaacaaggaacaagcctcccacgccaagaagtcctccgaattggccgatctgctgggcatcgcggatatccatcacatcgacttgaaccgcctgtgggcatacaaaaccggcaaggaacgactgcgtgtgcccatcggcctcaacgcggacacctccatcacgtacctcgacatcaaggaatccgcccagtatggcatgggcccgcacggtgtgcttgtcggcgccaccggttccggtaagtcggaggtgttgcgcacgctggtgttgtcgttggcgttgacgcacagccctgatcagctgaactttgtgctcatcgatttcaagggtggtgccaccttcgccggtatggaaggcatgccgcatatctcctctatcatcaccaaccttggtgaggaagcctcgttggtcgatcgtatgcaagacgctttgaccggtgaaatgacacgcaggcaggaactgctgcgcaaggccggcaacttcgccaacgtatccgattatgagaaggctcgtctcaacgggcgtaccgatttggaaccgttgcctgcactgttcgtggtatgcgacgagttctctgaactgttggccgccaaaccggacattgtcgattccttcgtgaacatcggccgactgggccgttctctggaagtccacctgctcatcgcctcccagcggcttgaggagggcaagctgcgtggcttggattcgcatttgtcataccgtatcggcctgcgcacgttctccgcttcggaatcacgtgtggtgctcggtgtaccggacgcctacaccctgcccagcatccctggtgtcggttacctcaagccagacccaagcaccatgattcgcttccgtgcatcctatgtgtccggagctccgaaaggcgagccggacaccaatccctcgaacttcgacgtggctgtggatcagatgcgtcgtgctggcggtaagcctgcacatcaggtatggttgccgccgctgaatgtgccgaacacgctcgacgagttcttccccgacttgaccgccaccgcgcagtatgggctgatttccccctcccgacgcaaggcggggtacttatccgtgccagtggcgttggaagacaagcccaaggaacagaaacgcgaggtattgagcctcgacctgtctggagcgggcggccatgtggctatcgccggtggcccgttgaccggtaagagcacgttcatgcgcaccatggtggcttcgcttgcgttggcgcatagtcccactgaagtccagtgctatgcgctggatctgggcggtggcacgttcgccggtatggaagacctgcagcatgtggctggtgttgctcttcgtggtgacgatgagcgcgtcaaccgtatgctcgctgaagtggtgagcatcatcaacgcccgtgaacgttacttcaagaaccataagatcgattcgattggcacttaccgccagatgcgagccaagggccaagcggatgacggctatggtgaggtattcctgttcatcgatggatggcagaacttccgcacggaatatgaagacctacaggccaaggtattggatatcgtctctcgcggtctgacgttcggcgtgcatgtggtcatctccacgagccgttggatggatctacgagccaacatcaaggatcttatgggcactcgtctggaactgagactaggtgatccggctgattccgaaatcgaccgcagagtggccatcaccgtgcctaagggcatgcctggccgtggtctggcttccagcaagcggcatattctggtggcattgccgcgcatcgacggcgatcataaagccgactccatggcggacggcatcaaggatctcatcgccaaggtcaatgccgcttggaagggccccaagccaccaaagctgcgtcttctgcccaccatgctgtctcgcaacgccttcctgaccaccgtgccggaacagactcgtaacagtcgtttcgtactcggcgtggacgaagccgacttgaagcctgtgttgttcaaccccgtgcgagcgccgcatatgtatgcgttcggcgactctcgctccggcaagtcctcgttcctgcgtctgattgctcaggaaatcgagcgcttttacgacgtgaccggcggcaaggccaagatcttcctggtcgactatcgccgcgctctgcttgatgaggtgaatgacaagtaccttggccagtatctgaccaatcatgaggaaaccagtcaggcgatgaacgatcttgccgccttcctggccacacgtattccgggctcggacgtcaccacggaacagttgcgtcgacgctcgtggtggaccggctccgacgcttacgtgctgattgacgactacgatctggtctccacttcacgaggcaatccgattcaaccaatcgtgcctttgcttgcacaggcttccgatatcggcctgcatgtattcctgacgcgccgcactggtggtgccagtcgatccctgtatgatccggtgctgcaatccttccaggatctggccgtcaccggtttgctgttctcgggcgatccgaatgagggacagcttattggcaaaaccaagccgaagccattggtgcccggtcgtgtgcaggtggtcagtcgagatagcggcacattcctggcacagctcgcctacgcgccctccagcctgccgcccatggcaccaatgaactgattggcctgaatgtttgattaccgtctagggattgtcattcatctgcgctgtgcttcgcgtctttggcgatgcgcaaagcaatcagcgtgatgatcaccagaatcgcggccgcacctactacggccaagacagcacttaccgtgccatccgaatgcatggtggcctcgaccttaagatgttgtgcctgctgggtgcgaggaggcgtgtacggctcatattgtgtgctgcctggaccgcgcatgccgttggccagcgtgatggtgatggctccatacgggttgatttgcccccacccgcgattatcgtcgcgtgcgtcggggtccgggcggttgccggaagcttcgattcgctgcagccattgcaaggcgttttcatcgggatgacgctgcgccaccaaagccgctacaccactggcatatgcggtggcgtagctggaagatgctgattcggcggaaaagacgcaatccacgcctctcggaatcgtggacagcacggattccccgggggcaagaatgtctacctgctcgccactgatggaatcggatgacgcatggaaggacgtgtccgcagccgccacgcccaacacgtccttccatgcggcagggtagcgaagcccatcctgcgtggacgacgaggtgttgcggttgcctgcgctggaaaccacgagggaacctttggcttgtgcgtattgcacggcaagttgcaaggtgccactgggagccacggtgctttgcgaaatattgatgatctgcgcaccatgatcggcggcataccgtatgccatcagccagcacgtccgggctgggaccgccttgcgaatgactggaggaattatcgatggagttatacacgcgcaccggcaggattgtggccttgggggcaatgcccatcagagaagagccttctatttttctggcggcgatgatgcccgccacaaccgtgccatgcccgtaattatcagtgcggccatcctgaacgttgtctcccgccagattgactccaggcagcactgcgtcgccagccagatgcgggttgttggtgtccacgccggaatcgactacggccacaatgatgccttcgccatccgccagagaccgcaccgtggtcatgccgagcgcatcctcggtccatggtgtgctggtgatgtagttggttttaccgatttcacagctgttctgatcggcccatgccggtgtaggcgagagtgccccggctgcaagcgtgccacatgccagagcagtgcatgcggcagctgcgatgccggtgcgaatacggtgggttcgtgaggtgcgtgttgtcatcgtcatcattgctttcgactggatgccgaagagtcggatgagctgttcgcgtcgggtgtgccctcggtgcctgcgctagtagcagaggattgtcctgacgacgatgttgccgctgcctgatcctgcgctgaaatctgtagtccggcgctattgctgctcaaagccactccggcggagaatacgttgatccaggagcggggtattgcggtgacatcatttttggtaaagcccagtcgcttcaatgtttcttcggtatcgtccggaaccgggtaggccacaccggtgccatcgaccacatacaatgcgccggtggtaccgccggcactgtctaccgtgcgcagcagcgcaccgctgccattgatgatggtggtaccggaatcagtacgttgcgggcggttcttgtcgtcactgatggtcgccaaggtgatgccggcagcggcattatgcgtggtatcggtttggaatttggacggttccaacgcagcgcaagtgccattgccggaattcatcggcgttaattggccatcgggccaatcatcgggaacgatggaaccggtggcattacggaacccggcctgctgctgttcctgtgcggtcatggtaatggtttgcgcaccggcaccgaggctcagctgatacatttccaaggccatgccattcaatggcgagagtgtgccatcggcaagcaccacatatttggtgttgtcgttggaggggtcggcaatcagcgaaccgacggtgtatgatgtaccgcccaccgcgacttccgtgcctttgcccctgacatccaacactccgagatcggaaccgccggcaaacaagtccagccattgcaccggagccttgggagcgttatccaacgtgagttggccgacgccgagaatacgaagcaccgcatcgcgaatcaggccttcctgcggcagacgatgtcgcagaccgttgacaatgaggtatccaatgccatctacgttgaccagcattgcctcattacgactggccggggtggtcacggcatcattggtgatgagattgttggtcgaggcgcgctcggtgtcaagacaactcaccaggaatttcgatacgagcctcgaccggttgggcagaatatccggtgcgcccacaatgcctacgctggagccgatgggaataccttcaagttcgttgtcgtctacggtgataactcggtattcgtctgaggggatgagcagacgtgcgctggtggtgttgattaccggatgcagcacaccgttgacgctgatgaatcgagatgcggtgtctttgcccacaatgagtttgttattgctccagtctgaaggcaggccagggctgatgatgccatagaacacactgatcagaaccatgatggcggtcaggccgatactgaccatcaccggcgtcaggcctttcttaggagtcagctccttgccatccggcataccggaagtgaaggcagtaatgagcctggcccgcgaatagttttgtgcgtcctgcaggtccttcttattcgccatggcccctcctcacaatcccaatgccacgtaggcgagcggcagggtggccaccacacagattacgttcgaggcgtcagccagacgggtcatggcgatggaatcgtgcttggacagctgtgtgccgatgacgcacagcaacgctcccagtgagaacaagcccaccaccaccgaagcccacgtggggtgaaacaccgtgcatgcggcacaagacaggcagatgccggcacctgcggtgataacggtgatcagcatttccgattgtgcatagatgcgcctggaatcaagcagcatggctgcgaacagaaccaaggtaagtgccacgcctgctgggcttgcactggaaacagccagaggcgtgccgaacacgatcagtgcgctggtggcagcgcgcaggtcgaacagcagcgtggagccgatacggtacttattacgcacttcgctgatatcgatgttcttgggcagcgcgaaaatctccgattcgctggtggggctgtccacagacaatcgtgcggaagacaggctgagccacggcagcgcattggcagccagaccgagcagagccactgccacgatccatacgcgagtggaccagtgcggcatcgttacacacacaatgccgagaatcaccagtgctgcgccgataatgacaggaatcaacgcgtacagtctgttcactgtaagcagcaaacatgaaatgccgccggccagcagtaaaccagcaccgataccaacggccgggaacccgtagaacgagggattgaacagtgaacccatgagatgatatccggtcacgccggccaaaagcgaggcgactagcgacagtgccagtgcctgccgatgcatatggcgcgaagccagtaccgtggcaatcgccagtaaagcggctgcggtaatgcccgctacgccagcattgatgatggatagtggggccaatgccagacaaatcgctccgacacccagtagcacacaactgaccaccattgtggtcactgtggtattggcactggtccacggtcgatgagaacgctccaccgaatcggccaccgcctcaaccacatcgtcgtagacgatatcctgatcgcccaaggcgttgacctcgagtttgagacgttcaccgtctcggatggcctgatcggccagcgaagcgggattattgatggcggtttcgtcgtcacgggtcagtcggtagccggcatacaccagagtcggatcgaacacacctagtttcttggcgatatcaggcagcagttcagctaccggaagtgtcgacggaacattgagtttcgcggagcgtttgccatacaccacagtgatggccacgcgcggggatgatgcggaaggcgagggctgattggctggcactcccatcgcaatcgaaggtacgggcgttggcgccggaacgtgtggtgctatgcgcggcggtgccggcatcatggacggtccggcgggcgtgtggcgatgcgacgatgccatagggtgcttcctcttctcaataaactcccaaaggtctactgtattcttgtattctctcacacattgcgggtatcgggaatgccattgtctggtcctagagcagattccgtggcgttttttgccgagtcgggtcctagggtggagcacaacgactacgatggtgcgggtaacgcgatacaaggagtggaacttcatatgccgaagatgtttggaaccgatggtgttcgaggactggccaatagggatttgaccgcacgtctggcgttggatttgggcgatgccgccgtgcgtgtgctcggcgacgccggcacccaagacgatcagcctgagggacgccgccgcgcgctcgtgggccgtgacacccgtgtgtccggtgattttctggcttccgccctgtccgcgggcatggccgccggcggcttcgacgtgatcgatgccggcatcatccccactcctggcgtggcctacctgacctccgtgctcaacgtcgaaatgggtgccgtgatctccgcctcccacaacccgatgcccgacaacggcatcaagttcttcgcacgcggcggcttcaagctgcccgaccagaaggaagacgacatcgaggccgtgctcggccaggactgggaccgcccgaccggtgccggcgtgggccgcgtgagccacgaccagaccaccgccaccaacctgtacatcgatcatctggtggccaccatcgctccgctgaacgatgacaaaacccagcccaagccgctcaagggcctgaagatcgtggccgactgcgccaacggcgccacttccgtggtggctcccgaagccctgcgccgtgccggtgcggatgtaatcgtgatcaacgcctcgccggacggctacaacatcaacaagaacgccggttccacccaccccgagcagctgcaggccatggtcaaggccaccgatgccgtgatgggcgtggccttcgacggcgacgccgaccgttgcctcgccgtggacgaagacggcaacatgatcaacggcgaccagatcatgggcattctggcccgtgccaagcagcgcgaaggcaagctcaaccacgacaccctcgtggtcaccgtgatgagcaacctcggtctgaagctcgccctgaaagacatgggcatcaagaccgtggaaaccgccgtgggcgatcgttacgtgcttgaggaaatgctcaagggcgattactcgcttggcggcgagcagtccggccacgtgatcaaccgcgaattcgccaccaccggcgacggcaccctgaccgcactgaccctgtgcaacgaggtcgtcaagtccggcaagagcctgaaggagctcgccgccgacttcccgcagctgccgcagaccctcatcaacgtgccgaacgtggacaagaaagccgccgccaccaacaagcgcatccaggatgccgtggcccgcgaggaggaactgctgggagacaccggccgtgtgttgctgcgcccctccggcaccgaaccgctcgtacgcgtgatggccgaagccgccacccaggcctacgccgacgaagtctgcacccgcctcgccaagatcgtcgccgaagaactcgcgctgtagcacccttccctaaggaaaagcaatgtttggaaagaacgccaaagtcgacctcgaactcaaccgtgatgtcgaacaacttatcaaaaccggcggcaaggagaagctcctgcccatcgtgcaggccggcgaaccggtgttgcgccaacggacggtggcctaccatggccagctttccaagcgtacgctcgccaaactcatcgatacgatgcacaccaccatgctggaggcgcccggcgtggggctcgccgccacccagatcggcttggggctcgcgctcgccgtggtcgaagaccacgtgcgcgacgacgaggatgatccgcgcgaaatcgcggaattccccttccacgtgatcatcaatccgagctacaaacccaccagcgacaaaaccgcctcgttctacgaaggctgcctgagcttcgacggataccaggccgtgcgcaagcgttggctcgacatcaccgccgaatgggatgatgaagacggcaagcaccacagcgagccgttgcacggctggcccgcacgcatcttccagcacgagaccgatcatttgagcggcgaactgtatatcgatcgcgccgaaatccgttcgctgaccaccaccgaaaacctcgaggattattggtgcgacgacccggtacccaccgaggccgccgaagaactcggcttcgcactatgatcgaccgcacatggctggacgccgccaagggagacattccccaatgggcggcgtccatgcccaaagacgccgacggcaccaccattgactgggactgggtgcgttcgctggacctgatgcatggcatcagcgtattgctggcgcttgctgcagatggtgagcaatatggcgaaaccgcagcacagcctcagctcgggttggaccaaccggaactgacgccacaagctatccacgacgcattgaagatcgattacgccacacgcgagcatctggaatcaatcatcgcccaatgcaacagcacattcatgaccgattacgatcgattcatcggctcctatcgtctgcctcgcgcgctcgcctacgccaatcgtcggctcaacgacaacatcaacacgctgttgcatctgggcgaacagcaacacctatgggtggtcagtcgcgaacggcgggggaggaccaccgttgccgtgctcaggccgtactccggcagccgcccatcgaacgatgaccaaggcatgctgaatctgagcggtgaaaccggtgacgcatctgccggaaacactgctgccgaaaacagcgatgtcaagttccccacaacagtcgccttggacgatatccaagaccgtacggcggcgattcttgacgcacgcgccgaacgacgtaaggcccagcgcttccagaagcgtgcgggcgatgcggcgatggcccgcgccaatctctccggcgcgacttcgccgggtggtgccgcctcgtctggcaacgctaccggccaccatcccaagcccgactggcgcgacgcctatctgcccggccgcgacgtggacgcggtgatgggcatcgacatcgaaaccaccggcatcgatccggcgcgtgactacatcatcgacgtcggcttcgagttcatgaacatggccagtccgcgcccggccggcgaacctgagacatacgcctatgagcagggctattacgccgccggcgacgcctacggccagtcccgtctcgcttttggcgtgccgccggaaaacgcggcgctcggcaacgccctcatcgccaaactcaccggcatcgatgtacgcggccgcagcagcgaggccgggtaccgactcttcgacgaatggccccaagcccaggccggcctgctcgcgcggcttacccagcagccgtacgtggcgcataacgccaccttcgaacatagctggttcatgctgaacgtcgccggatacgcggaaagctaccgtgccgggcgcatcaccatcatcgataccctgccgatgagccggcagtgggaccccggcgcggtacccaccaacgagcatccttacggagacaacacgctcgacgcctacgccaaacgtcagggcgcgcttgattccgcccacaacgaacgccacttgggccttgaggattcgcacatcatgctggtggccatgaaacaccatctggcggcgctgaaagcgcaaaggaaagggccgtgggggcccgccggcagggctggcgtcggcggcaagtcctgcggtcgtaagcggtgagtacactattggtctcgtgagtaactatcaggacggccgacagcagcgtgagaaccgccgccgcaccatcgtgcgtgtggtgtgtgtcgtcatagctgtggccatgctcggctccctgatcatcccggcgatttacgcggggctttgacgttgccttcgcatattcgtgcccgcagttgaacacgtctgatgcgagggatttgtgaggtcgcccggccggctatcggcaaggcaggcccggaaccttctggcagcatggattgcaggcggatgcgtgtgtggcgcggcaatgcccaccaacgccagaggaatgtgcgaaggctgtcaacaaggacgtgacttcccaaagaatctcaaagaatcaacagtaaggtaaaccacgatggcagaatttgactttacccaggcgatcggcgaagcccgcgccaaatacgaatccatcgccaaggcgctggacgtcgaccggctcaaggccgatatcaaggatctcgaaacgcaggccgcggccccgggcctgtgggatgatccggaaaacgcccagaagatcaccagccggctgtccgccgcggaatcgcagctgaagcgtctgaactccgcctcccagcgcatcgacgatgtggaaacgctcgttgaactcggccacgaggagggcgaccaggactctctggacgaggcgcaaagcgaaatcggcgagattcagaaggatctcgaccagatggagatccagaccctgctcgatggcgaatacgacgaacgttccgccgtggtgaccatccgctccggtgccggcggcgtcgacgcggccgacttcgcgcagatgctgttgcgcatgtacctgcgctactgcgagcgtaacggcttcaaggccaaggtcatggacacctcctacgccgaagaggccggcatcaagtccgccaccttccaggtggacgccccctacgcttacggccgtctgtccgtggagggcggcacccaccgtctggtgcgcatctccccgttcgacaaccagggccgccgccagaccagcttcgccgccgtggaagtggtgccgctggtcgaggccaccgaccatatcgacattccggatacggacatccgcgtggacacctactgttcctccggccccggcggccagggcgtgaacaccacgtactcggccgtgcgcatcacccaccttcccaccggcatcgtggtgaccatgcaggatgagcgttcgcagattcagaaccgtgcctccgccatggccgtgctccagtcccgactgctcgtgctgcgccacgaggaggaggccaagaagaagaaggagctcgccggcgacatcaaggccagctggggcgatcagatgcgctcctacgtgctgcacccctaccagatggtcaaggacctgcgcaccggctacgaaaccagccagactcaggccgtgttcgacggcgacatcaacgcgttcatcgaggccggcatccgctggcgccatgaacagcgccgcgccgccgaaaccgaggagtaaacagcattatggcactgatctcactggacaatgtgtccaagatctatcccaaaggcacccgaccggcgcttgacgacatcaacctcgatatcgaacgcggtgatttcgtgttccttgtgggtgcgtccggctccggcaagaccacgctcttgagcctgctgttgcgcgaggaggaggccaccagcggcgagattcgcgtggccggcaacgatctgcggcgcatcaccaaccgtcaagtgccgcagtaccgccgttcgctgggcttcgtgttccaggattacaagctgctcaataacaaaaccgtatgggagaacgtggcgttcgcccttgaggtgatcggcacgcggcggtccaccatcaaatcgttggtgcccaaggtgctgaataccgtgggactcaccggcaaggaaaagaactatccgcatgagctctccggtggcgagcagcagcgtgtggccatcgcccgcgcctacgtgaatcacccgcagattctgctggccgacgagcccaccggcaacctcgacccgaccacttcgctgggcatcatggaagtgctggacgccatcaaccgcaccggcaccaccatcgtcatggccacgcataacgaagagatcgtcaactcgatgcgcaagcgcgtggtcgaactgcacaacggcaagatcgtgcgtgacgaggctcatggctcctacgattccgccctgttcttcccggatgccgaagtcgaagccaagtccgacaccgcccatcatgtgctggcggcggcgaccaaggccatcgagggcagtgacgagccgtctgaaggcatcgcccgtttggccaattccgtgcattccggccgcaccggccgctatggcgagacgtttgcgccgctggaagacacgctgacctggggcaa

SEQ ID NO: 868 - DNA, 3550 bp, Unknown
  R14_18m  MAG No. k141_14339
cccagcttcttgagctggcgcaggaagatatcggatgagtagacgccggccggaccagcgccgattacagcaatacgaagttcagtgttcacagattcagtcacgcgctctagcctaacgcaaagccttccgttgcaacaggggtgagtggtgggaatcctgtgcctaataccctctgccagcctcacgccagcggggcaaaaccacgagtcgatcaagaaattgccccactcacagaccgccagcggagcaaaatcgcgagtaacccgaaaaattgctccgcttacagcccatcagcggagcgaaactgcgactaacccgccaaggcaccccgctgaacacccaccagcgcagcaaaaccactattagaccgtaaaatcaccccactcgcagaccacgagtggagcaaaacccctattagcccacagaatcgccccgcttacagaccgtcagcggggcaaaaccgcgactcagtcgaggagataccccgcctagtcgcggtcgatgagggcagtgagggcccagaggatgctgaccacgtcgatggcctcttggaggaaagcgccgacgatcactggaatgaggttgaaggcggcggcaatcatgccgatggtggcgagtacgagaccagcgatcacggcctgcagcatcacgcgcttggtacggcgtgcaatggcgatagcgcgcggtacagcggcaatatcgtcattcataatgaccacttgggcgctttcggaagcagcagtggaagtgccgtcggtcatggccacgccgatatcggcgacggcaagtaccggggcatcgttcacgccgtcgccgaccatcatcgtgaccggcttgcggattgcggcggcgcggctgcatcgagaacgcgacggttgagaaccatcggaccggatgccatctacggcatcggacacagggctggcggcgtgattcgcgcgcccggccggcgcggcgcttgcctccgtggcagccttgacggcggcaaccttgtcttcggggaacagctcggcgtggacctcgtcgatgccgacttcgtccgcgatgatttcggccgaggcgtgcttatcgccggtaagcatggcgagcttggtaacacccagttcgtgcagattggcgagcgcggttttggtgttggcgcgaggtacatctcgcagcacgatgcgggcgatcagttgcccgtcaacggacacgtaggaggccatttcgtccggctgtagcataccgaatcgcgtacgcagcgtttccttttccttagtgttcccggcaatcgtacggccagatcctgcctcagtatccccgcccagaggggactgtccgtgaagcgggctgaggaggtcggccgcctcctgccgtgggccatccgcccggcttacacccgctacctcggcagtcaagaacccatcctccccggctgcagcgaacgacagtcgcccgacgcggacggcatggccgttcacctcgccggacacgcccttgccggagtcctcattaatattcttgacgaccggatattcgcggccgtggccgggccagctggcctctggttcggggcagagacgctggccgtccgcgaaacgctgacgcaagcgggccatcgcgtcggcaccggctttggcgatgcccttcgacaggatgtgtacggaatagctctctacaacgccggccaacatcagcacatggtcctcattaagacgggtctcagctccaggcagcatctcaacgcgcaccacttgcggctgcttgacggtaagcgtgccggttttatcgaagaatacctgggtgacgcggccaaggttttcgagcacatcctgcgccttgatgagcacaccggcggcggcgagacggccagtaccggcgatgtatgccacgggcgcggcgataagcagtggacagggcgtagccagcactaacacctgggcgaaccgcgtcggtatgccggacaccgcccaggcgacgcccgctattaccagcgacagcacagtgaacggaacggccaatcggtcggcggttttcaccacggccggacgggactcctgtgcggaagcgacgagttcgaggatgcgctggtactgggaatcggcggccacctgggtggcgcgcatggtcaaggcagtggaaccgttcactgcgccagacatcactcgggcaccggcgaacacctcgcgcggcaccggctcgccattgatgttgctcagatcgagcgtggccgagccggaaagcagttcgccgtcgaccggcacggtttcgcccggcaacaccatgagcacatcgccgagcttcacctgctcgaccggcaccgtgtcgaagcggtgcgtggcggcctcagccgaccagctcccctcagtctcgctccgcgagtcagctcccctcgacggcggtacttggttcccctctccaaggggagctgtcggcgaagtcgactgaggggaggacgtcgccggaaccgagcctacacgccggaagccatcggacgaatcgtccttatcagcggcagccccacaccccacgccaggcaagttgacgacgtgcgcagtttgcggtgctgcctgcatcaatgcggtcaaactgtgctcggccttggcctgcgcgtattcctcaatggcctcgccggacgtaatcatcagcatgaccgcccagcttgcccagtactcgcggacggcaacggtggaaagaatcgccactacggccagcaaatcgacgccgacttgtccgtggcgcaaatcgtcaatcatgccacgcactgtgtcaatcacaatgattgccaccagcgcgattatcagccattggcctacaccaggattacccagcaccggcatcgcaattgcgttgccccatgggcgccaatcgcccagcaatgccagcgggattgcggcgataacaacaacgggaagcatcggcacaagtcggcagatgtcgaggattttggtgaagaatctgatgagtccgctcatcattgctccttacgctcgtatacggagtcgattgcggcaagcgtggcccgcgcaatcggcgctgcggtcacgccttgttaacccaccggcggctttgcttagggcctttcggctccgcgcgaccatccgatacacggcgtaaagaaatcgtttttagttatgtgttgaattattgtgcgcatcgttcgagacattgcccgaatcagcgcttggcctaccctatcagcggcctgaacgcgacatgccgggcggcgaaactacgttggcagctcagtcggaaggcatcaatcgccccccccctacgattccgccaagaattcccgtgcatatgaggggctcgcagcccttatgcgcctgcagctgacgtcctgccagaacgattcccgtgcatacaaaagcccacggaacaagatatctgccgccgctccggccgacccagccaaacgcttcccgcgtatacgaaaggcccgcagcaggagttgctcactgctgcggacctttgcctatctgacacggcgttcaacggttaccgctcaacgccgtgtgacgcgctgaaccagctttaccacaggccgaacgggtcggagaagccg

SEQ ID NO: 869 - DNA, 2597 bp, Unknown
  R14_18m  MAG No. k141_14546
aatggcgtgatgtcgccgaagttgtgccagaagccgagtgagacggccggcagcttgaggccggaggtgccggcgtggttgtaagtcatcgtgtcgtaacggtgcgggttgggggcatagatggcggttggctcgaacattgagtctccttacaatgtcatttttgttcttacgaatgcttacctgcgatgggcaaaccgacgccgattgagtggcattcgtaagtgttcttggatactatggttccagttcaagtgaacttgaatgcaaacggctgcgacgcttcggcgtgtcgccgcagtaaggagtcatggtgtcctacaccattcgtcaggtggccacgcagttccatatgcagccctctacgccggtgaagactggccggattggcgcgagtacaaaaaccgcgcctattccattgaatgctgaggccatcgagtgctgagctggatgccggctgggcactaagaccgatgtgcgtcgatcgtgggcgcgtctatccgagtaaggccttgctcggcagtgcgcggtcgagcagccagacaacgagcgatatcacgaagaacgctatggccagcttgccgcagctaatgccgaacccttgccagccgagtgcgtcgaggttgatgaagtcgtacggatacggactgccgccggccgccggtccggaccccggccaaatcgtcgcacgggccagcacgaagaccaagtatgcagggaagtacgccagccacgagaacatgtaatgccagcggaaacgccggtgcgggtcgaatagcacgaaatcgataaccgccataatcggggcgattttgtgcagcatcgtattggtcatgatgccaataacctgtggcacgtatgccgggtcgtccggaggcatcaggaagaacgccaccagtgcggtgactatggcgtacacagtcaggcatcccttaggccatgcaggcggctgaatgcctttgagcagtgtggccgcgccggcccacagcatcacgatgcccagcacgaaaccggtctggaacgtgaaatacacccagaactgcggtttggaccatgcctcatatgtgcccacgaagcagaaaccggcgatcgcaaagcgccacaacgccacgatgaatctcatgcatcgagtctaccgcttcgccagtgggctgtatggctttgcccggactacacttaggtgcaacttcaccacttatgtaggaaaggccttgcaatggtcgattattcgccggctctgatgactgacatgtatgaatacacgatgctcgacgccgctctgaaagacggtaccgccgaccgcaaatgcgtgttcgaggtgttcacgcgtcgcctgcccgaaggccgtcgctatggcgtggtggccggcaccggccgcattctggatgcgctggaacatttccacttggacgaagcggacctgaagttcctggccgaccgtcacgtggtaagccccgagaccatcaagtggctggagaacttccacttctccggtacgattcgcggttaccgcgaaggtgagatgttcttcccgaactccccgattttgcaggtcgaaggcacgttcggcgaatgcacgctactggagacgttgattctatccgtgctgaactacgattccgcagtggcctccgccgcctcacgtatggcgtcggcagccaaggatcgtccttgcatggatatgggcggacgccgcactaacgagtgggccgccgtggccgccgctcgagccgccgtagtgggcggattcaagggtaccgccaatctgctggccgcccagctgtatggtctgaaggccattggcaccgccgcgcattgcttcacgttggtgcatgattccgagcgtgacgccttcgaatcgcagatcgaggcattgggcaagaacaccacgctgctggtggacacctacaacatcgaggaagccgtgaaaaccgccgtcgaggtggccggtcccgaactgggtggcgtgcgcatcgactccggcgacctagccgccatggcccagcgtgtgcgcaaccagctggacgccctgggcgccacgaacaccaccattaccgtgaccaacgatttggatgagtacgcgctcgccgcattgcagaccgcgccggtcgactcctatggtgtgggcaccatgctggtcaccggctccggcgctcccacttgtgcgatggtgtacaagctcaccgaacgtgaaggcgatgacggcacgatggttccggtcatgaagaaatccaaggacaaggccacagtgcccggtcgcaaactggcattccgctcctacgaatacgcgttagccgaagctgaacacgtgatttccggctcggaggagaagctggccagtttcacgcctgaaccgacgtggaagaacctgctggtcgactttgtggatcatgggcagatcgacgctcagtggcagggccatgacgccatcatggccgcccacgactaccacgccaaggcgttgtccgaactgcccatcaccgcgcagagcctcatgaagggcgagccagtgattcctacggagactcaggttctctgaccgtatctcactggccgcatccctttggttacattggctactcttccctctgtctgtg

SEQ ID NO: 870 - DNA, 3196 bp, Unknown
  R14_18m  MAG No. k141_14819
cgccgaggcattcgagcagatgttcgccacgctgttcccaggcggcaccggacgactgcgcctggaaaacccggaagacatgctcaccaccggcgtactggtcgaggccagcccggccggcaagcgcgtcaaacagctgagtcttctgtccggcggcgaacgttcactgaccgcgctggcgttgctgttcgcgattttcaccgcccgccccagcccgttctatgtgatggacgaggtcgaggctgcgttggacgacgtgaacctgacccgtttgattaatgcgttcaatgagttacgcgcccatgcgcagctcatcatcattacgcaccagcaacgcactatgtcgattgccgacgcgctttacggcgtaaccatgagagccgacggcgtaacagccgtggtgagtcaaaaactcgaacgataaacgaatggttcccgctggtaggaactggtaccacaggtgacagagggcggtccatctcgaaagaccccctcagtctcgcttcgttcgacagctcccgccagcgggagcggggcggtattagcgcaatgccttgcgtacgccttggatggtttgcagcgtcttgtagaagacctttttgatgggtacgtcgcgggcgggggccaccggggtgatttcctcggtgaacttgcacttgaactcgttaaggcccttgagagacggcgcgaaatcggagccaatgcccatgagatcgtattcagtaataccctgcgagcccaggatgcagcattcggaatacagcagcttgtcggtcacatgcagacgcataacctcgttgcgcatgccggcatagtagcgcaccgcatgtgtgccgttcacggtgacaatcgaccatgccaccacacggtcttcaatacgtgcggcgaacacacggcaatgatcggcacccaacgcgccgatcatatcggaatagtcgctcatcggagcaggcgtgaatccatcgcgctggccggtctcgaccatcacatcgtaatattcggagaaatcggccagcgccttatccgtctcatcggcaacctcggccgggcactcgcgcagagacttgcgcacgtcacggcgtccacgacgcttcatccgagccagaatctcatcatcgccaccggtgacgtcgatgaccacggtctggtcgtacggcactgtggacagcaccttctccgtaccatcggcgaaccaggtgtcgatacgcaggaacgcgatgttcttgtcggccttcttgacggtgtccacgatggcgtcgacgacctcgcgctcctcagcctcggtgggcttggcgacccacgccggcccatgcatcgagcgcagataatgataaccgtgcgtctcaaaatcgataaaggagatcacggcgaccaattcaccatcacgcttgatcagataatcgccccatggcgtgcgtccgtcgatatccgcctgaaaaccagaccaaaccttggtctgttcgataggcaacgtggtgccggccttctcggcttcggcttccagtgtggctccgtcaactttctccaacgtgatcattacgattcagctatcctttttcgttcgtatccgtatgtcgtgtttctggtttggtcgtattgcgcgtgatctgatgtgggccaatcgggatccgatcaggatctgattggccggaatcccgtcacaagccaaacatgcgttcgacgacgtgatcgtcgccgtcgaacggcacatgcttgtgatggtccttgatccaacgctcgttgcccttgccgatgatcagcaggatgttgaatcggtcggcgtgcgcacgggcatcgtagatggcgttggtgatggccgtcggacggtcggaaatcaccgtggaggccacatccttgttcgtgatgtagccttgcatttccatgcagatgtcgatgaacggctcggtgtccgtatcttcggcggtgaaaatgaagttcgcgatgcggttctcggcagcctcgacgatttccttacgacgatcgtaggccttgttgccggccgatccggtcaccagcgtgatacgcgggttttcctcgccccaacgttcgtagacgaagtcaagcagcgcggtgacggatgcgtagttgtgcgcataatcgacgatggcgagcgtgtttgactgcgggtcgcggaactgttccatacggccggcgatacgtacggattcgagggcgtgcagtgcgccggcgtcatcgagcgatacgccagccgcatgggcgatggcgatggccgccgccgcattgaggtagttgaagtcgccatcgatggacagatggtagtcgccaagggcctgatctccgtcggcgatgtggaaggaggcgtgctccgggtcggcgggccaggcgacgacgtccgcactggtgccggcattatccgcgtcatgcagggcgaaggtggtcacgccgatgccggctgcctccgcgtcctcccgcaacagatcggcgtgcagactgtccgcgccgagtaccagcgacttcgcgttggcgatgatctggcgcttgcaatacaggtaatcctcgaacgtggggtgttcgatcgggctgatgtggtcgggggagatgttcaggaacgcggccacatcgaaagtcagtccgtagacgcggtccaccttgtacgcctgggaggagacctccatcaccagatactccatgccgttatcggccgcctcgcgcatcatgcggaaggcgtccatcgattcgggcgtggtcagatcggactcgacgtaggtgtggccgtcaaggcaattatcgaccgaggagaacaatgcggccttgccaccggagacggcgttgataagcgcctgcgtgaagtacgaggtggtcgtcttgcccttggtgccggtgacgccgatgaccgtgagctcgttctgcggatatccgtagaacgtggcggacagcaggctcatcgccttgcgtgcgtcgttgacgatcaggccgggggcggcggttgcggctgagtactcggtttcggccacgtatgcggccaggccggcttcgtcgatgccgttcagatactcggccttgaatcggcccttgcagcacagcagggtgcccggcgtgaccttgcgggtgtcgtaggtgatgccggcgaacggttcatccgccgaagcgatacgggccgggtcgtcggtccagacatccccttggatgatttcacgcagcagatggtgttccttgagcaggtcagcggccgaag

SEQ ID NO: 871 - DNA, 17422 bp, Unknown
  R14_18m  MAG No. k141_15164
accgccagatgacgcaccgccagatgacgcgctatccgattgggccggcgattccacgaacgcccagctctgcggatttgcggcgcgcacaccatgctccgacaggagtgtcaacgcaaccgcggcgtcctttgcggcagcctgctgcggttgagcagtggccagaaccgcgcgggcggcgctgaccaacccacgtgggtcggcgtccaatccggccagatcatattcggcggatcctgtatgcgcccccactgtggtgaaaggcgcctgttgccggttgcgcggatagtattccggcagatacccgaaaagaaagtccgaggggctcatgctgtcgttccataccgcgctgatcatgattcgccgtgcacgggtcagcgcgaccaggaaacccttcttctcgcccgacagcacagccgcgaactgcggatcatgcccggttttgtcactttcttcaagcgctcccctcagcacgagctcggcaaggtcttcaccaccgaacatggtgttgcgcccggcgaggttcggccacacgtcttgctggaccaccggtatccacgcatatccccagtggcgtccggccgcgcctgccggcgtggtcaatgtcacagcgtcttccaccggccctatgtgggccaaggaatcggcctgcacttccatgccccgaacctgtgccatgaatgacgtgatgtctcggctggcggtggaatcatcggcgaactggaacaggcgcattgccgcgtccagccggtcattggccgtgcgcccctctgccgtgttgaataatgccgcacgctgccagaccggtgccagaccggtggcgttccaggcaacagacagtgcataacgcggctgtacgcgctggcttgccggcagccgctccaagccggaagcaacgctgcccaccagatgccacaggttcgcaaaagcgcgggcctgagggtcgttgccaagcaccgcatggatggatgcgagcgcagcctgcgccggcgcggcggcatcatcaacggcaagcatcacgtacagcgcgtcaacgccaaaggccaagtcatcgtcggacggttcaccgagtatttcgacagacactggcgacggaaccactgatgaggatgtttcacgacctgtttcacgccgtgtttcatggtatgtttcacgcaatgtttcccatgccgtcgtcagagaggtcagcatggcatcatccgtggcgagatgcgccagcgactccaacgaccccatggccgattcgatcggagcgagccttgcaggacgcccttgaccgggtctgcccccggcactcaccaacgggccgttcatcaacgtggccactctagtccttatatatgccgcgcaggaagccaacgtcatctggcattccgccattccctcggcacgcaatcgggcaagctccacaagcgcgaacaatccctgcacgaaagtctcgtccttcaaaggacgggtgaccgacgaataccgcaccggcacgccatctcggcgcagtcgttcgccgaacagccgcacggcggcattgtcgtgggtgatgaccgccatgtcgttccaccgaatatgccggtcaagatgcgtccgcttgatgcgccagaccacatcatccagctcctcacgtgaggatcggtacaggccggcggtcaccgtgccgtccgactgataattcgctgcatcgactccgcccagcatggcggtcagcttgccgggacgctcggccggaggcagcggctcgtcttccggcgagggaatcgacagcgaaatacgagacgcgatcacatcagccatcgtcatgtgcgactgatcagcgccggtactgccgccaaccagctgttcttccttggctttcagccacccttccacggcacggcgcatcagatattccggatacgatccacggaaggtctgcaccgattcatccgggttgccgaccagcaccaacttgacgccggcattccccaactcctccaagaagcgcatgccggccagcgtggtgtcttgaacatcatccacaaccagcagccggggcaagcccaacgcctccatacgcataggccggtcggaatcatccgcgtgatcggcggcgaatgcctcatgcaccacacgagctcctgccaccagcaaatacgaggcatccaaacggtattgccccggatatgccgcgctttgggctgcaatatattcacggcgcaatgcgaaagccaaacgccattgcaccgacaatcgcgcgtcctccgtcacggcgtccaagagacgtggctcttcgtgaacgcctacaccgagctcgtccaatcgggccagcatatcgcgcaactggccgataaacgcatctgaaataccgcgagtgaacctatccgcgctggtcgagccgcctgccgacgtcggagacagcgaatccgacccttgttgcgagaggcttgattgtgcggaagcggccgagccgggcatctcgccggcaccggcatcgcgtatgagtttcgcccagtcatcctgggcaaagtagacgcgtagcaaatcacaggtgccgcaatcatctcccgctacggcatggcgcagatgcacggccatgacttgacgcagcaaagcatcctgttccgcaccgttcaacaatcgaggcgacggcaatccagttccctcgcgcgaagctgatatggcccggaatgccacggcacccagcgtggtgaccggcctggcctgcacggaaaacccgagctcacgaatcacccgattgcccaatgcgtcggcggccacacggccggatacggccatcaccgcctgcgtgccaccgtagcggcgcagccccgccatcaacaccgataaggcgaattcggttttgccgcttccaggcgtgccgacaatcagcctcgccgctccatcacggtcgatgccgtccagcactgttccaggttcaagtctcgtcatcatggctccagcctaaacccgaccgtcacagagggaaaaattttaccgaacccgacgaagaatcgtacccttgacggtatcctgtagaacgaatgcagggagagcgcattttccaaggagggagggaacagatggccaatattccgatgaggccgccgaagctgcccggatatgatttcgtccagatgttgggaagcggtgccaccgccacggtgtacctatataaccagcgtatgcccgcacgcccggtggcggtaaaggtcagcgccaaaacccttgacccacgggccgctgccctgttcaaccgcgaggccaacttcatggccaagctgtcatcccacccgtacattctgccggtatatggtgccggcgtcacctccgatggccatggctacattgtcatcgaatatgcgccgggcggcacctacaacagcatcatgaaggcccggtccatgacctgcgagcaggtactcgacctcggcatcaagctgtcaagcgcgctgttcaccgcgcatcgcagcaatatcatccatcacgacatcaagcccagcaacattctcatcacctcgcagggtttgcctgttctgggtgatttcggtatctccaccgatgtgtatgaccgtaccgaaaccggattctcgccgccgtgggcaccgcctgaagtgcttcagcatctgaccaatggttcggaagccgccgacatctattcactggcggccaccctgtacgccatgttcgtcggctgctcgccattccagcacgaatatcatccacgttcgcaatcggaactgatttcgctgatcgtcaatcagccattgcctcgcctcaaccgccccgacgtaccggccgatgtggaagcggtgctgcgccgggccctgaacaaggaccccgaccagcggtactactccgcgttggagttcgcacgcgccatgcagcgtgtgcaattcgcatatttcgggcatgccactcccgttaccgtggaagggatgccggcctaccccaaagacatcgagcgtcggcgccgggccacggaccagcgagatcagaccacccgttcgtcacggcgatgggtcaaaccggtgggtattaccgtcggtatacttgcggcgatcaccgcagcggcactgatattcgccttcgtggtcgttccccgcatggacagcgccaccggatcagataccaaacaggtggcgacgcccggcaccaaggatgatgacaacaaccgcaataatcaggatgacgtgattaccgataccgcgaacgcccagattccttccccggagaatctgaacggcacctatgcggcggatgggtcatccgtgacgttcacctggacgaatccagacccgcaaagcggtgatacctatgcgtgggccatagtgcagggcagcaataccgaccagagcgcgcaaaccgtcacaacgtcagatcccacggtgaccgtcaacgcgcaggaaggctcgcagacctgcattcaggtgtccattgtgcgcaagaaccgccagatgtccgtcagccccgccatcgcctgtgcggccaagccgcaagagtgatccgctcgccactgccgggcataccaccttggcattgcgtatcgcatcaggcatgcgaccggcagtggcgaattcaccaaatggacaacaggaacggcaggtattggaaccgtaaagcgttgtcattacactagcaaccagagaaaccagggttcagggagttcagatggccacatcgtcccagtcatacgatcgtcgccgacgcatcagcgcggctttgcgccgccttatgccctccggagggcatacgtggacggttcccgtaatcacgctcctgctgcttctgggacttgttgccggcgcggtgatcatgagcaccgtcacgcgccgccatgtgcaactggacgatggcaccgtgtgggtcacttcgctgaagaaccagaaggccgcacgattcaacgtaaagaacaaggaggccgacgccggcgtctcctcctccgccccacgattcgacatcgcgcagcataatggcgacaccatcctgaccgaaacgaccaaagcctccaccatcaaggcatccacggtcagcaccggtgtcaagaccgacatcaaagccaacaccaccactgtggtcggcggggataccgtagccctgatcaacgagaagaccggcaatgtgtggaccggcttgtcggaaaaccttgattccgtggcccccaccacttccgatccgaaaatgaagctgggcgagggcgggcgcatcgtagtaacccacgatggcaaggtctacggataccgtccatccgacggtatggtgctgcgtcttgacaatcccagcagcgccaaggccaaaaccctcgaatcgctgaccgacggcaagcagcagaccgttgaaagctttaccgtcatcgggagcacgccggtaatcgcaaccggcaaaaccgtcatattcaagggcggccgcgtcgatgtcgacacgaccggcaccctcacccttcaggagcctcccaccgatgacgtacagtccgattgggtggccgcggcatcaccgagaggccttacgcttatcccgttgaggtccaatgccaaggcgaatttcatagccaacgggggcaaggcgaatccggcacgaccggtatcgtccaagggctgcgtgtactcggcttggagccagaaggccagcaactacattcgcgcctgctcccccgcggataccagcgtcaagccgcaaaccctcgaatccgtcaatactacttccgaattggtgttccgcaccaaccatcgccttgtggtgctcaacgacacggttaacggcaatgtgtggaaccctgaggattccaccaaagtcatcaaaatacagtggaacaaaatacaggccgagcagaccgagaaagaacagcagaacaacgactcggccaacaaccaccacgacttctccaagacctgttccgcacaatccggccaaatcaaagccgaggatgatgaaatcggcgcacgagccggttcggaacagattctcgacgtgctgcgcaatgacgagcagaccgattgttccgtgctgaaaatcaccaaggttggcgcaccaaacaacaaagacgtcaccatttcgccgatttacgacggccggtatctgcaactcgatgcctccgccacatccgcaggcaccgttacctttacttacgatatttccgatggccgcggccagacctcttccgccacggtgaccgtaaccctgaatgatggaggcaaccacgctcccgtacagttcgacactcctcccgagatcgatgtggagcagggagccagttataccgccaatgcgctgagcagcttcaacgatccggatggagacccgctcactctggtctccgctgtggcccagaacaccgaccaggtgcaggtgtccacccgagccgacggccagcttacgttcaacaccggtgcgctggcgtcgggacgcgtgggcgtcgaggtcaccgtctccgacggcacggcgaccggcaccggcatggtgtatttctcggtcaagcccgcgaacaccttggccgcggtcatcgacccggtagcgaaaaccaccgttcccaacacggataccgtcgtcaagctgtcctcttacgtgcatggcacttccttgcagccggcacagctgactcaggtggatacgcccaacggcgcttcgacgaccaccaatgcggcggatatgtcgttgacgttcaaggccaccaatcccggcacctattatgtgccctacaccattactcaaggctcgattccggccaccggattggctcgcgtcgaggtacagcccgccaccggcgaggccgccaaaccggttgccgccaacgatgtcgccctgcttggcgcggataataccgccattgtggagccgctcaccaatgacgtcgatccgatgggcggcgtgctgtccgtcaccacggtgagcgcaccggccgactccggcatcaaggttggtctcgtcagccataagcgcgtgtatatcactgcgcgtcaggtgcccacgaaacccgtcgcccttacctacaccgtggccaacgcctccggaaccgccaagggcaccatcgtgttgcagccaccggctctgaccacctcgaattcagtgcccaaggccagcaatatcaatgcccaggtgcgcaccggcggcatcgtgtccgtggatgtgcttgaccatgtggcctactcggatggcaccacggtcaagctcaagaacaacctgcaatacgacaaggagacgttcaagggtctggccttcgtctctggagacacggtccgctaccaagcatccagcgagaccggcaacttccccatcacctatacggttgaagacaatctgggtaatgtggcttccgccaatatcaccattaccgtgcataagagcgacgcagcgagcaaggccgcgccaaccccgcatgacgccgaagcgcaggttgccgccggacagaaggtccgcatccccatcacactgaccggcatagacacggatggcgacgacgatcagctgttgggtctgggcaacaaggcacccacgctgggccgcatatccgaagtcggttccgactacttggtctatgaagcgtatccggattcgtccggcaccgacaccttctcctatgccgtggaggattggaccggtcagcgcgcacaggcgcagatccgcgtgggcgtattccaaggatcgtccgactccggcgtatacgccagggatgacgaaatcacgttgaggcccaatacggccgcaaccgtgccggtcgcgcagaacgacatctccggcgacaacaccaatctgaccgtcgacaagcatgtcgaggtccaaggtctcgacggggtgagcgtgaaagacaacatgatctccttcaccacgcccggcagcgccaccaccgcctatatcgcctacacggtcaaagacaaggccggcttgtccgatacggccaccctcacggtaaacgtggatccgaatgccgccatcgagccgcctaccgcctacgactatcgtgtgccgtccgccgccaccatcgataagaagtccgtggatgtggatgtttcccagtggatcgccaatccttccggcacagccaatgagctcaaggtcggcgttcatccctccgccagcgctcacgctcacgtcaagggcggtgagcattcgaccaccatcaccgtcgacctgacgtcacaggcgcgagccgtgccttacacggtgaccaatacgaaatacaacatcacctccaccgcgttcatccaggtaccggcctatggtgtctttccgcccacgttgcgtcccaaggcaccggaattgaaggtcaattcgcgtgagaccattgaaatcaacatcaatgactatgttcgcgtcggtgccggcaaggaaccgtatatcgaaagcgctgattccgtcagcgccaccaaggcttccaactccgatttctacgtgaacgacaagaccctgaagttcactgcggcaaaagactacgcaggccccgcctccattacctttaccgctgtggatggcaagcagggatcggataagaccaagattatcaattccgcagtgatcactctccagatcacggtgataggccgcgatgtgccgccgcccacgttctcgtcctccactattgatgtcgaggcgggcgcgaaccccaagaccgttgatctgacggcgctcacccatgcaccgtccggcgtgtatgacgacgagaagcaatacacgtattccggcggaagctcatcgtccgggcgaatcaccgctaacctgtcccgttccggcagcttgcaggtttccgccaccaaggatgccgctcctggcaccaccgcgtccattcccgtgcaaatcgcatacggcgcgggcaccgtgaatgccggtgtgaccgtgcgcgtagtgtcttccacccgtccgctggcacgcgtcggcgacaagacgctgaagatcaaggccggtgccagcgatgccgtgaacgtgcttaccggcgcgtacaatccgttccccgattcctcgctgaccgtcatcagctgcaaggcggatgacgccgccaaactcactatcgccggatgcgatgcctccggaaacgtcaccatcgccgtcgcatccgatccgggtgcttccacgaacaccgtgctcgtcaccgtgcaagacggcagcaagtccaaggatcgtgaagtcaccgcatcgattaccgtgtccgtgatcgacaagcccgagccgccactgctctcccccgtagccggggaaccgcaggacagcgcggtcagcctcacatggacgcccggtgccgccaatggcagcccgatcaccaactacaaggtcagttggaccggcgccgccaccggagagaaggattgcggtgccgtcacctcatgccaggtcacgggtctgaagaacggcaaaacctattccttcaccgtcgccgcgcgaaatgacgtcggttggtccaaaccgtccaccgccgtcgaagccacaccggacaaggtgccgtccgctcccaccgatgttacggtcacaggtggcaataaaaccgccaaagtgacgtggaaagcgccgagcggtgatttcagcgccgtcgacaactattcagtgaccgtcaccggtgcaggtgctccgcagaccaaggaaaccggcaatacggccaccgagctgtcgtttacgttcaacaacaacgacatttccgatggcaccgccattacggcgaccgtcaaagcccataacaaaatcaattggagtgccgagtccgcctcatcacagccaaaggacatctggggagacccggatgcgccgaccattgcgctgtcgaacgacgacaccacaggaacggcgaaagtcactctcggcaacaaccgcaatgccggctgccggcgaatttccttgggaggagacatcaaggacaccatcgattgcagtgacagtggcgctacgttcgatatcaatgagaacgatttgaacacccgggaaatcaccgtaacggccaccgtggtgccgcagcgcgatgcttccgccggcacaggcaagagcaggtttgtcccgcagtacaatgtccagccgcccactgacgtctacaccaccggatccggcagtacatgcaccgtgcattggaccaagcaggggcatgcgcagtcctacaacgtgactgccgatggcatcgattccggtacagctactaaccggaactcactcgacttccgaatgagtccttgggccaaatgcaataccgcatcggtgcaacaggtgttcaacggcgctaccagcgatgccgccaccggaggcccgtacaatggcgctccttacacctatgagaagaaggctgtaatcaacaaaccgcaggagctgcgctggtcagacaacgctcacgtcattaacgtcaccggcggttcggttgaggtctatggcaagcaggccaccgtacaaatcatcatcaatggccaaccgttcacgtggaaccccggccagccattggacgtcaccgacttggccgtggccgccgatggcaactacacgtggagcgtcaaagtcaccggcgggccgggatactccggtctcgacaatacggcggacggcagcagcgtcgcgggcacacgcccctctgattcctcggaggggaccgagtcgctcaaatccggtaccgatgtcaccactttggccaagaacccttggattcttggtttcggtaataccccaatatcgtcaaccaccattcacaagcagtaggagaacatccatgagcgagaacatcgacgacgcgacgcagctgtctgacagcacgcagctatccgacgccacgcacttgtccgatgccacacatctggcatcggaaccgcacactggcaccaccccgaacaccgagacggcacagcaacccgttgcgttgcctaacctgccgcagcggccgtcacaagcgtcgtcagaaaagccgtctcctactactgatgccgcctccattcctgcgggcgatgacagcaccgtgctcaagccgcgcaaggacgcgacgccagccatcccgcagcaggtcggcatgccggcaaagaccagcacgcccaaagtcgcgcttccgcacttcggacgtaaatccggcaagcaggccgctactgcgaatgctgcccccgccacccagacctcccgtcaatggacgaccacaaccgccggcaagaccgcagcatccaacgccgaaaccgtggctggtcgcgggccggtagccaatcagcaggccgccgcgcaatcccagccgcaatcccagccgcagcgtcagtcgagcaaagccgcgcaagcagcagcatcggcactgcccgccagcatcaattccggactactgccccagcccacggctcaggtccgggatttccagcagtccttcaatgcgctggtcgagaatgtctccaaggtggttatcggcaagaccattcccatcaagcaatgcgtcaccgcactgatggtcggtggccatattctgcttgaagacaaccccggcaccggtaagacccagttggcccgaggcttggccaactccatttccaccggtttcaagcgtattcagttcacgcctgatctgctgccttcggatgtggtgggtgtgactttctacgatcagaagcgcggagaattcgagttccgcgagggcccgattttcgcctccatcgtgctggccgatgaaatcaaccgtgcatcgccgaagacgcagtccgcacttctggaggttatggaagagcagaaagtcaccgttgacggcgtcacccatgatgtaccgcagccgttcatcgtgatcgcaactcagaaccccatcgagcagctcggtacctataagctgcctgaggcgcagatggaccgcttccttatcaagacgtcgattggctacccgggccatgatgtgtccgtcgatatcctcaagcaggtcgatatcaccgaccgtgcgcagaccgtttccccggtgctgagcggtgacgatgtcatgcggctgcgtcaggtggccaccgaaatctatgtggatgatgcgattcgtgaatacatcgtcaggctcgtcgaggcgacccgccacaacgagaagatcacagtcggctcctccatgcgtggcgctttggcgctgacccgatgcgcccgtatctgggccgcggccgatggccgtgcctacgtggtgccggatgacgtcaaggaccttgcagtggccgtgctcgcacaccgtatcacgctgactccggaagccaccttcgatggcgcgactccggaaagcctgatcgcacaggtgctcgaagacgttccctcccccaccatcggttcctgatagggcctggaaaggtatccgaccatggcatctacatccgccgcattacgccgtcgccggcgcgctgaacgcatgttcaagcgcgcggtaagacgcatcagacggttcttcgcatcctacgtctcgcccttgggctgggcggtaacgggcgcaggcatcgcatgtcttattgcgttcctgcctctgggctggtatgagctgctcgtattcggcatcgtggcgatggtgatgatgctcgcggcaatcgcgctttccctcggcaacacacgcttccacgcgtccatcgccgtatccgatcatcgcgtgaccgtgggagacaccatatccgttatcgtcggcatcgacaacaccggcagaacgccgacaaccacggcacgcggatatctgccaatcggcgatgcgcatgaacgattcaacatccccatgctggctcccgggcaatccaagcaaaccgatgtggagttccgtacggtatcgcgcgcaatactgcccatcggaccgttgcgcatccgcaagggagacccgttcggcctggtgcgtcacgaaaaggagctggccgaccgcatcatcgtattcatccaccctcgtaccgtgcgtctcgataccctgaatgccggcgtgccccgcgatctggaaggccaaccatccggccagatcgtggatgatgatctcgacttctacggattgcgcgaatacgagccgggcgacgacgtgcgtaacgtccactggctgagctccgcgaaaaccggcacgttgatgattcgccaatatgaagccacgcgccgcaccgacacctcggtgaccatcagcgtgaacccggatgagtacgtcaacggcgaggaattcgagatggcggtgtccatccactcctccatcggcgtcaaatgcctgctgcaggatcgcccgctgttctgtcacgcgggcaacgcgcacggccagccgcgcaacgccatggagttcctcgacaacgccagtgccatagagcctgatcgtgaggacaatccgaatctcgccgagggcacgctgaagcacagtcctgatgcttcgttctattttttcactgttggatcgctgaaagacatcgagcaaatcaagcgcatgaccttggccttgccccgatcggccagctgcgtggtattgcaggccagcgccggcgccaatcgcggcatcagaagattcgccaacttcacattggccaccatcggcgaactcgatgatctcccactgatcatgggggtgctcgcatgaccttcgaccagtccagtatcaccaatgccaataccgctgcgtacgccggatcgagcggcacatacaccggcacttcctccggcacgtacaccggaacctccaccaccaccggctcctgggccgactccacacattcggttatctggatgaccagaggcaatgtgcttcgcggcatgggcctcagtcgccagccgtggggcaaacgaatcaccagcctcgtactcatagcggcgatgatgttgctggcgcaagccaatctcatcgacgtgtacggcggcgtggccacttgggcgatcgccgccgtaccggccaccttgctgggcgcgatcatcgctctggcgggcatgttgccggcgttgcgactgtggtggcaaatcgtgtttctggcgtttgcccaattcatcatcggtccggtggtaacgctgagttccaccacgtcccattacgtgattcccaccttgaagaccttgagttcaggttgggaaatgacgtttggctcgttcaagtacattatttccgtcgatccgcctctgggcacgcaagacggcgtgctgctggcggtatggaccatcggcctgtggcttacgttcctcaccggcgtgtttgccattaatgccaacgcatggttgtctctggtgggagtgctgcctcttgcggcggccgtggccgtatgtgctctgctgggtacggacagcggctggcaacgtgccatctgcggcattgcctttgccttgctgctgattatctggctgtcttggcgtcttgaactgctggaatgggggcgctggatatccgcgctgatcatcgtcgtgctcgctgccggccttgctttcggaggcacgttgctggtgccgcaggaccgtttcgtgctgcgtgaccgctacgatccgccgttaagcccctacgattacaccagcccgctcagcggcatgcgatcctatatcaaggaccacaaaaaagacgtgttgctgaccgtccataatctgccggccggaacaccagtcaaacttgcggtgatggaccgattcgacggcacagtatggaacctgtccgattcttccgaagccacggactcctcgaattatcatcgcgtgggcaccacgatcaaggcggatgagcagggcgaatccttcactgcgaccttcaccgtcgatcagggattgaccgacacctggctgccgctggcgggagcggccactggcgtgagcttcgccaacgatgccgacaacggcaatgacacgttctactacaacacggataccgattccgccattattcccgccggcacgcgtaaaagcctcacctataccgaatccggcattatcgcccgcaagcccaccgataagcagatcagcagtgcggccgcggcccgcatcacccaaccggaagcccaggatgttcccgattcggccagcaaactggccacgtccattgccggcggacagtcctcgggcggtgccgcagccacggcgttggccgacacattgaaagactccggatggttctctcatggactcgaaggcgattatccctccgatgccggccatggcaactaccgtatcaacaagctgctggcaggcacggccatggtgggcgactccgagcaatatgcctccgccatggcactgatggctcgtgagctgggactgccctcccgtgtggtcctgggcttcctgccgaaaaacaaggatggcgaaatcaccgatgcccgcacggagaagacctcgggcaatggcaccaaaatcgaattcaccggcaacgatgtcaccgcttgggtggaaatcaaattgcagggcctgggatgggtggcgttctatccgacgcccaaggagaccaaggtgcctgatgaaaaccagaacctgacgccgccgaatccgcagacgctggtccggcaaccaccggtgccgttgaccgatccgctgcgcgatcagacgcaagccaggggccaaagctcattggccggcgccgacgccgatgattcgccgaccaacctgttctgggtgcggttctggcgagtgacccgcaaggtggccctgtacggcagcccattgtggaccctactcatcgtctgcggtctgattctgatgttcaaggccatgctgctggcgcgagcgcggcggcatggcagtccgaaagcccgtgtggcagcaggttggaatgccatacgcatgcttgccgagcaaagcggcatcacagccaagggcactcgtcgagatcaggccggtgccatcgcccgtcaactcggcacagatgaccaggctttgatccagcttggccgggaagccgactacgtcacgttctcggggcaagacattgaatcgggccaagccaccacatattggacaggagtcgaccaattgcgcaaggcaatgctcacttctttgccgcgtttcaggaggatacgtacacgactttccctgaaaagcgtggctatactgtcaaatagacacgcagccaagtcgcacacgacgcatgtcaagcgcgcgcgtaagaaggggaagacgtcatgaccacaggctccatccgtatcgcgatgaccagtgacgtgggtcttaggcgcaagaacaaccaagacaccggattcgcccaacagggtgtgttcatggtctgcgacggcatgggcggcggcaaaggcggcgagcaagcaagccagttggctgcccagcatttcgcgcagctggcttccatgccctcgcgcacccgccatgacatcgacgacaccctggcacaggctcagcacgacattctcgatttgggtgaccgtctcggcggcgtggccggtacgacctgctccggcctggttttgccccagccttacgcagatgccatcaatgcccacagcgcagctccgtttgacgacgccgactccccggatttctcggaccagacctatgtggtcaatgtcggcgattcccgaacctaccatctcagcccgctgccggatgccgatgcccccgccacggatatcatccccgtgtgggacgcctcctcgctgacccgcatcacgcgggatcattcccaacgccaggaggctatcgattccggtcagatgctgccggaagaggcggaggcgaccattccacgcaacatcatcacccaatgcctgggcgatccagacggcatagtgcccgacgtatatgttgccgatctgaccggccgtttcatcatctgttcggatggattgcacggtgaagtgtcagacgaacagattgcggccatcgccgcagcgcattccagtccgcaggaagccgtggacgccttggtggcggccgcgctcgatgcgggcggaaccgacaatatcactgtgattgtggccgatatgccactgaccgaacccgaacatcacgcgttcagcgcttttaaactggacgagggcgaggacattggcgccattgaagacgcaacactacaaacactacggaccatacgttcggcataaccgagcgaacataaggaggtaatcccatggttgattatgatgctgcggtcgctgccgtacaggatccgaacgcggacccgattctgttggcaaaaatcgcctacgagaatccggaattcggcgcaaacgtcgccgtaaatccgcgttgctaccccggcttgaagcgttggatcgccgagttcggcgatgagcgcgcccgcgagaccctggcgcaatacgggttcaccgccgaggcattcggcggcccggtccaggatcaggaagccccgtcacaggcggccctgcaggctgccgagcagcagcctgcagacgcttacgccgccgaccagtacgccgcagctcagcccgctgccgaccagtacgcagcccagcagcccgcaactgaccagtatgctgccgctgtccagcccgctgccgaccagtacgcagcccagcagcccgcggctcaggcggcattcgaggagcctgtggccaccaatccttatggcttcaccgccgaacaggccctgaccaccaccgaccagatgcaaatcgcccagattgcc

SEQ ID NO: 872 - DNA, 5022 bp, Unknown
  R14_18m  MAG No. k141_15375
gcataggaccctgcgcgagtaggatagccgtccatggtgcagattcatggcattagacgcgcaagcgcggacgcgaaatatcggcagatgaccgggcagccggtcaagccgctgattctcaaactgtgcttgccggccgtcatctccaacttggtgaccaccgcctacaatctcacggacacgttctttattggtcagctcggcaccgcgcagtccggtgccatcggcatcgcgttctccatcatgaccgtgatgcaggcgctcggcttcttctttggcaacggcgcgggcaactcgatgagccgcgaactcggcaaacagaacaatgagcgcgcctcccgactactggccgtgggcttcgcgggtgcggtgctctctggtttggtgattgccacaatcggattgctgaccctgcggccgctggtcgtcatgctgggatcgacctcgacgatcgccccatacgccgtgcaatacctgacgccgttgttggtcgccgcaccctgtgtatgcgggtcgttcgcgctcaacggactgctgcgataccaagggcaatcggcgttcggcatgatcgggctggtttcgggcgcattgctgaatttcctgcttgcaccattgttcattttcgtggccggtctggggattttcggtgccggcctggccaccgccatctgccagacggtgagcttcacgattctgaccacaatgagccgcaaattcggcgtgatgaaactgtccctgcgcaattgcaggccggatgtgctgctcatgcgcgaagtggccggcggtggcctgccctcgctgatccgccaaggcgccggttcgatttccgtgacctgcgtgaacattgccgccaatccgttcggcgatgcggccatcgccggcatggccattgtgatgcgcattatgctgggcgccaactcggtgatcgtcggcctcggccaaggtttccaaccggtgtgcggctacaactacggtgccggcctgttcgcgcgcgtcaaagaagggtactggttctgcgtgcggctcgccacctgcgtgctcgtggtgttggcggtgttgctgtgggtgttcgcaccgcaactggtcgagatcttccgctccgacccggccgtggtcgcggtgggtgtggccgcgctgcacatccaatgctgcacggtgattctcaacggcttcaacatgatgggcaatatgatgacccagaccatgggccgcaccggcatcgcctccttcctggccctgtgccgacaaggtctgtttttggcaccgatcgtactgattctgccgatgatgttcggcgtgctcggcgtggaaatggcccaatcggtgtccgacgtgctgacattcgtggtcaccatcccgttcatgcggcgaatcctgcacgaattgcggtagatgtcatcaagattttcgacttccagaccaggtggaccgagcatatctcgctgaatctctgtagtttttccttaccgttgcgttcattaggtcgattatgcgttcattaggtcggtgccctgcttagcatgagataatgagcattggaatgaagccattcttgaaggcagtgttcatcacaagtgacctaatgaacgcataatcgacctaataaatgaatggcggatggctaatacggagcctgaatgcagaatatgaaacgtatgaaagccaaccaggcacacaagtggcctgtgccggagcgcatcgaattgctgtaccgcaccatggctgacgcactcggcccgaccggatggtggccggcggagaccacgttcgagattatggtgggcgcggtgctgacgcagaatacggcgtggggcaatgtgaatcgttcgcttgcggcgttgaacgcggagggtgtgctcgaaccccataagctggtggccatggagccggagcgtttgcaggaactgattcgaccgtcaggcttttatgtcaacaaatccaagaccgtacagtcgctgagttggtggtatgtggagcgttgcggggccgcgcccgagggtgccgcggctatttccgatgccgaattacgggccgagttgcttggattatttggtattggcggcgagacggccgacgatctgatgctgtacgtgttctcgcgccgcacattcgtggccgatacctacgcgcggcggctgttcgccttccttggattcgacgtgccggccggctatccggcattccacagggcctattcgcccgtggtgctggatacgaacctcagtgtcaaggatttgcaggaattccatgggctcattgacgagttcggcaaggcctaccgcgacgacgcggccaaaagcgagtcctttttgggtggatggagggcttgactgcacggcgaatcgttctcaataagaaaagtgtgaggcccgcacggtgccaatcgcacatctgaatccttgactggctgcgctcgatgctgggtgtcgaaaacgagtctgtgacagaatagttcgaccgacacaatcgccaaaacgccgaacaggagccaatgatgaccgaagacaagccgatcgccaagccgattatcgatgatgcgacgcgcgagaaaatggcgcttatgttctctggcgaggtctacctgccggatgatgtggacggcttttttgatctgcaggccgcccagcgtgatctccagctcgaactcaacgccacgccgctgaccaacccgaagcgccgtaccgaactcatgcaggcgttcttcggcgcggcgggggagggtctgtacctcgaatgcccggtgtatgcgaactggggctgcaatacttattggggcgagcgctgttacgccaacttcaacctgacgctggtggacgatggtgagatcttcatcggatcccacaccatgatcggccccaacgtcacgcttgtagccaccggccatcccgtgcgtccggacctgcgctatcagggtgcccagtattcgttgccagtccacatcggcgagaacgtctggatcggcgcgaatgtcaccgtgctgcccggggtcaccatcggggacaacgcggtcattggcgccaactcgctggtcaccaaggacatccccgccaacacggtcgcctatggcagcccgtgcaaggtaattcgcgaaatcaacgaacgcgacgacgtctactactggcgcgaccgccaattcagtgagcgttttaagctcaaagagcagtagcgcgaaagctcactcccacacgtcgagcttgcgatttttgtagaaatactcgcggtccttgtcgccgatttcacgcacgacctcgcagggcgcgccgtaggtgacggagttggcggggatggaatgtgtcacgaccggaccggcgccaatcacgcaattgtcgccgatggtcactcccgacagaatcgacacgttcgcgccgacccacacgttgcgcccgctgatcaccggaatgcaatacgtgtaatggtgctcgcgcagcaccggcaacacggggtggccggcggcgcattagcacggggaacggttgaacgagaagtggattggcatgtggtggtatcgaacatactgatgcgtgtgccgccgagcctgtccagatggctgcctatatgaaccagtgacagaaaagcacgggaacgcgagcgagaggagtgtgcatggggcagttcggcgtcatgattggccagttagtcggatttctgatcatgctgatggtcgggtatggatgtgtgaggcttcgattctacggtcagacggcgttggacggcatgtgctcgctgctgctcaacgtgctcatccccgtgcttgtgttctcgaacgccgtcgacggcgcggaccgcgcgcagcttgccgccaactggggcgtgatgctgctgaccgccgtgatgtacgcgctgctcatcctggtgttctggctggtcgccgaactgttgcggctcaaaggttcgcgtagccatgtatttcaggcgtcgcttattttcggcaacgccggattcatcggcattccgttgattatggcactttggccgcagaacggcgcgatttacgtggcgctgatgtcgatcatcgaccagacgctgctctggacgtacggcgtatggctgtgcgagccggtcgacgaagcgactgacggcaacgcgattggcgcgcgaggtgcggtcgtgaacggttcggtgaacggcgccggttcggtgggcaatgctggttcggcgagcaatgccgcaaacggtggttctccggccgtcgtccgcccctcgccaggcacccgcgtcctcggcctgcttaaacgattcgtcaatcccgccttcgtcggcgtgatgctcgccctgattctgattctgctcggcgtcaaggtgccggacatcatcctgaagccgctgcacaccatcggcaatatggccacgccgatgtcgctaatctacttgggcggcctgttcgcgctgaccaagtggtggggcgtcctcaaacgctacgaactctatgctggcctagtcgccaagatgatcgcattcccgctcgccttctacgcgctactgaccgcgctgaccggcgcattgccgcaactgccgatcacccatgacatggtgctgatgatcacggtcatcgccggactgccgaccatgaccaccattgccatgttcaccggtcgcaagaacaacatgcccgagtatgcggtcggcttcgtgcttgtaagcacgctgttctcgctggcctccctgacgattgtgtcggcagttgtgttctgaattgtccccttcgacgaaaagaatgccgggggcctccggcgcttggaatctcatcgacgccgccaacgactcggcatccgaggcggccgtgccgtatttcaaggagatattcgattacgcgcgcacgctcgatccgcagcatcgcccgctgacctacaccaatctactgatggccgccggaggcaaagacaagtgccatcagttcgcggatgtcatctgcctgaaccggtattacggctgatatgtgcaagatgggtatcagctcatcggagccaagaaggccttcatcaacgagatgaaccaatggatgaacaccgaacccaacaagcc

SEQ ID NO: 873 - DNA, 31641 bp, Unknown
  R14_18m  MAG No. k141_15619
gtcttgggtggcgtcaaggtccacgatgccttcgatggcccagtcgtggtcgccatcggaatcatcgataatctgacgcaccttccacgtatgctcgtcgttctcgtgcttgtcatccaacatgaacagttcgggcgagcgcgcttcggcgccgatgcccacgtactcgtgctcgtcgtagtagtcgtcgagcacatcttcccattcgtgcacgccgtagccccagtccttgtcgagcgcgccgagcttgtccggctggtcaaggtccataagccgcacacggcggaacaaggcattgcgcaccagcacggtaagaccacgacggtcctcgaccaccgcgctttttgcgccgggcgcggccagggatgccgcagcctcggattggtcagccgagtcaccggcgttctcccattcgtccaccagcgaggagtcgatggagcgcacgagcacgcgcagccacgagatgatgtcttcgagttgctcgtcacgcttttcgggcggcacggtgcgcgccagcgtgcggtaggcgtccgagaggtagcgcaacagggtgccttcggagcgggcgatgttgtatcgggtgatgtatccggtgaagtcggaggcggtttccaccatgtcgcgcaccacggatttcggcgatagccagtagtcgttggcccacggcacatcgtggcggtactgatcgaacgcggcttcgagcatgtcttccagtggcttcggatacgtaatctcctgcagcttatccatacgctcgtcatagtcgagtccgtcggccttcatatcggccatcgccttgtctcgggcctgacgctcctgggcacgcagcacctgcttggggtcttcgagcgtggcctcggccatggagatcacgtccagcgcataggtgtcggactcggggtcgagcagttcgagcgcggccagcaggaacggggagagcggctggtcgagggcgaagtcgtccggcatatcaagggtcatgtagtagtccttgccgccgtccttgcggccctcggtttcgatgacttcggtatcgaacagggtttggaaaatctcgtcggcccgctggtgcagatgctccttctggtcgggggtctgcgcggaatcgtcgatgagatcgtcgatacgggcacgggcgtcaccgccctgcgccacttcattgagcaccatcgaatgcgtgattttcaggtgcgggaccagggtctccggttcagcgtcgatgagcttatcaaacgtgctctggttccaggtcacaaaaccttccggcgccttcttgcgcttgaccttcttgagtttcttcggatctcccccggccttggcgatggctttctggttttcgatttcatattcgggagcctcggcgatcaccagtccctcggtatcgaatcccatacggccagctcgtccggcaatctggtggaattcgcgggcgcgcaggcggcgcatcttggtgccgtcgaacttggtcagggccgtaagcaccacggagtgaatcggcacattgatgccgacgcccaatgtatcggtgccgcaaatcaccggcagcagaccctgctgggcgagctgttcgaccaggcggcggtagcgaggcagcatgccggcatgatggatgccgacaccggtgcgcagcagtcgctgcagaatcttgccgaaggctgtggtgaacttgacgcctttgatggcttctgcgatggcttggcgctgttccttgctggatacaccggtggaggcgagcgcttgcgcggtctccaatgcggcgtcctgcgaaaagtggaccacgtaaatcggggtttcgccgttgcggaaggcgagttccacggttttttccatcgggtcgagcgtgtattcgtagctcaacggcaccggtcgcggcgcgtcggcgattacatccacgtccggggtgtcgttcagatcggagagcttgtcggcgatggcgtccacattgccgagtgtggcgctcatcagcaggaactgggtctgcggcagcgtgagcagtggcacctgccacgcccagccgcgctccggatcaccgtaataatggaattcgtccatcgccacgaggcccacatcggcatgggtgccttcgcgcaaagcctgattggcgaggatttcggcggtgcagcagatgatcggcgcgtccgcgttgatgtggctgtcgccggtgatcatgccgacattgtcgcggccgaacacttcgaccaagtcgaagaatttctccgacaccagcgccttgatcggagcggtgtaataggagcggcggccagtgcatagggcggcgaagtgcatgccgagcgccaccagcgatttgcccgaaccggtcggggtattcaaaatcacatggtcgccggccaagaggtccataatggcctcttcctgatgcggccacggctcgatgcccttgacgtcttccacccagccgaagaaccgttcgtagatgtcgtcggccgtaagattccgttcgcgtccgtcgccgtcccattcgggggccagccgccccagggatccgtattccttctcgtcagtcataatgctcagtctacctagtggcctattccgacggcacgagccgccctccgtcgctatgcgacgcctcccgccagcgggcggagccatgcgaagagctgtgccatgcgcttggctccgccaatgggaggatcgctcacgccaaccggcggcgcacctcgtcggggtccacctcgggttcgaggggaggccaggtcatgttcatgttcttcaaggtggtgcgcagcagttcggagaccacggctcgcgaataccagcggttatcggccggaacgaggtaccacggtgcggcggccgtgctggttttctcgaacacttcctgccaagcgaacatgtactcatcccatcggtcgcgggcctcgaggtcggagatatcgaatttccagaacttggtgggatcatccagcctcccaagaaagtgttttttctgttcttcctggcttaccacgaggaagatcttgaggatggcgcatccgctggcggccagttcacgttcgaaatcgttgatctggtcgtagcgggcacgccatacgtcttcgggataggtgccatagacgtgcggcatgaccacatcttcataatgggagcggtcgaatacggcaatccaccccggcttgggcaattcacgcttcacacgccagaggaagtcgtggtcgagctcctcggccgtaggcttgccgaagccatggtaatggatgcccatcgggtcgccttggctgaacacgtgacgcacaatgccgcccttgccggaggcatccatgccttgcagcacgatgagcagccgccgtgtcgagcctttgacgccattcgcgtacatgagccgctggtatcgggcgatttcggaggagctgatcgaaatgaacttctcggcgtcctctttattgccgtcgaatccgggagtggaatcgccttcgacatcagtgacctgcatgccgtggtggaacataagacgttgagcgggcggcaacgaccatacggcgctgagcagttcactggatttcgccgcacgcgccagtcgttcaggcacgctggcactggagtcgatggtgtctatgcgatccaccgcgagctgtaataccttgtcgatccgtcgatcggttttggattcctttcccttgccgttcttgttgttctttcctgaggattttccggccgtaccccacttgccggcctcttcaggctcgttggttctgtcgtcgtccttggtcatgctcccgattgtacgtcttgtaactcaggagacctagcaacgtagcgacattcacatttcgcctgttactgcaaatctataggcatgcagtcgttcggaccgtaattgttggctttgcaccaattccaagcctcatccgtcgagtcgaagccctcaccggcaagaatcacatagtatttgtcggaattgctgctgtaggcgggccagtcacccgaccagataagcagtacgtttgaattcttgttgtgcatcgtgatgaattgcgcaagaatatcgcggtagttccaggtcttgccttcagcctccatacccttacgcttgctggacagctgtgcggtatacgtggaatagaacagctctgcggagtccttgtcgtgctcgacctgccaatccaatgccttgcttgcattattttcggcttcgtcatccgtaacgttgctgccgcttatcgcgcctggatcagacgatccccagcaatatcttctttccggcagacccaccggaacgcggctgcgcagcgccaccgttgcctggcgccgtcgacaatgtcgaagtaggtgcggtcgccgtgttgaaacttgggggcaacggcatcgaactcgctggcacctgctggggagcagccggtaccagcgttgggccatccatcgactgaggacttgggcttggcgcagactgtgccatcggcgcaccgcattccgtgcagaatcggcttccctccggcatctccgttccgcaaacctggcacttcatactctctccgttctctctcgtccctatcggccaatcccccgcccgttttgcagtacataaagaagcggcaaacggcccgaaacatacctgagctatcaggaagacggcacgatctgctacgagaaagagatcatcaccgaccggcaaatcgtcggcatcatgctgaagcatccgaccagcgcacgcggcttcaagcgctacttgcgcgccgcatcatgacgcttgaccacgatggtgacgccacccgcagcgaacagcgtcgccagaaccacaaccaacgcaaccgaggcaccggtatcggccgtacgttcggtctgctgtggcttggtgctgccattggcattgacgctaccgctatggttgccgttatccttgtcgtccgtcccggtggacactccggtaacggcaacgggcagagcgaccgtggtcttattggtcgcaccggtcactgtcaggctgatatcaccggtcttggttccggcgggaatcgtgaccttgagctcggcggtatcgccattcgcaacctgcgcttcgccgaccacctgctcgccgatggtggcggtcagcttcgtctcgtcaggcacgcccagcgaggtgagcgtaagcttcgagaagtgcagggtgaacgaatcgccagccttgactgcaccggtcgggataccggtgacggccactgcacggcggtcgtagcgcggggcaaccggatcgttgtccttgagatagtcaatccaggcgtcgcggtccaccagaccggtgtccttggtgttcgtgccttgggcgaaggcgcggaagttatcgccgccctccaacaggaagctgaacgaaccgatacggtagttgcgtttcaggtccagaggctcaccgttgacggtcaccgaggtgatgtgatggccttgcgcggcatccggatcatacgtgtagctcacgttgtgggacagtccgagttgcagatacgcgcgcgatggcgtgctgccgtccgcgttcgtctgccactgctgttccagcgcttccttgaactgcgcgccggtaagcgtggtggtccacaggttgttcaggaacggcagtacagcgttggcctgggcgtaggtgatattgccgtcggcatcgagcgtgcaggcgtcattggtgccggacttgcagaattcggcacgcagaccgccggggttgaccacaccgatttcggccgcgccgcggtcctcgcctttgagcgaatcgagcagcgcatcagccaccagattgcccatggtcgattcggaggcgcggtcgtcacgcttgccgtccttgaatgcggtggtgatatccgcagacaccttgccgaccttctcgccgcccttttcatcggccaccttaagagcctggtacacgatgtccctcaccttggcgacagtcgggttcgcggcggcgagcaggccatcgttgtattcggcgtaatcgttgtagtgcggatcatttttgtcggcgggctgcgaagccacctgcacggccgtgttaccggacttgtcgtaagacaccgcaccggtggccgtgttgtaggtgagcaccacttggccgatgttggcggcatagctaccggtctggatgatcggccggttgttgtgcgcgggatcggtgtacgagtacttcatgtgggtgtgtgcagtgaagatcacgttcactgccgcatcggtatcgtccacaatcttctggaatacggggctggcggccttctgctcgtcaagcgtgggcttggccgtggcgtcatcttcattggaggctgcaccctcatggtattcggccacaatcacgtcagcctcgccattggattcgtcgccgtcggtgagttgcttggtcacacggttcacggcttccaccggatcgccgaattcgatgtccttgacaccaccgggagcaaccaacgtgccggtttcctgagtgaccgcaccgatgatgccgaccttcacgccgttcacctcctgaatgctgtactcgggcagagccggggttgtggtgcccttcttgtacacgttggcaccgaggtaatcccattgggcgttgcgcgcgccctccttgccgatcacacgatcggtaaggtcggcatagccttgatcgaactcgtggttgcccaccgccgaagccttgacgcccaaagcattgagtacatcgatggtcggctggtcctgctgtaccgaagagttgaacagcgaagcaccgatattatcgccggcggacagcagcagtgatgagtcagggtattcgcccttgagctgctcgatggtggcggcgaacggcacggtgaggttcttgtcgatacggccgtggaaatcgttgaagttcagcagattgatggtggtgctggcgggaaccggctgattggttgccatatagcccatacgcaatgaatggccattggtcacgccgtcgtctgcccagaacaccggcttgtacaccttgccatttactaccttggtggcttcggtatcaggggtgacggcaaagccttcggtgttctgcgtacggatttcatccggagtgtcggtcagcttggtcagctgcagcacaccgttcttgaactcgtaggtaccgattttggcaccggtgttcgcatcattgtcgctttgggcgagcagctggttgtgctcggcgtcccaagtcagatcgcgcgggccatcatagccggtgttcaccgcggactgcggcaggtcgatgtcggccaccggatgcaccaggtcctcatcattcacggtttgcagtgcgaaggcgtagatatgaccggttttctccagtgcggcgaagaacagaccgccgaaatcattgccgaaaccgtccgggtcgtaggtcattacgttcttcgggtcaaggttggattggaatccgttggcggtcaggaccgagtcgggaataaaggctatgccttccaccccaagattggcgtccgctccgtggcccagcgtcacgccgaattgtgtgagtgctgcggtgagattccactcgtgcgtagcggtcagctcttgcgctccgtcgccgttggcgtcggtggttttcgcggtcacgtcatactgcaggatggaaggccgcggcacattcttgttttcgttgtcgcgctcggcgccgatgaatatgcccttggatgaatctccgttgatcagcgtgatgccttcggagtccacaccgcccttgccgtccttgaagtgcagctgcttgccgcccttggtctgaccgttgttggtgaaggtccagccatcagtgggatcctgctgccatgtgccgttctggtagacgaacttgttgatggagccagggcccttatcagcggtgttgccgagcgtggggttcagatcgttgtcggccgcccacagcacgccttgcttgccgtctttaccggcttcatacaccagaccagacagattgccgtcagtgtggtcgccgccttgtcctttggcgccaaattcgccttcggcatccactgtggtcacatcggccaatcccgaccatgcgtccacggtcatggtctcgccggcgggcggagtcggagtcgggtcatcgaacacgttctgtgcaccgggcgtgggcgtatcggaaagcgcgaaagtgccatcgtccttacgggaccatgactgactgtcgctcatcttcttcacgccagttgtatcggtattccatgacgtggaatccaccacatcgctatcggtaaagtcgccgctggtagtggtcagataggcttcgtcggcatcggaacccaggccgggctcggccttgtcggggtcgatgtatgccaccagatatccgccggctttgatgacggtgtccgtattcgttacttcgctggtgccgatggtgtagtgcttcttggctttcttgccgctgtcgtagatgccccagcccttcacgtcaacgtctgtggagccggtgttcttgaactcgacccaatcgcaacgcttgctatccgggtctccggcagctttcgtattgccggcatagacctcgttgatgattacggatggtttggcagccgtgttctgttcggcagtggcctgctgctcgtccgcagccgcagcgggcacgccgatcagggcgacgctgctcagtgtcaccgcagcggtgagcagcgcgatggcgcgccgcgacatcgcggtgaaattgttggtgtggaacattactcccgttccttcctcgggttgtgccgccgcagcatgatgctcttcggcggatgacaccccgagagtatgagagagaaatgaagccgacaccgtatgaaggcaaactcggcagatctccaaactgaactttggctgaattaccgctgaagctggttcttggatttgcgtcgaaccgtccgtattccgccgacaatcgcgattacagcggtaccgatggctacgctgatcaacgccggtcgttgcgcggcatggagggtggcgagatccggcccggccgcaatggcgctgttttcacccgccgagccatcagacgccggatgattacccgcgtcggcgtactgggcattgaccacactcgggccggtaagcgccacctggtcggcggtctcgaccttggccacatcgccgtgcttatccaaggtgacgcgggcgcacagggctttggcccagttgatacgctgccagccgtcgctcgattgccatagggggtatccggaatccaaggcagtggctttcaaaatcgcgttgcgctgatcggcgtgcagttcgggataggccagtcgcagcacgtccgccgccccgcgcggtgccacgaaatcagcgccggactgggcggtgtcttgcgggaaggtgtaggtcaggcgtgcggtgtagacgcgcacggccgaggcctggtccgcgaccggctcggtggccaccgggtccagaaaatcgttggtgtagccgcccgaaccggaggccttggtgttggcgatgcaggcggcgagggtagtgccgtggccgtccgcggcgcagcgggacaccagatagtcccgcagctgccgggacgcgggcacgatggacgaagcgaattcgttatgccagtactgcccgttctgggcggatgcgccaatgcgaccgcccatgatgtcaagcggataatgcacgccgagcacgatgcggttgttgccggcctccgaagtgcgggccatgatttgcggcgcgagttcgggaatcatgccggccagcgcgataccccacgaataggcgccggtagtgtggccggaggggtaggaactgtttttctgcaagttcgagtagccgggcacgtgttcgagccatgagggtgattgcttgatgtcaagcgtggcgggcagtccggcgagatcgttagtgccgccgtagctgctttccgcacggttcagataggggcgcggatgcatggccgcacgttttgaggcgtaggtggaggccacgttaaaggagaagatatcggcgacggcgttgagtttcccggatttgagcccttcgctcatatatttgccaagcaccggaccgagcgcgtccggcatggcttcctcggcttgcagatcggagtcgacgagcgcacgcttgcgttgggcgttcaggccatccttatcgagattttcggcggctttgtggttaatggccacggccaaatcttcgtcgagtttcattgtatcggcgtcgagcaccttgccaccgtgttcggcatcggtgggggcctgccaatagttcttttcgtagtcggagagcaatgccacccaatccgggttgggcagctggtcggcctgtgcgattgcaggcgtcacggctagcgtggccgccaacgccagcggcgcaatggtcgcaatagcaaaaacggaggataggtgccggaacatcttcatatgttccaacctatcctccgtgaaggctacgtagccggagcccagtcaaacactcagtaaattcttcgtgccggcttagcggcgattgagctgactgtcaggcctctgactcgtcttcggacttgcggaacgccgggaattcgccggtttccgggtcaacctgtgactcgggctgggtggcgtcatatccctgttcgtagcgggtgcgccgccagttgcgaatcgaggcgttggtgccacggtgatgcacatggtatttgcgcggcgcaccaccaaacggcagctcttcgacttccttggccacagcgatctggttgacattggacgggtctccggcggcgatcggcgccacgggctcggcctcggtgggcgcggccgtgcgctgctgcatgcgcgaaggcagccattcggcgagcctcgacaacagccagcaggcgacgaagtagatcaccgcagccatgaccagcgtctgcaggatgttgaagtacatcgagccgagtcggcgcgattcctgcagcaggtcggtatacatgatgatcgagcctagggcggtgtccttcaacaccacgaccagctgggtgacggcggccggcagcatggcgtagacggcctgcggcacctcgatctccatcagcgactgcgtttcggtcaggcccaaagcgagcgaggcctcacgctggccgcccggcagattgccgacgccggagcgcaccagttcggcgaccaccgaaccgttgtacagcaccaaggccagcaccacggcccaataggacgggctgggcaggcccgcgaacgcgaaccatcgccagaagaagatcatgagcagcagcacgggaaccgcacggcagaactcgacgatcacggcggagacgccacgtaccaacgggttcggcagcagtcggcccacgccgaacaccaagccgaacaccacggcacccaccacggccacgatggtggccttgatggtcatccacagtccgggcaggtagaagtcggtccacgcctctcgttcgacggcgggcttccacagctcccagctgagctggttctcgccgtccggcgggttgtgcaggcgcatgaggataaacacgagcaccaccgcgaacagaatgcccgcgatccagttgacgatgcgaatggtgcgccggcccttgggacctggcgcgtcgaacagcacggaattcgaagtatcggccatatccgtcacctccttacggcgagtttgttggacaggtacgtggtgagcatgccgatggggatgatcaggatcacgtagccgagcgcgaagatcaggaagatttggatgatcacgtcgggacggaattcgatcatctcgctcatcagcgaggatgtttcggtggccacggatgcggcggcggccacggtggagttcttgagcagggcgatcagcgtgttgccgagcggtgccacggagcctcggaaggcctgcggcagaatgatctcggtggcggactgcatgaagcccaagcccagcgctcgtgcggcctcggcctggccaatcggcacggtgttgatgcccgaacgcagagattcgcacacgaacgccgccgtgtacaggctcaggccggtgaccgcgagccagaagaagttcgtggtgaaggtgtcggagaagctgagcttcagctgcgcgtaggcacccagcaccatgaacaccatgatgatggtcagcggcaggttcttgaacagttccacatacgcaccggccacggccctgagcgaggaaatcggcgagatgcgcatcaccacaaggatcacgccgaggatcagggagaacagggcggaccatagggtcagttcgatattgaccagaaacgcgccgagcacgtcatactggctgaagagttccaggaatccgctcatcaggcctcctctccttcgtccggggtgggcgggttgtagcgtacgtcgggcgtgtagttggtgcccttggtgttatcgctgatggcgttctcccacgagccgtcctgaatcatgtccacgatggcgttgttgattttggtggccagctgcgtgtcgcccttcttgatgcccacgccgtagtgttcctgcgtgaacggtttgccgaccaccttgagcttgccgcgcgaggcggaggccaggccggccaggatgatgtcgtcggtggttaccgcgtccacgatgccggagaacagggcagtggcgcattcggcgtaaccgggctgttccataagctggacttcggaggcgaacttctccttgacggtggcggcggaggtcgaaccggtgacggagcataggcgcttgccgttcaggtcttcggggccgttgatggagttgtcgtccttgcgcacgagcagatcctgtccggccacgaagtacgggccggcgaaggagacggccttcttgcgctcgtcggtgatggagtaggtggcgaggatcatgtccacgtcgccgttctgaatcatggcctcacgctgcttggagggagcttccttccagatgatctggtcttcggaatagccgagtttcttggcgatgtacttggccacgtccacgtcgaagcccacgtaggtgccggacttcttgaagcccaggccgggctggtcgaatttgatgccgatgcggatcttgccggtttcgtccgcgccgcaggcggccagcgacattgtgcaggccacggcggcgagcgcggcgatcacgcggcaaaccttccgtttgaacgtattggtgaatgtcattggattgcgtacccgtctttcagtgggttcgtcagtgggtgaggatcttcgagaggaagtccttggcacggtcggtctgcggatgctcgaagaactcgtcgggcgtgttctcttcgagaatctggccgtccgccatgaagacgatgcggtcggcggccttgcgcgcgaagcccatctcgtgggtcacgcagatcatcgtcatgccttcatgcgcgagttcgaccatcacgtcgagcacttcgttgaccatttccgggtcgagtgcggaggtgggctcgtcgaacagcatgaccttggggcgcatggcgagcgcgcgggcgatggccacacgctgctgctggccgccggagagctgggagggcatcttgctggcttgggagtcgacgcccacgcgggcgagcaggtccatggccagttgctcggcttccttcttgtccatgtgacgcactttgatgagggccaacgtcacgttttcaagaatggttttgttggcgaacaggttgaacgactggaacaccatgccaacttcggccctgaggttcgcgagctccttgccttcctgtggcaggggcttgccgtcgatgcggatgtcgccggaatcgatggtctcgaggcgattgatggtgcggcacatcgtggacttgcctgagccggacgggcccacgaccaccagcacctcacccttggtgacggtcaggttgatgtccttcaggacgtgcaaagcaccgaagtgcttttcgacgtgggtcagttcgactagcggacggttcaggtcctctttgccgggaaccagcggggtcaatttggccttgcttggtgatgttgtgcttgtcgtgcgcgaacgcactgctgtttcattgttcgtttcagacatgagtgggaggataacacaccgacgtttccaacgtgttcacagtatgtccacacagttgctcagtcgatgtctcatttccgcatcagacatcgtgatggcggcattgggcatcggcatacattctcgctgagtcgcgcatcgctcggcgtctgctgtgcgctgattgcctgctgcgtggcggctgagacgttgctgcgatggcaaagcgggcacgtgttgtcctatctgctgattccatgtttggccttggtgtcgttggcgttgctgccgtgtatgccgcagtcgggcgcatggctggcggtcactttgtattgtgtggggctggtctcgccgtttcccatgtcgtattcgtataaatgtgctaggcattttgagcgtggctagctgttcgcacacgatgagtgctgttatacggtggacgacactcccgaagcgcggtggataaccgggcgcggcacacgatatgccggtggataaccggttcgcgccgcttaagttatccccatttttcggttttgcccctgtgccaccgtggaatgcgctacgctcggcgcatgaacggatacagcgaagcgccgcacaatggcgaaatcaacaactatctgcgcaaagatcttgacgccaaagccacggccaagaacacggcctgttggaatctgctgggcaaagtgcgcacgaaacgcacgttgtgtttctcgctgtataccgcattggaattatgcggcgtggagttgccgaggcacagcacgttgccgcagaaggatttttatgtgacggtgaggagcaaggggacccgctcttcattggacaatgtcgactatcgcatatggaatgcaaagttcagcagtatcgctttttcaaacggcgtaacctgcatgcatcccatggatgcgtggatacagtttgcccaatatctcaacctcactgaattagtggtgctggctgaagcgctcatcagacgttatggatatgccattgaacaattcactcaacgactaacggcctttcaccgcgttattggtcgtgcgcgttgtgaggcagcgctgaagctcgtaaaaccatcggattccgttcaggaaactcgtacacgcttggcgcttatgcttttcggcctgcccctaccgcaaacacaatatggcattaccgattcagagaacggatacacctacaccgttgacatggcttatccacaatacaaagtcgctattgaatatgatggcgatcatcaccgtcgcttccgcaaacaatatgtgcgggaccagcaaaaacgtcgacgtctgcggcaattgggctggaccgtcatcgaggtgttcgccgatgacctgtggaacaccgccaaacaacgtgccttcgcacaagaggttgccaccgcgatgcaaataccgcttcctggccgtcctcaaccttcatgccgggtattaatagacggcagccttaccatcaatgcgcgcaaaggggaatacaggaggcggaaacaagcaaaacacaacaaagcctcacaacattgatcaaatacggagttgcgatcgctcctcatggggcgacaattcccccatgaggcggcaatttgcccatggggcggtttgaagaaattgtgaaaccgcggaattaagccattttgacctaccgccccatggggttttcaccgccccatgggttgtttaccgccccatgaggaagttaccgccccatggaaggataatcggcaaacgccaagggggacaccgcatggtgcgaggtttgccgcatggcggaggtgccatcgggcggagtatttggcaccccttggcaggtatttggcacattgggccccacccgcaaaaagcaaatggcccttggaattattccaagggccatttgcggctaatagcaccggagcattactcctcgaaaattaatctacgcatgcggagaccgccgttcgaagccgaaggcgcactaaggtgcgtcgagtgctgaggaaaggcggtatacgctccgtagattagttttcgtcggcgtccgggtcgtagtcgacgccggtctcggcgcgctgctcgtcggagatcggggccggagcaccggtcagcgggtcgcggccgccgccggccttcgggaaggcgatgacgtcgcggatggagtcggcaccggccaggatggacacggtgcggtcccaaccgagggccaaacccgcgtgaggcggagcgccgtacttgaatgcctcaagcaggaagccgaacttctcgtcggcctcttccttggtgatgcccagcacatcgagcacacgggcttggatgtcgtcgcggtggatacgtacggaaccgccgcccatctcctcaccgttgcagacaatgtcgtaggaatcggacatggcgtgctcgggatccttgtcgaacttgtcgatccaatccttggagggcatggtgaacgggtggtgcatggaggtccacttggagtggccgacagccacatcgtcatcatccggatcgtcggtgggcttgaacagcgggaagtccacgacccaagtgaaagcgaacttcttcggatccagcaggccttcgcgggaggcgagctccacacgcacggcacccagcagcagctgggcggactcgcgagaaccggcggcgaagaagacggcgtcgccttcctcggcaccgacggcctcgcgcaggccgttgcgctcctcatcggacagattcttggcgacggggcccttgagttcgccgttttcgccgaagaccacgtaggcaaggcccttggctccacgctgacgagcccaatcctgccaagcgtcgaactgacgacgcggcgtggcggcaccgcccttgaagaccacggcacccacgtacggggcctggaacacgcggaacggcgtgttcttgaagtactcggtcagttccaccagcgggttgccgaagcgcaggtccggcttgtcggagccgtacttgtccatcgcatccttccaggtgatgcgcggtagcggcagctggacctcatagccggcggacttccagatggcggcgatgaccttctcagtcatggccatcacatcttcctggtccacgtaggccatctccatatcgagctgagtgaactcgggctgacggtcggcgcggaagtcctcgtcacggtagcagcgggcgagctggtagtaacgctcgacaccggagaccatgagcagctgcttgaggagctgcggggactgcggcagggcgtaccaggaaccgggcaccagacgggccggcaccacgaagtcgcgggcgccttccggggtggacttgatgaaggtcggggtctcgacctcggtgaagtccatgtcttccagcgcgtggcgggcggccttagccatgtcggaacgcagcttcagattgtgctgcatggacggacggcgtaggtcgaggtaacggtacttcagacgcacgtcctcgcccggcagcttgttctcggactcattctcgagagcggtggaaacctggaacggcagggcgtcggacttggcgaggatctcaatggtctcggccacaacctcgatcttgccggtggccagatgggtgttctcgttgccatccgggcgcaggcgcacttcgccggtaatctgaatcacgaattcactgcgcagcgggcgggccatatcctcgtcgtaaatgacgacctgcacgaggccggtcgaatcacgaaggtcgatgaaggccacgccaccgtgatcacggcgtcggtcaacccaaccggcgagggtgaccttctggccgaccagggcctcggtcacttcagtggcatgatgtgttctgtaagccgtctggctcattgtcttgtttctcctcgatttttcgcgcgaatacgtcagatttcgacggtttgctgggcaaccacagtatccggctcccacgacgtgcaatcggcggcaacctgctcgcccgtgacgatgttcttgacctcgtcgccagcgggctctgcaccttccgcaccttcggcagcggtggccgggaaccacacgtacggaatgccgagtttgtccgcgtacttgatctgcttgccgagcttggccgcggtgggtgccacgtcggtggcgatgccgcgcgcacgcagttggttcgcaatacgattggcggccgggcggtcctcttcattccacacagcgaccagcacggcggccgggctgacgcggttggcgtgcgcgccggcagcgtgcagcatgtagctgaccagtcggctcaggccgatggacaggcccacgcccgggtacttgcggttgccctgggaggcgagattgtcgtaacggccaccggaacagatggaaccgagtgatgcggcaccgtcgaggaaggtctcgtagacggaaccggtgtagtagtcgagaccgcgggcgatcttcaggtcggcgatgacggaaccggggcggatggcggcggcctcgtcgacgatcatggccagggtatcgagtccctgacgagccagcgtgtatgcctcggaatccttggcgatgccgtgagactcgcacagcgcatcgaacttggcggcaagctcagcaccgtcggaggcggtgagctcggccaattcgaggcaggcgcgtgcctgtgcttcggtggcgccgcaggtctcggtgagcagtcgggccacctcatcggcaccgattttgtcgagcttgtcgatctcgcgcagcacgccctcgacatccgtcagaccaaggccgcggtagaagccttcagacagcttgcggttattggcgtgcacggtggccttggggaggccatacgcgcgcagctcttccagcgcggagaccatgaccagcggcagttccacttcatagtggtcgggcaggtcgccggcgccgatcacgtcgatgtcggcctgcacgaactcgcggaagcggccttcctgcggacgctcgccacgccacaccttctgaatctgccagcgcttgaacgggaacgccaacacacccgagtgctcgaccacataccggctcagcggcacggtcagatcgaaatgcaggcccaaccgctcttcaatcggagtgtcggattcatgaccgacctcctgcaaacggctcagcaggtagatctccttgctggtctcgccttttttcaacaaagaagcgccggtttccaccgctcgcgtctcaatgccgatgaagccgttgagctcaaaaaccttacgaagcgtatcgataacacgctgctccacaacacgttcggaggggagccactccgggaatcctgatattgatgcacctttagccacgaaatcaatataataggtgagggttgcgtcaaaacttcctggttcgcccgggatgggagacgctcccgcttatgcattctacgctttaaggagctggccatggccgacgaaactgtcaccgaacccgtaaacaccgctgcgcccgaagagcaggcaacgacacccgcacccgaagccagcgcggccacgccggcgccgactccgtcccccgcttccatgccgaaaccgcacgcgccctcccccgccgccttcgccaagaagactccgtcggccaagccgcgcgctgccgccccggccgccgccaccgccacctattccgaggctgatgtcaaggccgccgaggccttcggccgcgtggatgacaacggcaccgtcttcgtcaaggatggcgacgccgagcgcgaggtaggccagttcccggatgtctccaaggaagaggcgttggcactgtacgcccgtcgtttcctggatctcaaggccaagctcgatctgctggccacccgtctggcttccccgaacatcaaggcccgtgaaatcgacgagtccgtgaagctgctgggcgaagaaaccgccgaaccggcggtggtgggcgacctcgcggccctcaaggcccgttacgtggaactgaaggccgccggcgaggccaagaaggccgagatcgccgaagcgcgcaaggccgctcaggccaaggccgtcgccgagcgcaccaccattgtcgagaaggctgaagcactggccgcttctctgggcgacaacaccaactggcgctccaccgccgacaagttccgcaacctgttcgacgagtggcagaaccaccagcgcaccaccgtgcgcatcgacaagccggaggccgaggcgctgtggaagcgcttctccgccgcccgcaccaccttcaaccaggctcgccgcaagtgggctcaggctcgcgacaacgagcgtacagccgccaaggaagccaaggaagcgattatcgccgaggccaatgagctcaaggattccaccgcttggggtgagacttcccgcaagttcaacgatctgatggaccgttggaagaaggccggccgcgctggccgtaacgaggacgacgagctgtgggccaagttccgcgaagccgccgacaccttcttcaacgctcgtcaggctgatcgcgatcagatcaactcctccgagaaggagaatctggctgccaaggaggctctgctggtcaaggccgaggctctggtgccggtgaagaccgacgccgaggccaagaaggcccgccaggagctggccaagattcaggaagagtgggatcagatcggttacgtgccgcgtgacgatatgcgccgcatcgagaaccgtctcgacgccgttgacaagcagatcaaggccatcgaggatgccgcttggaagcagaccgacccggaggccgacgcccgcaagtccagcttcgaggagcagctcaacgcccagctcgccgagctcgacgccaagatcgcggccgaatccgacccgaagaagaaggccaagctcgaagccgagaaggccaccaaggagcagtggctgaacgccatcaagtaagggtctcgtgccaggttcccctctgagggaagccggcagcaaggctgactgaggggagtttacggttataccgcaagctcccctcagtcgcctacggcgacagctcccctcagcgaggggagctgtcgtcatatttatgccgttttcttctgccctatactcataactccaccccatagttcctcagtcacccagcaattggtgtcttacgcctgagtccctaccggtgctgcaacaattgccgtgagagcccttgatgtgcagccagatattcatgcaacggctggctgtatggcatattcagctcgccgtaattggttccggcacggaaggcggggtaactgtcgccgccctgaagcagatatgaattggatgcgataatcaccaggtcatcgtccgcaatcggtcgaccgtcaacggcgaggttcacgatacgaaccgccgcatgttcgtcggcagcacactcgtcagcgtcagcgttggtatcagcggcggcatcggcattgccgctcccaccggtcgtaccgcattcggcataccgatacgtcacgttcgaggagatgccgagccagcgccgctccagtcgcccatcgtcacggtggaattgctcggcgagcactctcttcacatcgcgcccggtgagcgtctcatgcgcggccttgaactgcaaggccatgagactatccacctcgcgcacggtgactttgccatcgccattcatatcaagccgtggagtccgcagactgccattattcgaaaatccgattaccggcaaacgatttccggcatacacatgcttcatgattgactcgcggttcgcgtccgccaccagcacaccgaccgtattcccgtgcttatccgaaccttgtttgtcgaaattcacgccggaggccaaggtgccaatcaccgcgttgccggcatgattcgaatatgttgccgccgcctggtaaatatgctgagcgcgcgatacctcatcgttcgcctcagcaccggcagacatccaagcggcttgcgccggatgcgcattaagcccttccacgcccagcacgccgtcaaccgccgtatggctggtgccattgccgaggtccacatcggccactcgcaccgtggcgcgacgcccggcaccggtgatgatcaaatcctgcacggccatattccgcccgaagctgcccgcctcgtaaataggcgcgccaccagcggtcgtaccacgcttgatcgcgtgattgtggccggtgtataccacatcaacatctcgcccaatatcggcggcggctgaggcatcggcgtgcagcaaggccaccaccgcatccacctttccggagcgtttgagttcacaggccacgcgattgatcgcgtccaccgcccgttcgtcaagatcggcatcacgcgtaatctgcggagtggctaccgagccgagcgcatcagtaagggcgcccacgaaaccgatccgcttgccgttcaccgttcgaatcgtagagtcacgtacatggctcagcagtccgtcaggcgacttactggcggcagacgtgttggcgcacagccagtcgatgccattgctgggatcagcgatgcgattgttgaaatcggcgacaccgcggtcgaactcatggttgcctaccgccgaaatcgtcaatccccacgctttggccatgtccagcgtgggttggtccttctccaccgccgactcatacggggaacctcccaccaaatcgccggtcgataccgggatcatattgccgggattatggctgtcggccacggtgaaggcggtggcgttgtccgcaccacgttcgatatgcccgtgaaaatcagtgatgtcggcgatggtcaccgtacgggtgccggaagatggattatcgccggaaaaaggaacggctcccgtggttcccgcacaagcataaggaaccaccagagccgtaaggataagcgctactgcaccaaaagcgatccccgatcgcttgccggcccaccgccggttcttcatattcctgctcacaccagtcacgttaggatcgtcgattgaacggccatgcctaggaaggcgactctcaggtgaattcttagcggcgtcttgggatgggaaaggcctgaccccgtactatcagggtcaggcctttgcaacccgtgtcactacgaatgcgtcggcaaggggagattactcggcaaattcctcgacgcagatctcagctaccgcatccacgcacgcctcggcaatcaggcggccgcgttcggcgcttgagccggccggattggcgagtccgccgtgagcgggaacgtcaccttgacgcaccgggtagcgtacataggatttcgccgtggcaccggcttcctcgaccatacggtccatgtgcaccagttccggcgcgtagtggagcatcaacgaagtttcggtgacggccgcatgctccaatgcccagccggggaacaccaatccatcgaacaccttgtcgataaccgactgcggaaccgggtcccaccaattggtttccacgatggtggccactcccccggtttcgcgggtgaccaggtcgatggcctcgacgatgaacgcctcgttttcaaaatgcgcgttcatgacgacgatcttggtgaagccatcggcgatgagttcgctcagcacgtcgtgcatttgggtgatcactgtcacgccgttcatgtcgatagtacccgggaacagcggcccgccaccggagagcggcttggacttgtatccgtagctcagggtgggcagcacggtgccgtcgatgcgttccgccagatcttcggcgacccgcgtggcgagtaccgcgtcggtaccgatgggcagatgctggccgtgctgttcggtcgaaccgatcggcacgatgacgggatgagtcttcacctccttgaattccggccaggtcatgtggtccatacggcggttgctacccattgcagtactcctttgggttggtggtggattggatggtcaatgaatacgcccggctccctcgggaaaggagccggagctgaggagatcagatgtgattcagatccttgtcggtgttttcatgggaaagaatcatcgcgaccaaggcgatggccgcaacacccaccatgtaccaggccggggcgatggatgaaccggttagggcaatcaggccagtggcgatgaacgaggccgtaccaccgaagatggcattggccagattgaagctgaacgcgaatccggtgaagcgcacggaggtggggaacgtctcggtcaggtagctggacagggtaccgtcgttggcggtcagggtggcgcacattgccagctcaaccagcagcacgggccagaactgggaggtgttgaggatgaggaaggcaggaacggtgaggacgatgaacgccacgcaagcaccgatgagcaccttcttgcggccgaatttgtcggagatgtggcccatgccgaacaccatgaacacgtaggcgaccaagcagatggtggtgatggtgccggactgggtggcgtccatgccgacggtgtcagacagataggtcggcaggtaggtgagcacggtgtagaagccgaccgcattcagcacgcaggctccgaagctgatgatcagggccttgagatggttgtggaagagttcggcgagcggggcgaacatgccgctcttggaaacgacttggccgtcagcggaggcggcgctcttggactcaagagcatcgttcattgactggtacacgggggaatcggagagcttggtacggatgtacagcacaatcaggccgagcgggccggccagcaggaacggcacacgccatccccaaccgaccatcgcgctggagttcatgttggcggtcatcagcgtggccagcgtggagccagcgagcagaccgatggcggtggacgccggaatcagcgagcagtagatgccacgctttgaggtgggtgcatattcgccgaggaatgtggccgcaccggcatattcaccggaagcggagaagccttgcaccatgcgcagcagcagaagcagaatcggcgcgccaacgccgatcaccgagtaagacggcaggcagccaatcaggaagctcgcaccggacatgaacataatcgagtgggccaatgcggctttacggcctttcttatctccgtagctaccccagaacagtgcgccgattggacgcaggatgaaggatagcgcgaacacgccgaaggtctgcagcatggcgacggtgtgattgtcggttgggaagaacaccagggcgatggtggtggcgaagtacgaataggaggcgtagtcgaaccactcgatgaagttgccaaggaaggaagataccgcgactttcctgaccatggcctgttcttcagtttgaggggtgaaattcatcagtcgtgcagatgtagtaatcgttgcggaactcatgatgtcaccgtcctttcaaggatgtgctgttcgtgtgactgaatgggattcaagtgggaattcgtttcgcagcaggtcgaccagcgccgcgatagcctcgactatgcccttgagtatttgctgaaacgtgaatcgtcgattaacccgttcggcgtagaagtggacaggttgcccagtggtgctggcgcattattcaccatgctgttcttgccatgatttcgtgagtttggcggcgaatagcagcatcgaccagttcggtttgtcgttatagtcgacgccgaccatttgtgtcactttgtccagtcggttgtacagggtttgccgtctgatacccaattgctcgcacgcgccggttttgctatcgaggttgtcgaagcagacgcacagtgtgtccagcaacaacggagaggcggcgacctcgaatccgatggtctgcaccacgagcatgcgcatcgccttgtccatatcagaggatgcgacgaaacggtcgacgagtgcggacatggtacttacgattcgcccgtatgccggttcctgattggcgatgtcacgcaataccgcgaacccgtcgaccagcgtcaccgtgtccaatgccactcggccatgcaccacgtacacaccgtcgccttccagtacggcaagcgcatccatgcaatggcgtccgaatgcggccgcaccgtctgaggaatcggtggtggagcaccatccgaccatcaagtcaccttccagcatgcaggagacggcgcatcccgaccgttcttcgaaccgttcgaccatcgtcgatacatggttgatgccttccaccaccgatctgaaccgaaaagcgaatggcatatagatgcatgatccggcaaaacccagcgcgtcgagcatcgcatgcgcttcctgcgcctcaaatgtattgacgtgcacgccgtcggccgggcccatactcagatgatgcatcatgcccatgcgcgcgccgccgtcaatatagagggcggccaccggagacacgatggtggcgatggcccgacgcatcgtggcgtcgaaagtcatggtgcgttgcgtgatctccaatgctcccaccggccgggagcgactttcaagggcgatgacggcgctcgattcgttgccggcatcgaacgcacgacccgctcgagcggccaacagaccgtcaccatcgaaaatggcgacgctttcgccgaacagcgacgcaatggtttcggccacagcctcgatattgccggtacgggacaatccctcacgtaatgaagtggacattgtgtccacctccaattgcaagtgcatctgttcgtgcacgatagcggtattgacactctgacagatgtcgacaaaaggtacgcgagatttcagaccaatcaacgtcaacccatgcagcctggccgcagacaccagttcgtccggcatccgcaccacaccctccaccagttcgaccaccagagcggcgacaccagcctgcgccaggcttgctacatattgtcctaacgtgccgtgccaatcggcggcgagcagagcgttaccctcgataatcagcatctcaccgcccgaaaggaaactggagacatcctctcgctcgttggtaaacacccatcgcactggcgtatcgaggtctttgccttcgacctccaccacaggatcggctcgtttgaactgcgtgttatgaagcgcactgcgaatcgatacagtcatacaatctgtccattcccccgcggaacaccggtcgttccggttaacctcaccgcaaagcgtgctgttgacaataacctcagttggttacgcgggcagtcggttcacgtaaccgttcggcaacacaccagttgaaggagcgacgatgactaccacactgttcaccaacgcacatatcgccaccggagaacccggcagcacggctgcaagcaccctgccattgcaggacattctcgtcacggatggcgtgttcaccgcattcggccccggactcgcgcaacaatatgaggctcagggtggtgatctggcggccattgaggtggtcgatctgggcggcaaacttgtctgcccaccgttctgcgatacgcatctgcaccttgattacgtattcacggcccgcaagcccggtgcggtgaatgaaagcggaaccttgtttgagggcatccagcgatggagtgagaccaagtccgacttgacggtcgacgagatcaagcagcgcgcgaaaatcggcattaagaaagaaatgctgcatggcgtgcagctcattcgctcccatgccgatgtgaccgacccgaacctgacctcattaaaggcgctgctggagcttaaggaggaattgaaggatacggtcactctccagatcgtcagcttcccgcaggagggcatgtactcctacgagggcccgcatggcgaatcgggggccgagctggtggaggaaggactcaagatgggtgccgactgcgtgggcggcatcccccatttcgaacagtgccgtgagtttggcgagcattccatgcacacggtagttgagttggcttcgaaatacgacaagctcatcgacgtgcattgcgatgagacggatgatccgaattcccgttacgtggagctgctttcggcgttggcatataaggctggcattggcccgaaggtcaccgccagccacacctgttcgctgggatcggcggacaacgcctacttcttccacctgaccaagctgcttaaggcggcgcatatcaacttcgcctgcgcccccaccgagaacctgtatttgcagggccgtcaggataccttccccaagcgccgtggcatcacgcgagtcaaggagctcactgaggcgggtgtcaatgtgtcattgggccaggattcaatgcaggacccgtggtacccgctgggcaatggcaatatgatgctcattcttgattatgtgctgcatttggcacagatgatgagctttgaagaaatcgacgatgcgttgaagttcctgaccgtcaacggtgccactacgttgggcctgcgcgatatgtacggcttggaaacgggcaagccagcaaacttcattgtgctggacgccgatagtgtgttcaacgccgtgtatgagcgctgctcggtattgcgttcggtgcgcgccggccgcacgctgtttacccgcgaggagaccatcgacaccggactcgccctgctgcaataacccgacaacaaacagtagttccccttgacaggggagctatcgccagaggcaactgaggggtagaccaaaaacgtgcacattatgtgtgcgtaggtctacccctcagtcagcttcgctgacagctcccctgtcaaggggagctttgctggtatgcgctagctacgctatcgaaacggactacttctgcggagcgtcaccggaatcggcgggagcggattcggctggttcagtggccggagtggcgtcggctggagtctcgccatcagtggaggcaccggcttcggacgaagtttcggcatcggtggcggcaccgtcttcggcgggcttatcggcggcggccggctcctcgaacttctcccccttgaaggtgaattcgccgaggataccctcgccttccgcatccacaatcacgcgctgaccgtcttcgagatcgcccatcagaatcttctcggagatggcgtcctcgatgtcgcgctgaatcacgcggcgcagcggacgggcacctagcagcgggtcgaagcccttctgcgcgagcaggtccttggcggcgtcggtgagttcgagcgacatgtgacggtcgaacaggcggtcgttgagctgcttgacgtccagatccacgatctggcgcacctgcggctcggtgagctgcttgaagacgatgatgtcgtccagacggttcaggaactccgggcggaactgctgcttcaattcggagctgacctggtccttcatgcgctggtagctggactcgttgttagcacccaggttgaagcccgtgttggcggccttggcgatgtctcgcgtaccgaggttggtggtcaggatgatgatggtgttcttgaagtccaccttgcggccctgaccgtcggtcaggtggccgtcatcgagcacctgcagcagcgtgttgaagatgtccggatgagccttttcgatctcgtcgaacagcaccacggagaacggcttgcggcgcaccttttcggtaagctcgccgccctcctcgtagccgacgtatcccggaggcgcgccgaagagtcgcgaagccgcgtacttctcggagaactcggacatatccacgcgaatcagcgcgtcctcatcgtcgaacaggaattcggcgagcgtcttggccagctcggtcttgcccacgccggtggggccggcgaagatgaacgaaccggacgggcgcttcgggtccttcagacccacgcgagtacggcggatagagcgggacagggcggaaaccgcctcgtcctggccgatgatgcgcttgtgcagttcggcttccatgttgagcagtttcttggactcggcctgagtcagcttgaacaccgggataccggtggtggagctgatgacctcggcgatcacgtcctcgtccacgaccatcttgacgtcggactcgccttcgcgccaggagtcttccttctgcttgcgatcggcttccagcttctcctgcttgtcgcgcagttcggcggccttctcgaagtcctgacccttgatggcctcgtccttgtcggcggcgatcttggcgatcttctcgtcgagttccttgagctcaggcggggcggtcaggcgcttgatgcgcaggcgtgcaccggcctcatcgatcaggtcgatggccttgtcgggcaggttgcggtcctggatgtaccggctggacagctcggcggcggactgcagcgcgccatcggtgatggtcacgtgatggtggttctcgtaacgggaacgcaggcccttcaggatctcgatggtctcggcgatggtcggctcgtgcacctgaatcggctggaaacggcgttccagagccgcatccttttcgatgtacttgcggtactcgtcggtagtggtggcaccgatggtctggagctcgccacgagccagcatcggcttcaacatgtcggaggcacccagcgcgccgtcggcggagccggcgcccacgatggtgtggatctcatcgatgaacagcacgatatcaccacgggtcttgatttccttcagcaccttcttcaggcgctcctcgaaatcaccacggtagcgggagccggccaccatggaaccgaggtccagcgagtagacctgcttgcccttcagggtttccggcacgtcgccggcctgaatcttctgggccaagccttcgaccacggcggtcttacccacgccgggctcgccgatcagcaccgggttgttcttggtgcggcgggagagcacgaccatgacgcgctcgatctcgttggtgcggccgatgaccgggtccagcttgccttcagcggcttcgacggtcaggttgcggccgaactgatcgagaatggcggaaccggacttgttctgcttgtccgtcacgccgccggcgttggccagatcgcccttgccgtcaccggtgccggtgccggagttgccgcgaatcatatcgatggtcgcgctcctgagctcacccaggtcgacgtccatcttgatgagcacctgggtgcccacgccttcgccttcgcgaatcaggccgagcaggatgtgctcggtgccgatgtagctgtggcccagctgcagggcttcgcgcagcgagaactccaacacctgcttggcgtgcggagtaaaggggatgtgcccgttcggagccgcgttgcccttgccgatcatttcttcaacctgcttgcgagtggcatccagctccacgcccttcgaggcgagcgccttggcggccacgccctcaccttcgcggatcaggccgagcagcaggtgttcggtgccgatgtagttgtgctgaagggccctcgcctcttcctgcgccaacacgatcacgcgccgtgcacggtcggtaaaccgttcgaacatgcttgtccttcctcaattgacattccgtcttactctaccgattcacgatgacgtttattcatcggattccatgaattgcgccgtaagaggataagaaaacgatatgctggttctagattcacccgtagtcgattacaaggaggctcgaaatgagtgaagcgacaaccaagcccgacatcgttgtcggcgtggatggttccgatgaatcctttgccgcgctgaagtgggcgcttgaggaggcttcgttaaccggtcagagcgtcaacgccgtgtttggctggacgcattcgtgggatatgggttccgaaccggacagcgacgaggcttgggccaaagtccgccacgacatcgccaacgagctgcgtgtgtgggtcgacaaggccgctgcaggcatcgacttcgatccggcgaatctgaagctcacctcggtgaaggcctccggcacttcggccctgctgcagatcggccatgatgcgcagcagatcgtggtcggccgccgctcgctgagccgtgtggcccgctggttcatggggtccctgtccgcttcgctggccgaggccgccgaagtgccggtgaccgtggtgcgcatcgccggcagcgaggatgagaccgtgaccga

SEQ ID NO: 874 - DNA, 7782 bp, Unknown
  R14_18m  MAG No. k141_15783
gagcctcaaatcatccgcatcccatacttctccgccaacgccggaatatccggcacgccatacttggccaccagatccagccatcgttgtttgttctctccgccaaatcgctcggctcgggccgtatacgcctcgacctgcaggaacttcggcggcactgacttgctatggaacttgtcggcgtacatcaccacttcctgctcgagattcatcggcacatagtcggctggtggcaatggcagctcctggcgcaccacatcctcgcgcgtaagtcccacgccggtatggttgcggcagaactgggcgatggactcgtccacgccctcgtcgagcagatactcgtagcccttaagaccgtgcagaatgtagcgtttcttgctgaatttgagcggttcgtcgtcagagccgtcatgcttgaacacgcggtaggtgccgatgtcatgcagcagtccgccgatgagtactaaatgctcgtcgagcagacgcggcggcacatggccgccggtgacgcctgcggtgggcggtacctccgcgtccttcggtaatgtgcagcggcgcgtgaacagcgcgttctgccggcgcacgatctggcagccgatggtcgctacaatcacgcaatgcgtgtgcaccagctcgtacgccgccttggacggcgcgattttgcggtgcaactcgtcgatctgctccagtgtgggaatatatccggtcatgattatcaggtttcgcctcgtacggtcagatttatcttcagattagcgcggcaatgagccgcggcaggattgtcaggagctgattcggacatctcgacatgcctatctccgtttcaaggggctgattcggcatcctcctgaggtctacttccgtttcaaggggctggtgcccaagtatacgcggcgtaaaaacggcggaatgacgttggcatgaagccgtttatactcggggtttggcggatgaccagccccttgaaacggaagtagacctcccggaacacgcaaatcagcccctcgaaatcgaaaaagctcacgatgtttggtatgtatccgaacatcgtgagcttcaagagcctgtgctggtgtgtctggtgtgtattgctgccggacagatcagatcttgaagagtgtgtcggctgcttcagcgagctcgcgcgacgcagtgagcacgataacgcaatgcttcgggtcgccggtgtgcgccagcttggccagcgcggcgaacacggtcacctcgtcatccgcgttcagccctcgtgtcggctcgtcgaggatcagcacttcggcctcggtgctgattgcacgggcgatggccaccaaacgctgctgcaccaaaggcaacgtgccgacggccacgccgctggtggcctcggagaagccgaccttggccagcagttcgcgggcgatcaccggcttgggcttcaggaagttgcggttggacgcattcatggcgtacagcacgttttgttcggcgtcgagattcggttgcacggcgtgcagctgcggtacgatgcccagacggtggccgcgcagttccacgggctcgagctcaacaatgttggcgctcttgttcatcaccgtgccagacaccggcgtggccaaaccgctcatcacgcccatcagcgcgcgacgtttggcgtcggcggtgatgcccgaatcggggtcgtcgctgatcagcagcgcgtatgcgtgtccggagtagcagaagaaattcgcgccatcgaggatgttgaccttgcccttggggccggcgaccgtcaccttgttcagggcaaaggtcgggtaggtcttgagcagaatgtcgtcggaaccgccgcccaccaacacgcgatcgatacgcgaggccagcgtcatggtgggttcggccgctttgccctgaggctccgcatgctcggccaatgcgtctttgtgatcggttttggccagtcggagtgtttcgttgacgcgggcggcattgcgctcggtcacttcggcggatgcgttggccgaagcgatggcgtctgcttcggcctcgctggtctcgtcagttgctccggtttcggcagatgccagtgcgctgtaaataccatcgtcaacagtgctttcgtcatcaacgtcatcgaaggtcacgctgaactgcacggagtcagctggaacggattcaatggcgtcgttcgtctcagtctcagaagtcacttcgtcagccgttgcgtcagtggtcttctcgagttcctgatcgttgttcttgtcgctcatgcctgtgcctccgcatcgtcggttgtggtggtcgtcttattggcctcgccggcatcatgagcggtggcctcagcagcttcatcggtctcagcagcgccagtggtttcggccgtttcaatcgcctcagtctcgctcacggtgccccagtcgccatcggcggcgaacagcttgttcgcgctgaagaacgcaaggcgcagggcggcaagaatcgccaggatcaggattgaacccaggccataccagaccatggtccaaatcaggtccgatgtcaccgggatggtatggccggatgccagagcaggtccgatcggcttggcggcgaacgcgcctccgaccagaccaattacgtagaagggcagggtgacgatgaacacttccagcatgaattgccatcccaaacgcccgcgagtgacgccggacaccagtgccatgccgatctcgtcgtcacgcttgggtgcccacacgcctgacagcacgaggatgagcaacagcacgccgcccacggcaaccaacgcaatggtgccggtcttcgcgcgcgaggatagcgtatccagcggctccagagaagcgttgtaggattccagcgaaggggaagacacctcgtatcccttggcgggcagcttggacttcttgagggtggataccaaggacttgtatgtagcgggaccaccggtgtcgaacaccacgtccagatccggcaccgcccagccggaggcggtcttgtcgttggactgtgggtcgagtccggccttggcgaaggtctgatagttggtgaagatcgcgttctcgcggttgcgggcggccgtcaccggattggcgacggcggattcggatgtgtacttgtagatgccgcgcaccttgagctcggccgtggtctgggcgtccgaggcggccgccaccttgagcgtatcgcccaccttcaggttgttggcggaggcaaacgcttcagagaccagtgcgccggtggtgttcggtttggaggacttgttgtcgtagctcaggtccttgccgtccacgatttcgaaggtaccgaggtcgctggccttggcggcatcctcggtccagaaggctcgccaaatgagctggccgccggtctcatcatcggaggccgagcccagcgatccgccgtccagggccttcaaatcaccgctcacgcgggccggcacggtttcggtaaccgtaaagttcaacgagttggtggccgaccggacgagcgtggcgtattcggtgtatgaggtccacgtcatgtaatgcttggtggaagccgagtccgtagcggagaccttcttccacgtagccgcagtcgggcgaatggccaacgtggccttctgctgatcgtacgcggtggtgtgtgcgttggtatcttcttgaatgatggccagtccggcgactgtgccgaaggtgaccgccaaggtgatgaacgcggtcagggccgtacgtcctttagaacgtgtcagggcccgccaggcgttgctgaggacgaacatgtaattacctctcccgttctcctaagccgaacagatcaatacggctttaactattgttgcgtttagtgaccgttttcttgcgcaatactgttatacccctcaatgaagtctgagaacattctgacagcgatgtggtggtcatgaggggatttgcacccggtatgggataaaccctcggtctatttcggtggcatcggtacactggcatgagatatgcgtggcgtcacgtgtgctccggcatgtctgcgattccggattcgcccggagtccggcatccggaagcgtggccttgcgccgttggataagagtatgagctgagcagattttcgggtaggataagtatgcgattcacttcagggcattcgagccataaggctgtggggcgtaggagaagccgccatgccggtaacgggaaatccaatcgctccgcatctacgaatagcgctgcaaatcatcagacgggtcccgtaaacctgaagactccccagcacgtgggtggcgacggccgttcgctgatcagccgtacgccgatatgggcgcgagtggtggttgtactgctgctgacgttgctggccagcgtcacctgtgtgggcacgctctacgcggcatccgtctcgagaatggccacggatgcgcagcgtgtgctgacatccgccgaaagtctggccaattcggcacttggctgcggcagcgataagagtctgtcggacatctcccaagagttggtcaatgccaccaatgatctcaacgaggagctgaacggcccgcagtgggacttcttccgcgaccattcgcgatttggcagcgacatcaccgctgcccgcgaaatgctggcttccgtggatacgctggtcaacggtccgttcactgatctgctgaacctgtccaaacgattgcagggcttctccctgaagaatggctcggtggacgtcagcgccctgatggatatgccggatatcgtcaagcaggcgcataaggatatctcgcagcagctcaccaagctcaacaaggtgccgactccgagcgtcgccaaggtggccaccgtgctcgaatccgaaaaggctgcgctcaagaccgtggattcgatgctcagcgaatacgatggcctcattaacttgctaccgcaactgcttggcgaggacggcaagcgcacgtatctggtgatggtgcagaacccggccgagctgcgttcggcgggcggcatggtgggcaccatcgccgcaatcacggcagataagggcacgattaccatcggtgatttcgccaccacttctggttgggacattcctgagaagccaatggatgctacggtgctgaaggagcgccaggtatttggcgacacttttgaccagtacccggccaccacgaccatcgaccccgaattccagcgtgtggcacagatgaacaaatacatgtggctatatcagaaaggcaacgaagacgagaacgtagcgggtgtattgtcattcgatcccgtattcctccaggcattgctgggagccacaggcaaggtcaagctttcggacggccgagtgctggatggcaccaccacggtgccgttcttcgcttcagacctgtacacggattacccggacttcgagcagcagaacaacttcgtttccgaagcggctcaagcaattatgaaccatgtgcttggcaacgcgaatgcttccaccgcatccccgctgttgaaggcaatcagagataccagcgctagcggtcatttcaagctatggatggctgatccggatgagcaggaggcgctgattgccaccggacttatcgacgataaggccagtggcgagttgtctgctgacagtcaggtacctgaaaccggcatctatctttcggagctgcagcaaggcaagcaggattggtatctgaagacctccaccacggtcacaaaaacctgcggcgacgcctcggccagccggaacgccctgtattctggcgtgctggataagcgcatcacgacagccgtgcgtaacacgcagctgggtcagtttacggaagatcagctcggtgacgaatacacggtcaccttcaccatgaagaacacgctgactaaggctaaggccgaatcgttgcccgatttcgttaatggcggctcggagaatccagtgctcggcggcatgttgtaccgcgtggtgcttaccgccccgtacggtggcgaaatcaccgctgtgcaggctgatatagattcatgggataccaacaccgcgagcctgtatgaccgtcagtacattatgttcaaccagcagtggatcgagcccggaaaagaattgacgattgcttataccgttcgggtcagcagcgatgccacacatccactgaacgtggtaaccacgccggtggtgaatgcggatggcatcgagacgggctccaacggtaaggtgaccgatgagtgctcggcggatacgaacggcgccgatggtgcgaacggcgccgatggtgcgaacggcgccgatggtgcgaacggcggcaagaacgacgcgcataagggcgcgtcctccgatccctcggccggcctggacaccttggacaagctgaagagccagatcagctgcccggtcgatctgaagtccctgacgggatccatgtgatgaccatgcccgattccgtttccggcgtcgccgtttccgacgccaccgtttccggcgtcgccggcaggccgcgcgacgtgaactacgatctgctgcgcgtggtggcgatgtgcctggtcatcggcgtccacgtgatcaacaactacatgcccgtcaagatgaccctcgccggcagcgcggaaacggtgcgatccgtgctgttcgcgttgttcatggtctgcaatccgctgttcattatggtgtcgggccggttcaacctgacattcgatgccgaccggccggtgagcacccactcagcgggccgtctgccgggctctggctctgatgccctggcaggcggcggtgccggccaagccgatcccagcagcctcgcgccgtacgtgcgctactactacaaacgttttatctcgctgattgtgccgtatctgctgtacgcgggcggcatgggattcgtcgcctacctggtgatcgatcatcgttcggttggcggcgctgtgtctggaacgttgtttgatatgttttccgggtatgacgattccgtctattggttcgtgttcatgctcgccggtttcgtgctggcgacgccgttcctggccgcgatgatgcgcgcgataggccggtcgggtgcctggctgctgatcggcctggccgccgccgtggccgccgccgagcagatctgcaatcttgccggatacccgttgacgttcctgcagtcgttcccctggcgggggctgctggtctactatctgctcggtttcgtgctggaatactatccgccgtccacgcggatgcggcacggcttgtacgtgtcggcgccgttcgccctggcgtggaccgtcgccacgccgtacctgttcgccggccagcagatccaggtgggccgcacgctcacggtctccttcgcggtggtggtggccgcggtgttcctgttcttccggtacgacgtgcatatcacgtcggcgcggctgcgcagggcgatcacctggctggcggggtactcctacacgatctatctggtgcattcgcccctgtccaaggtgctgatcggcccgcggattcccgcgcccacggacggatggtcgtatgcgggtatcagcgtgttgatgtttggcgctacgctgctcgcggcgctgctatttgcggtgattgccgataccgtggtgctcaagcccgtgcaacgtctgctgcggaacgtcgccctaccgcggaagggccgcctgtagtaggcggtcgttttcactgcccttgcgcgcggtagcgggcctcggtggcctccttggccggcgcccaccagtcgcggtgttccgcataccaatcgatgacgttgcgcagtccgccggcgaagtcggtgtgcatcggcgaccagcccagttcggcgcgcagtttggatgcgtcgatcgcgtaccgtctgtcgtgcccgggcctgtcgtgcacgttctcgccggtgctgatgtggtggaagcgcac

SEQ ID NO: 875 - DNA, 8558 bp, Unknown
  R14_18m  MAG No. k141_16022
agcaaatcggacaccacatgcacgtcacgaatctccggcacgttcttcagcaccgacttgcccggtgccagcaacgcggcgaccatcgccttgctcacgaagttcttcgcgccacgcaccttgatcgtgccattcaaaggcttgccgccctcgacatgcaacacgtcatccggattctcagccacgccactctcctcaatcaatcaagattcaaaaaatgctaccgtccagtttgccataagccatgtgccgactccgtgaaatgcaccccagccgaactttgatcaccgtgcacaacggatcccataccccccgtcgaatcaaaccgataacgtgatcttcctcacatttgccgccacggtgttctccatacttctacgctacgattcagggcaatggcatcagacgccatggccacaagcaaaggagcattcatgaccacagtcgccgtcatcggctgcacgcacgccggcacgttcgccaccacctcgattctcgccgagcaccccgattggaccgtccatgttttcgagcgcaacggtacgctgtccttcctctcctgcggcatcgccctgtgggtgggcgaccacgtatccgacccgaagaaaatgttctactcctcccctgccgctctggccgaagccggcgcgaccatgcatatgcgcaccgacgtgacgtccgtggacctcgacgccagaaccctcacctaccgcgcgctggacgaggccggagaccccgccgaacagaccctcgctttcgacaaactggtcgtgaccaccggctcgcgcccggtcatcccgccgatccccggcatcgacagcccgcatgtgctgctgtgcaagaactgggatcacgccatcgccatcaaggaaaaggcgaaaaccgccaagtcggcagtggtgatcgggtcgggctatatcggcgcggaaatcgccgagcagttcagcgtcaccggcgtcaagaccacgctggtcgacggccttgatcgcccgctggccaataatttcgataagaccatcaccgatcaggtggcggccgcgttcgaggagcacggcgtcacgctcgcgctcggccagaaggtggtcgagttccgcgacaatgacgacgacaccgtcactgtggtcaccgaaaagggcgagtacacggccgaaatggcgattctggccgtcggcttcctgccgaacaccgacctgctcaagggcaaggtggacatgctgccgaacggcgcgatcgtggtcgacgactacatgcaggcgtccgcgccgggcgtgtacgccgccggcgactccgccaccgtgttctacaaccccaccggccagcacgattacattccgctggccaccaacgcggtgcgccagggcctgctggtgggccgcaacatcgagacgccgaccgtgaagtacatgggcacgcaggccacgtccgccgtgcagctgtacgatctctcgctcgccgcctccggcctgacccgcgccggtgccgaacgccgcgggctcacggtccgcgagacctcgctcaccgaggattatcgcccggacttcatgctcaccaccaccccagtcacgtcgattctgacctgggacccggaaacccgcaaggtcaagggcggccagttctgttccaaggccgatatctccggcgcggcaaacgtgatttccatggcgattcaggccggcttcaccatcgaccagctcgccaacgtggacttcctgttccagccgaacttcgacaagccggtctactacgtcggagccgtggccatgaaggcggcggccgagtaagacggctgtacccaccgcaaaaaagaaaccccggcgtgatgggcgccggggagagaaaggagagaagaagaaagaggttaagttatgcagcttgttcggccgtgattacatataacagcaacagtttcaatgcaacatgggcactgtctgggaatcgtctgggaatcacggcccgtacaggctgttgcttgtttttggagccgatttaccggctggccttgatcttgtgggccagttcggcgtcccacatcgcgccggtggcggacatcaccgagtccgcgccggcgtcacggtacgcctggtagtcggcgggcgagaccacgccgccgacgccgttgatcgcgaaatcgagcccgagcttttcacgaatcgcggccagacgggcgaccatgtcgaggccggcgccacgaatcgcattgccgcacacgcctgagcgatcgcggcccgcgccgggcagggcctgattgccattggcatcgaccagtttggcggaaatcgtattgatggtgctgaagccctgcacggtgccgtggcccacggtggaacgcaccataagctccagagcgtcgtcgctggggatgtaggcgagcttgaccatcagcgggatgtcgccgatctcctgcttcacggcctcggtgatgcggcccacgagcagcggattgtggcatagcaggcggttgtggccctcgttggggcagctggtgttcatcaccatgagcttggcaccggtctccttgaccaggcgggcggtagtggcatggtcggcgatgtattcctcctcgctcatgccctccacacgcgagccttggaagctcgggaccagcacttgaccgggaccggcggcctcgatggcggcgcgcatgtccggctgccagacgtcagggctctgcgagggcacaccgaagctgttggagatggaaatcggctgttcatagttggtgtcggccagcacgccttcgtccagttcggcgctgcccggcgtcagtgaaccgtccgccgacttggggtgtacggcgagcacgttcgggaacgggttgcagccccaggcgcgcgaacgcacggttttgtaggtcgccagatcgaaacccatgtggaaagcggccgtggtgaaacggctgttgagcagcgggcctgcgggaatgccgaaaggcaggttgaccggctggcccaaaaaggtggccaaggcaccctcgctggtggttccggcggcatcggcaccgttgccatccttcagcgcctcggcgaacgcgccgaacggcccttgctcatagttgtcttcgtaactgcggctgacatcgtaaaacggctcaaaatcactcatgcttcaacgataagccaacctgcatgcgcacacgcacactcaacccatcatcgcgccgacaaacgaaataatggcgaaagcggcattggctaccacaaagatgatgaacgtcggagctgcccagccaaagtacgtgtctggaatactacgattcgtacggtgatattggcgcatctctttgccgtatatcacgaatatgatagtcgatccgatcacgccgatcacagatagcgacaatgagaatatcaaatatgcgttgtcatcaagatagttgccggcaagggtatcgatggcgccggaaagaatcgcattgttgaagatgtgcagtgcaatcgaccaaaccaacgagtattccatggccacgaatcccagaatcaggccaaagaggaacgcgaatgtgccttgcactacgtcgtcatggaacaggccgaacaccattgccgaggtgacgatggcgaagttcttgcccaacggcttgagctccttcatcagtacgccgcggaacagtacttcctcgcaaatcggagcgaccagcccaacgtacagccacatgcttacggtgacgctggattcggcgatgctgtctgacgtgggagaggcaagatcggtgcccagcctggaaaaagcgacctgcaccaacataacgatgccttgcacgcccatgcccagcacgatgaacatcaacgcccagagaggctgcatgcgcccgccgccatattggctgatgtggccaagctgattgggctccccgtacgagtcgcgatgctggccaccaagccagaattcgcaggtgaagatgtcacggtggcgcatgagcagcagaaatccgaacgcgacgaacaccgatatcaggctgatgatgccatcccactgcacgccggacaaatcgctcgcggttattacgccgacgataatggtggcgaccattgcgcccaagagcatcatgccttcataggcgagagtcagtcccattacacgattgaccaccttgcgacgccacgtgcgccatacacggcgaggatcgatcggcatgaccacgggcattgctgcgggcatcgtggcaggcattgcgttgggcattgctgcgggcatcgtggcaggcattgcgttgggcattgccggagccgtttgcacgaatggttgcggcgcagcggaatagggttgtggcgcgtagcccactggttgagcgtagtacggatgagcgaggggctgtggagccgactgttgcgccgggtatggggaataggcggattgcgccggatacgtcggctgcgtgggatacatcggctgggcaggatacgtaggttggacgggatatgtcgggtatacgagctgcgcggcgtattgtgcaggctgcacagcaggtattgcggcttgcggcacaggttgtgaaacaccttgtgaaacaatccgtggaacaccccgtgaaacatcttgtggaggtagcggttgtgcccatgcctccggctgacccgcatattgcggctgcatgctcggcccaggctgaacatactgtggcgtctgtggcatcggcgtctgtgactgtgccgcagactgcggtgccggtcgaggtggcaacggttgcgctgacagcgattgcgccggagccgtatcggaatcgttcgacggattcatgtcattcatggtcatgatgctcaacctaaccgtcattactggatgaatcgtgattatgtccacaaatgtgtacgaattcaggcacagtatttcgaacgctaggacggagttcatgagtgttgaggaaagcgccgccacgccggtgttggtggctgcggtggataacgaccgtatggcgttgttggcactgaagggaatattgccgcaactcctgcccgccgcgcaatggatgtggggcgcgggcaccagtgagacctttgtttgatgcgatgcgagcgacccaataatctcaatcagacacagagccaacggccctgggcctgcaattatggactcgcctttcggcgaggctcaatgctggcctcgctgctgtcgcggctcggcacagggcctgctgaaagcccaccgggctttcagcaggccgatcgcggctaaataatgccgcgatcggccaacggccctgtccagtctgcgtcctcaggctcgcgggcggactcgattctttcttcggcccagtgtttggcggggatggtcttgggcttgaaggggaacttttcggcgcgcatcttttcgtaggcggcgatgtcgtcctcgtgctgcagcgtcagatcgatatcgtcgtagccgttcatcagacgccaacgcacgtaatcgttgacctcgaacggcagggtcacgtcgccgcaagtgacagtgcgggtctccagcgagacagtcatctcacgaccaggctcttcctccagtagcttccacagaagttcgacggactcctgcggcataatcgcggccagcacgccgttcttggcggtgttgccgtagaagatgtcggcgaagctcggcgcgatgaccacgcggaaaccgtaatcgtgcagcgcccacacggcgtgctcgcgggaggagccgatgccgaattcggggccggcgaccagaatctggcccttaccggcgtattccggcttgttgagcacgaagttcgggtctcggcgccatgcgtagaacagggcgtcatcgaagccggacttggtcacgcgcttcaagaacacagcgggaatgatctggtcggtatcgacgttggagcggcgcagcggcacgcccacgccggtcagtgtggtgagtttttccataacaattttcctttcggggatctctcccccagtcagtcttcgactgacagcccctcgtcagagggggctcacgtgtattgactcagagatcggcgggagacgagattgtgccgcggatggcggtggcggcggctacggccggcgacgccagatgcgtgcgcgagcccttgccttggcggccctcgaagttacggttcgaagtggaaatcgagcgctcgttcggcaccagcttgtccgggttcatgcccaggcacatcgagcagccggcgttacgccattcggcgccaaagtccttgaacaccttatcgaggccttccttctccgcctgcaaacgcacgcgggaggaggccggcaccaccagcacgcggtggatgttctcggccttgcggtggcccttcataatcgcggcggcctggcgcaaatcgtcgatacgaccgttggtgcacgaaccaatgaacacggtgtccacggcgatgtccttgatcggcatgcctggcttcaaacccatgtatgcaatcgcacgttcggcggcggcgcgcttggtggcgtcggcgatcttgcccggctccggcacggaggcggtgatcggcagaccttggccggggttggtgccccacgtcacatatggaccgagctcggtggcgtcaatatccaccaccttgtcgaatacggcatcgtcatcggtcttcagcgtcttccagtacgccacggcctgatcccacagctcgccttccggcgcgtgcggacggcccttcaggtactcgaacgtggtctcgtccggcgcgatcatgccggcacgcgcaccggcctcgatggacatgttgcacacggtcatacgttcgtccatggtgaggttgcgaatcgcctcgccacggtattcgatcacgtaaccctggccgccgccggtgccgatcttggcgatgatcgccagaatgatgtccttggccgtcgcgtccgcgggcagcttgccgttgacgttgacggccatggtcttgaacggcttcagagacagcgtctgtgtggccatcacgtgttcgacttcggaagtgccgatgccgaacgccagcgcgccgaacgcgccgtgcgtcgacgtatgcgaatcaccgcacacgatggtcatgcccggctgggtcaggcccagaatcggggcgaacgcgtggacgatgccctgatcggcgtcgcccagcgggtgcaggcgcacgccgaactccttgcagttcttctccaaagtcgtcaactgcaacgcgctcgtctcatccgggttcgggcgatcgatatcaacggtcggcgtgttgtgatcctcggtggcaatgagctgatccacgtgacgcggcttgcggccggccaagcgcaggccctcaaacgcctgcgggctggtgacctcatgcatgagcatcagatcgatgtacagcaaatcaggagctccgtcgctgcccttgcgcaccagatgatcggcccagaccttctcggccagtgtcgttcccatagtgattcctccaaaaaattccgcgcgaggtattgtgttcgcgccttgttcgtggtattagcctatgtgcttgcgatgggcccggccatgagcatgccggatattgagatacggtcaaatgatggcctcaatatgactcggacccgactcgaacatgacctagtcatgactcggttccgctccagacatgtctcttcggcatccacgaacgccctttcaacttcatggccaccctgtgagacacttccccaatttgccatttcactatgtgagatggcataatcgcccttattatgactgattcccgggaagaaccattgaacaacagcttgaccgagtccgagccggttgaagacaccaccgccaaggacgatggggaaatccattccggcgttggcgtccttgataaaaccgtaaagattcttgacgcactggaatccggcccgtctacgctgggccagcttgtggccgccaccggtctcgctcgaccgaccgcacatcgtttggctattgcactggaacgccaccgtttcgtactgcgcgaccagcatggccgattcgtactcggctcccgtttcgccgaacttgccgccgcagcaggcgaggatcgtctgctgaccgccgccggcccgatcctgcagaccctgctcgatcgcactggcgagtctgcgcagatttaccgccgccaaggcgatcagcgcgtgtgcatcgccgctgtggaacgcacctccggcctacgtgattccattccggtgggtgccatgctgtcgatggaagccggttccgccgcccagattcttctggcttgggaggattccgaccgtctgcaccagggattgcgccacgccaagttcaccgccaccaagctggccgccgtacgcaagcgcggctggtccgagtccgtgaacgaacgcgaagagggcgtgtgctcgatttccgccccgatccgcaacgcctccggccaggtcatcgccgccatctcgatttccggcccgaccggccgcatgggcgccgcccccggacgccgctatgcgccgctggtgatggccgccggcaagtacctcaccgaggcactggtcaaagccgttcgctgaaacataccagtcaatccaaccgatagcccaaccggcagaaatcccgcgtcacaacgaaagagacgcgggatttctgggctataggaacaagagtgtggtgttcgcgcaggatgggca

SEQ ID NO: 876 - DNA, 16570 bp, Unknown
  R14_18m  MAG No. k141_16446
cgaagtgccggtcgacatcgacccggccgacctcgagaagcaggcgctggccgccgtcgccgaccgtcttggcggcaaagagccgcgcaaggtgatcgtcaaggcccccaagatcgtctccatcgtccctgcggagtgacttgttgcgggttaggctcccctctttgaggggagccgctcgcgtagcgagactgaggggagcgtcaaccgccccacctcaattgtggataacttcataagctagaaccacataccccgtttcagctggacaaacgcccatgaatccatcagcgtggatgcatgggcgtttctcataaccatcgcgcagaccatgccgccaaccgtttgcgcgcattcagcaggcagagcgaagccatgccccaaccgcgagtggaacggcccacgacgcctccgccgcctcccggccatgcacggattcgtccggccggccacccgccccaaagggagcagagcggcctgcggcaggcgacccgtgacaaacgtgcgttatcggatctgatcggcgtacgttccgccgatgccgtcggagaatcagccagactcacccgggatcagccgcgattgtcgttcaccattgggcatgccttggccgtgatattgctgctgatcgtcgcccttggcatcagcttggcattgctggtccagcagtcgatgaatatggccatgctgtctcaaccgaccgccatgcagaccacgggcggctccgctggagatcagacgatgccatcgcagaacaccacggacgagaaacgcacggatccgcagcagtcggagcattccgatgccacagcgaaccccgaatcggataccacgcaatctccgcacatgcagacggacggcagcgatgccggcgcttccacgcatggtctcatcaacctcaacacggccaccgctgaggaattgcaatccatcaaaggtattgggccggttaccgctcagcggatcatcgatcatcgcacggcgattggcgggtatgcatcagtcgatcagctgctggatgtcaaaggcatcggctccaagacgctggagaccatgcgagggcaggtgacggtcggatgagcggggatcggatactgcgcgagcaggggagccgcgattggaggatgctgccgatcgccatagtgatgtgggcggcgagtctgggagcgcacgcattattcgcatggaggatgtctgatggactcggcaccggtcaggcaaaggccgatgccggagctggcattgacgccaccataatcggcatggaatggcctgtcacacgaatattgcctataacagtggcgtcatgtgccgctgtggcggcgatgatcgtggtgtctttccgcctgcggatcaggtggacgggaacattgaccgtatgcgtcgcggtggcgtgcatcggcagtatggcggcaatcgcgtcggacaccattgcctggcatgatcctgcctccgcacaagctcgccaatccagttcataccacgaagtcatggccacggtgacgacgcccgtgatcgcttcggaccaacgcacatacgattgtcagacggacatacggctgagcggcatcactgtggatggcgcggacgtacgttccacggtcgccgtgcgcgtatacgccgatgaatcgtattgtgggcagttgcgtcgaggcgcggtctatctgttgacgggcgtattgcagcaagcgcgatatggacgcataccgctatggctgctcttggaaggaaaacagccggtagcgcaggtgcgggctccgccgtggcatctcgccgcgatcgcacatatgcaggaggcgtttttcaccgtgaccggacaattgtccgatcaggggcgtgtgttggtgccgggattgacgatgggtgtgcttggccaggattatatcggcggcgatgccggtccgatgccggtcaacagcacgtatgcgcaaacgttggaaaatcagttccgccggtccggcatcatgcacctcatggccgtatccggcggccacttcgtactggtggcaggactggtgcgtcggttatgcatgtggatgctgcttgatcggcggctgacggcgttgctggtctctggtgtatatgcgctgctggcattggcgatgttccccagtgattcggtcacccgcgcgttcatcatgggattgataggtgcgttggcgtatgcgatgggacggcgtacgcaagcgttgagcgccctgtgctggacgataatcggtgtattggcggtgaacccggatatgtcggccagctacggattcgccttgtcttcggccgccgtactgggtatcgtgctgtttgcggggcggctggccggtgtctttgagcgagcgatgccgcacagcatcgccgaaatgatggcgatgaccgtggccgcgcaattgttcaccctgccgattcaggtgttgatggaaccggaattgccgttgctgtccgtgccggcgaacctgctggtgtcaccgttcgtgggattgaccacgatggcgggattgatggcactgacgtgcgcatggtgcacgccatggctggccggcgtattcgtgtggatatcgtcatggggtacgctggtgatggaacgggtggcgttgtggctgggcggcagcacgatggccgtcatcccatggaaagacggcgttacgggcgccgtgctgattgtggcggcggaaatcggtatcggcatgctactggtgttcgtcagccgttgcctccagcatgtccgtcgttatgaggccggaatgtctggcgtgcgcttcggttccgcttggcgcgtccgcctcagtctctggtgtgaggagacgagacgcctctttacgcggcggcaagccgaatagccaatgcggtattcggtgcagcaaccatcgcaatcccagccgaataccactatcttgacggcagcggcaaaatcgtgatgccggcaggtcattgtccaacctgtgtggcgagatggtggcatggcgaaaacagcagcgaatgcaccggtaaccgtggtgcccggaggcgactcgtatttgaacgacgcgcgcaccaaggcactgtgcgcgcaggcgttgaaggcgcggcccgacgccgacctcatcgaactcgacgccgcatcggccgaccagtatgccttcgatgaagccgtcagcccatcgttgctttccgacgttgccgtggtcaaactcgtcaacctgcagaatgccgacgacaagctcgccgaagctctggtggcgtacaccaagcaggccgccaaggatccgaacggctccagcgtggtgatctgccagcacgagggcggcgtcaaagggcgcaaaatcatcgaccaactggtgaaagccggcgctcgcaaagaggacgtgccggatttgaagaaaccggatgcacagctcaatttcgtgctcggagaattcgagaaacgcggtcgtagagtcgaaccgatggccgcacagcagctggtatccgtactcggcggcaaaaccggcgaactcgccgccatgtgcgagcaactgtgtttcgactttgacgataatccgatgggcctcgaccgtgtcaaccagtatttgaccgccaatccgcaggtcaccggttttgccgtggcagacaaggccgtggaaggcaaaaccgcagaagccatcgtcatgatgcgtgcagctgtggaacaagggaccgatcccatcgcgctgatcggcgcgttggccatgaagcttcgtaccattgccaaagcctcggcggtacgggccggcacgatttcccaggccgaagcgaaaaccaatccttgggtgctgaagaatgcgatgcgccaacttggcggctggacttcggcaggactcgcgcattgcatccgtatgctcgcctgggcggatgagcaaagcaaaacaaacggtggcgacccggtatatgcgctggaacgctgcattgaagacatcagtcataaaggtcggtaaaagtcgataaaggggtatttatgagcgaacacactattgcggctcccaccagcgaggccatgcaggagctcggccgtcgtgtggccggaatggtacacggcggcgatgtattgctgctctcaggccctcttggtgccggtaaaaccacattcgcccagggcttcggggcggggctgggcattaccgaacccatcgtgtctcctacattcaccattgcccgcgaactcgacgggcatttcgccgacggcactccgtctcatctggtgcatgtggatgcctaccgtctgggcggctcagcctatgcgccggggcaggacgccatcgggcgtttgttggacgagctggaatcgctgggattggacgaagaacttgaagaccccggcgagaacacggtggtgcttatggagtggggcgaacaaatggccaccgccttggcgccagaacgacttgaaatccatatcgatcgacctctcgattcctccgatgccgcatccgctggatcagacggcgaactcaccagcaacggcactcgtaccgtcgcattcgtcccagtcggcaagcgatgggccgcgttcgatctgcagtaagccatgcgcctatagactcctcgatgtacactctctagaggctttacgactaggaggattcatgggttgcacgttggtgattgacacctcattcggctcgacggtcggcattgtggggcgcgatcccattgtagagaccgattcgcgcacccatgtggagaaactgcaggtcaatatcgcgcgcgcggtcgaggaggccgggttcccagcatctgacattgcaacagtcattgtgggtaccggtccagccccctttactggtctgcgtgccggtatcgttacggccaaggcactggctttcgcaacgggagcgacgcttatcggccataatgttcttgagtctcaggtgcaatggaatctcattcgccgtggcaaagccggcactctcggcgatactcataaatgccatgtgctcactcttgccgtaaacgacgcacgccgcaagcaactctattttgcgttgtactcggacccgctcgttggcgatcccgatggcgaaaccgtggcgacggctctgattgacatggatatcgattaccctgcatccatcgcgcagcgcgtgaatgatgccgttcatacgtaccgcgacggacttatgccagaagacagcaatgtggatgtggtcgtggatgttgtgggtcatggggcccgcaaatatgcggatgcgctgggtgcaatcgagcagcttggcgacatcaccgatgaatccgtattggaccaaggggagcaaggtctcgctatctttgccactgatgcggaactggttgccaaccgtaatcccgatacgccggtcgaaccgttgtacctgcgccggccggacgccgaagtgccgaacccgctgaagcacgtgctcggccatgccggcgccgataaggcgtgagacgggttgattcgatgattgttgacatcactgccgtaagtcgtgatcttgcggttcactccatcgcacagttggaaggcgaactgttcggtcgtggcgcgtggaacgagaacatggtgcgcgaggaactggatgcacccacccgcacatatctgctcgacgtgtttggcgagacggaacagactgttgttcgcggctacgccggcttctggtacgacggcgaggacgccgagctcatgaccatcggcgtgggcaaggcataccagcggcaaggcatcgccgctgcgttgcttcaggcactggtcgacgaggcgaagcgtcagggcgccgcgcgcatgctgctcgaagtgcgtgtggataacgaccctgcgctggccctgtatcaccggttcggattcgaacgcatgggattgcgcaaacgctactaccagcctgaaggcatcgacgcatacaccatgagcctggacctgaaacctagggtcgtgggctttgccgccccgcagacggcatcggcggacactgaagacatcactggcaagcaaacggagaagaacggagaagcacgatgagcgaaccggttgtactgggcattgaatccacctgcgacgaaaccgcggctgccatcgtacgcggccgcgaactgctctccaacgtcgtggcctcatccatggaggaacacgcgcgatacggcggcgtgatccccgaaatcgcctcccgtgcgcacgctgaggccttcgtgccatgcgtgtccaaggcgctcgccgacgcgaacatgacgttggcggatgtggacgccatcgccgtgtccgccggtcctggactggccggttgcctggccgtgggcgtgtccggcgccaaggcgctggcctgggctgcgaacaagccgatttacggcatcaaccatgtgatcgggcacatcgccgtcactcagctgcagttcggcccgttccccaaggacacgctggctctgattgtctccggcggccacacctcgctgctgcatgtggaggacatgccgcgcaagatcgatgtggtgggcaccacgctggatgacgcggcgggggagtgcttcgacaaagtcgcccgtctgctcggcttcccgtatccgggcggcccgcacatcgaccgccacggacaaaacggcgacccgcacgccatcaaggtgccgatgggtctgacccaaggcaaggccggtgccgcgcacccgtatgatttcagtttctccggtgtcaagaccgccgtggcccgttgggtggaaagcgagcaggccgccggccatgagattccggtggacgacgtgtgcgcatccctggccgactccgtggccaccgtgctagcccgtaaggccatgcgcggctgccgtcagtacgattccaacacgctgatcgtgggcggcggcttctccgccaactcgcagctgcgtgccaaactgctcgaattcggcgagaactacggcgtcgacgtccgtatcccgcaaatcaagctctgcaccgacaacggtgccatggtcgccatgctcggcgtgaacctggtcgaagccggcgtggcccccagcgcccccgacttcccgatcgactccgccatgcccctgaccaaggtctcgatgtaagatttgcacggtattcccagactgatactgggaataccgtgcctctcatcggtgaattgacagtgacctgtctgcctgatgtgagtagtggtgaggtcttcgccatggatttcccggttgatgatggggtgtcgtgtctggtcaccaatgcaatgaaaataaaaaagcctcggagaaccgaggctttcgatggctcctgcgactgggcttgaaccagtgaccgtccgattaacagtcggatgctctgccaactgagctacgcaggaatattcaattttcatcccgtccggagttacccgttcaagtgagctcctgcgactgggcttgaaccagtgaccgtccgattaacagtcggatgctctgccaactgagctacgcaggaatattcaattttcatcccgtccggagttacccgttcaggtgagctcctgcgactgggcttgaaccagtgaccgtccgatatacggttctggcttgcagccgtagggcttcttgcaacaggagtagagagtacacctgctttgcttgtccttcaaatcggcgtgtctcgacaattcttctcgatgcacccggttttccgaagagcttcagccgtcggcgagaacattggctaggctccatgcaatcgcaaatagcattttctgggaagtgacgaagacgtcacttcctttttctatgcgaaggagctgccatgaagtactggaactcgaacaggaaaagctgcgagcatgtcgagccgcgcgaggattggaaggaatccatcgaactgtggatcgactggatggaagccataggccgtacggaagagaccttgagaacccgatggtaccagatcgtccgtttctccaaaatcgtgaacaagagcatcacggacgtgaccgaagacgacctcatattctatcttgccggcatgggcaccgaaggcagacgcggagtgcgcagctgcgtcaaggtcttctaccaatggggcatgaaacgcgggctcgcccgctgcaacccggcggactcgtgcaggacgagatgcgcaacgccgtggaatccaccacacgcaccgacatgagattgaccatgcccacgaaccaaatcgtcggcgcaaacggcgtcgccacgtactcactcagcaccgcaagaataggatagacaaaaaaggtatgcgccgacatgcgcaaagaagcatgtcggcgcataccggcaccgatatcagaggcgtctgccctcgtcggcggaaggcatcaggccggacaacatgcccatcggatcatcagtcatggatacggaatcatagatcggatcgattttcgtgttcgcactatccaccagcatgaggatccggtcacggatacgaggctccacatccgagtacgcctcctcgatgttggaaaggaccagaccggccatgtgcctggcctggccgacgacccgctcgggatcgaggtcgttttccaatgccagcttctcccaatgacggggcgtcacatccctggcgccggtgacgccgccgatgcgcatgggcagctcggcggacacccaaggccagaaggtcgtggtcaaaacgtcgtacatgggagaaagttctccaggaacctgccaggggctttccttgcccatttcccgtcaagagggagggaaaggcttatgggcatatccacacccttggcgtattcgagggaaacattcccctcggaatcctccagaaacacaccaacaggagaatcgcccatccaggcgtgcagctccctcaccgggcgctcccgagactggaaaacggcaacgcggctatgtctattcccagcgcatcggctgcggggaacaccgcttcaatcggagcttcgccccgctggagcaaatcatcggcggaccgggggtcgatgccggcccgggaggcgagatcaccggcgttccaggaacggttcgccgcctcttcccggaaagcagccgcgatatccgattcggtgcgggcgaaaagagtccggcgtccacgcggcgcttggaaacggctgaggtaacgcgcgtactccagttgcgcctttgtcggctcaggcggtttatagtccagattcgacattgcaggcctccttaacactcgattattctagcctatacagagaaaaaggacatggaatcatcgttgccgtccgatgatcccatggatggctcctggagacgcatttcctcgatttctgctgcggtctgcttcgtcgcctgttcgagctggtcgcacaggctgacggtcttgcccgtgaaagcggccgcgaggtaatgcgggtcaatgtccaaggcgatggcatcggcgcttcgcaggcattccccggcctgctcgatcaatctcatggcctgttccacacgcgccttggcaccatcgagaccggatgcttcaagcccctgttccatgggctcgtccgaccaggagcggatatcgagccgggtatcaagcgtgaaatccacccccgcgtcacgcaacgcgagcacggcgctgcgatagcgcccaccctgccagtccgctgtgacccgatccgcgagctcctcgccctgagtcccgcattccccggcgaggaatccgcgcagcgcctcctcgtcatcatcctccatgagcgcggcactgacggccatatggttccgaccgtcatacgactcgaaatacagcatcgtgtcgggcaaccggtcgcggtccgccacggactgtccgccaacggcaacgaccacgtgcacatcatggtgcagttcgccgccgacgacgggtggatcaacccgtaccacgaccggatcaacgcgcagagatcatgcaggcggatggagaaatcgcgccccgaactggtcgggctcgcacgctccgataccggcacgcgcgtcagctggcagtacgggcaatggcgtcaatgggccgaatggaaggcgcggaacgggtacggcgacgacatgcgattgaaacgactgcgcgacgactgggcggacgatgccagaagccgcagcctcgccgtccaggaatggcgcgccgcgatggagaaccgcccgcccttcctcgatgacggacgagaaagacacccggagaatctgtccacgcacgacatggaacgcctcgtatccgaagcgttcgccatcgccgccaacctcaacagcgcggcggacgacgacgaataccgggcagcgatgcgcgagggcctgcacacgttcgacatgctgcgcgaacgctacgggcttacgcaggacggcctgtggataacggccacggacatggacgaaagccctataccagcgcacgtaggaaaaatttgacagcagcctcgaatccctacctccgtcgcatgtcggtgcaaactcagaaggaatgtcctcccgagagtacacatccgctctcattcattgaggtatcgcgcgtaacgagttttcattgtaaatgccacggtatggtgacggattttggaggacgataatgacaatacaatatacagcgcagccggctgatccggcgtcgagtgcggtgctgacgcgcgggctggtgaagcggtatggggattttctcgcggtgaacgggttgaatctgaacgtgccggcgcatggcgtgtatggtttgctgggaccgaatggtgcgggcaagtccacgacgatgaagctgttgcttgggttggcctcggccacgagcggcgatatgtggatgttgggggagaaggtgggtggccggcacaggttgcaggcgggccgggtcggttcgatgatcgaggggccgagcttctacccggggttgagcggtctggataattgccgtatggtggccgattacctgaatctgccgggttcggccgcgcccgcgattttgcggcaggtcggtctggccggccatgagggcaagaaggcgagggactactcgctggggatgaagcagcggctgggcatcgcgatggcgttgatctcgcagccggagctcctgttgctggacgagccgacgaacgggctggacgcggaggccgtggtcgaggtgcgcgagatgatcatgggtctgagccgcgaacggggcatcacggtgatcatcagctcgcatatcctttccgagatcgagaagatggcgccggtcgtgggcgtcatcgcggccggccgcctgttgtatcagggttcgctcgacagtctgcgcgaggaggggcacatcgatttgcgtgtctccgacccgaagctcgcggcggcgatgctgggctcggaccggatcgactaccggtggctgccgggcagggatggcggcgtgctgcgcctgccggaactgccggaccagcggatcggcaccctgatcacgcagctcgtcggccagggtgtcgcggtctatcgcgtcgcctccgagcgcaagacgctggagcaggcgttcctcgaactgatcgaaagcccgcagagccgcgagcccacgcctcatcaggcgcaaaatgccatggattccgacgccgcacgcgcatccgcgcacgcatccccgcgtcgtccgttgccgatccggcaggctgcgggtcgggcggcgttcgcggcggcggacggaggcgcacgatgagcggcgcggcagtgttcgcggcgacgggtcgccgtccgccgcgcccccgcgcgaagaccggcagcccgttcacgctggcgcgtctggagttgttgaaggtgcggggctcgtcgttctggtggatgctgctgggcatgatgctgctggtttcggcgtgggcgggcatggcgttcatgaaacgcgccggcagttccgtcccggcgttgaggtcggccgcgttggccgatggcgaggtctatcaggtcgtgagcctgctggccccaattctggcggccctgttgaccagccgcatcgccgtgctggagacctcggagcgcatgaacctcacatggctgtcgttcggccagtcggacgcggcccggttcgtgggcaagctcatcgtcgccggcaccggcgtggggctttgcttcctgatcccgttgctgtgggtgccgatcgcggcgaaggcccttggcttcacggtggccggctcgttcgccgcgctggtgtgggtgccggccctgaccggcttcctgtccgcgacggccacgagcgcggtccagctgatgttctcgatgatgatcgacaagcaggccatcggcctgggtctgggcgtcatcgccggcgtgctgggctccggcctgggtgcgatgaacagacccgcgcttggctggctgttcccggccggcctgagttcggccgcgagcccgttcgtcagatccgtggatgcgggcggcaacgccacgatgctgctcgccgcgcgcccgtggatggccgtggcctccgcggccatggcgttcctcggctggacgctggtcagcatggtcgtggtcaaggtgaaggagtcaagacgatgacacacgcaaacgcagtgaacccggcaaccaatccggcaatcaacccggccgccaatccagctgccggcccgagccatgccgcgatgccccgcgcgcatgcggcgggacgccgcaggccgtccgtgtgggcggcgttccgctgggagacgcgcaaggccggcaacctgtggtactggatcgtgaccgtcttgttcgacgcaatcggcatgttcaacgggtggagccagtacaccggctaccaggcggagttcgccaggcagggcgtgacctgggccgcgatctggggtcaggcgatcctcctgccgagcatggtgttcatgccggtgcttgtggccgcgttcgccgcgcaggtcgaagccaacgagcatcgaggccgcaactggcagcggctgaacgccgccggcaccgtgaacgcggcgatcgccggcaagatgctgcacgggctcgcggcttcggcgctgaccgtcctcgtgttcgaggcagagttcatcctcgtcggacgcttcgccgccggattcgacctcgcgcagctcggcccgttcctgctgcgcggtatcccgctgaccctgtcggtatgggcgatcatgacgctcacgcaggccgtgagcgcgaaggccgaatcgttcgcgggcacgatgagcgtgatgatggtcctgaccatcggcggatgcgcgctgagcctggccgccccggccatcgccgggccgtatccgctcgccctgatcaccagcgcctccgccgcccgcgacctcgcgaacatcgccagcacggcatccatgctcgcctccacgaccgccgccgccatctggaccgccatcagcgccctgatcttccaccggctcgccaaacaagccgtctgagcaaccgtccacgggctcccctcacctgcgggagcccgccacctaacaccatggaaaggcttcatcatgcacaccaccagccaacacaacgaacgacacgacgaacaacacaacgcgccacacaacagcgaacagtccatacgcctgccgcgccgcgtcatcgccgtgctgatcgccgccctcgccgcgatcatcctcaccggctgctcgaccggcatcggcgtggccggagacaggaacctccaaggcacacgcacccaagacggcgactcctacacgggcggctacaaggccgactacagcaagttcaccggcgaggaggccgtattcggcggcaccggcaagaaggccagcatccacctgaacggcaccatcacaggcacattcggcaccggcagaatcctcgtgaccaacggcagcgacacgaaacgacccgtgcccgccacgaacggcaaaatcgaccagacctacaacgtcacaggcaccagcttctacatctacgtcaccggcgaccaattcaccggcaccgtgaacctcacatccaaggagcaatgaccatggcaaacacatcccaatacccaaaccagcaaccggcatatacgccggcaccgccggacggcgggcggacatggggcggctgcgccagcctcgcattggccgtccttccccttctgtgcacgctcgtgccccagctgctcggcatccacctctacacgacgggctgggtcaggaacatcctcgtcatcatcgacttcgtatgcctcatcgcttcgctcgtcatcgcgatcgtcacctatcccgaacaggcgggaggacacagaatcgtcagtacaatcgcgatactcctatccgcaggcctgactgccgccggcggcatgctcatcttcctcatgttcatcaaccagtaggaatccgactgacaacggaaaacttctttggaagttcatctaaccgcatacacgccatacagcacaggccacatgcgatacgcttcaacacggatggggcagcacccagggaaggagaatcgcatgaccgcaaaaaccggaaacgacaagcgccacgcggttaccggcctgatcggccacgtggccgcgttctggcggtccagcccggtcgcgcgcatggtcgcgccgatactgtgcctatgctacgacgtgatgatgctcaccagaatcgtattcacccatggcgggggcgattcggcagccatgaaactgttggagcatcaatggggaatccccgtactcgccatcctatgtgccttatctgttgtggcgctgtcgttccgtatcagaatgccgttcgctattttgtgtgccatatgcggattgtatctatgcgcttgcttgattcaagcggagccatatctgatgttgcctctcttgtttgccgtctacacgtctacagccttggccgcgaccgctgaacgtgccattgcgggaatggttttgtcgggattgtcaatcgtttgcggcctctggattgcgaccttccccgccttgcagactgatatacttctgcccgagtccctccttgcgtcgatgaccgctattttagctctttggtcgcgcaacatcagtcagcggcggaagggagcggccttggtggaagctcaacagcaacgaagcctggaattggaacaggaacgcgatgaagaacgtcggcgggcggacgtcgcagccgaactgcatgacagcgtgggccataatctcaccgctatcattgcacttactgaaggcttggagggattgacacaggagccggtggaaagcgctataaagagtatcaataacttagctcggcaaagtctaggtgatacacgcgaggcggtacggaaactttcatctccggtgacgttacggaaaacaaaaacaggaacggtggaactgtgcagctggaatgatataaacccgattcttcaacatgctcgtgatattggaatcgccgccattctgaccgagacaggaaggcgtccagacgatctagcccaagctgatttatgcttccgagtgagtcgtgaggctgtcacaaacacaatgcgccatgggaaaaatataacgcgaattgtggtttcatgggatcatctggataatggggaactccatataacagtgcgtgatgatggtaagccaacgctgaacaaagataaccgcgctaaggggaccggtttcgggcttgctggcctagtgactgaagttacgcgggtcggcgggcaccttcactatggctcatcatcagggcaggggtggactgtttcagccattattccacagcaaaaacgtccatatattcctgtgcaggagggaaacgatgattaacgtaatgatcgtggacgatcagcagccgaccagaatgggtttttcgctcatggtcatgaaagatcctgcgcttcgcatgacgttgcaggcggggaatggacaggatgcccttgatattcttgcggcactgcaattacatgggcagagcctccctgacgtcattcttatggatgttcgcatgcctgttatggatgggctcgatgccacggcaagaatcaaacagttatatccttcaatacgtatcctgattttaaccacatacgatcaggatagctatgcgtttgggggattgagcgccggagcttcgggattcttgcttaaggacgttaagactaaagacctgtgtcgggccattcactcggtgtacgatggagacgccatactcacaccacggattacaaaggaagtgattcgccgaggggttcccaacgtcagcatcaatgctgacattctggccatcagaagtaaattcgattcattgggacctcgcgaattcgaagtctcagcactggtcagcgaaggaatgactaacgctgaaattgctcagcgtctcggaatgcaactggaggcagtcaaaaaggcggttagtaggtctcttgccaagctcgatgtcaaagaacgtgttggtatcgcggtgctctggtataaggccggaatgccgaatctgcagaagtgacagattccgtagaataatgtagggtttctgaatcgtgaagggctcgtagcgggcgaacccgtgacggtccatgactgtcctcgtttgaatggcgatcggcgcgcatcgtggtaccgccgaccggtattttctcacgtgaatgaagtagcttcagggaatgagtaacagaaaagccaccggcgacacgccgatggcttcaggtgagctcctgcgactgggcttgaaccagtgaccgtccgattaacagtcggatgctctgccaactgagctacgcaggaatgtctgctgtgtttgagatttctctcgcgcacaagtcacacatcttacatgcttgccacgaaaaagcaaattac

SEQ ID NO: 877 - DNA, 42195 bp, Unknown
  R14_18m  MAG No. k141_16473
attcgacgaggttgttcgtggacggcactgggccggctgccgcgagcccctcgtcgaggaacatgaacggttggccctcccggatgcgcctgcggatcatgcgccgcgccttgacgagcctttggtgcatgtcgttcacgctgccgcaatcaacgacatggtttgcgtgtacctgacgatgtacaagtggtcggcttcgataacgtgccggaagccgagtactcggcgccggcgctgaccaccattgatccacatatcgacgattatgccaagcatgccgttgacatgcttatcgaccgcatcgaaggatactcaggcccggcccgtacgtacaccaccgatttcacattggtggaacgtgcctcaacgcgacttgcccactagcatccaacaagttcgcatcggcttcgtgaggagtgtgtgtctactcgaacaatgtggcgtcagtcgctgggtagccaagttggaacgcggtgtaggcgtgcttggcggccagtgcggcgaggatgagcagcgtatcgctctcggtggaagatttcgattcggtcacggccttgatctgcgcgcgggcgcagtccatttcgatggcggcggcggtcggtacggtctggccgcttgccttgtcggcgatggtggtggggttggccagtagttggtcgatggcatagaccttttggcgggggtcgctctggccggaagaactggactgtgcgccggaatcatcaaaattgccgttcgccagcgacaccagctgctgcccggcggtcttatgcatatcgctcaacgccaacgtagccccagcggtctgtcctcgtgcggccaagacctcgatagcgaatccggcgcgatcctcggccacggccatcgcatccaataccggtcggtcaacgttggcggacgtgacgccatcaagacgcgccggcgtcacctcaggcgcggactgcccgaatttatcggccagaaaagccagccattgcttggtctgcgcgtcacgtaacgttccctcggcaaaacgacccgaacaatacccggcaacgtcaatccaagtcaggggagcggccaggccggtggcatactgctctaataacggcgtgccttcagccggatgggtggcgtagtccgccaacgtcatcgctttctcgcaagggctcatttgagcttccgcctcggcccgtccggccagtcgcggcatcgaacacgccgaaagcgaacacagcatcgcgctcgcgcatagtgcggatgccaagcgccgggtaaaccgtcctgaagagaagcgtgtctgcatggaaacctacactaatagctaactgtgaccactcataggccatgcgccacataacttcataggaggtacggatcgatggaactggacctgacaggaatacacaagctcgccgccgagcaaggaatcgaccccggaaccctggatgatgcgctggcagaggccctgcgcctcgcctacctcaagactccgcacgccgccaggcacgcgcgtgtggagcttgacgaacgttccggcaacttcaccgtctgggccgccgacgaaatcccggtcgagcccaccgaggacgacccgcaccccgctcccaagctgggcgaggaatacgacgacaccccgcgtgacttcggccgtctcgccgccgccactgcacgccaggtcatcacccagctgttccgccgcgccgaagatgagaaggtattcggcgcgttctccggtcagaagggcaagctcatcaccggcatcatccaacaggatgcttccgacccctccaacgtgcatgtcgcgatgggcgatgtcgaagccattctgcctcgccgtgagcaggtgcccggcgaacgttaccgccacggcgaacgcatccgcgtgtacgtggtgaacgtggcccgtggcatcaagggcccggaaatcgtggtgtcccgctcccacccggagctggtccgcaagctgttcgagcgtgaagtgccggaactggtctccggtgccgtgtccatcatggccatcgctcgtgaggccggcgcccgcaccaagatcgcggtcaaggccaacaccgatggcgtgaacccgaagggtgcgctgatcggccccggcggcgctcgcgtgcgtgccgttatggagaaccttggcccggagaagatcgacatcgtcgactactccgacgatccggccaagttcgtggcagccgcgctgtccccggctgtggccaccggcgtacaggtgatcagcgagaagaacaagaccgccatcgccttcatccacgacgaccagctatccctggccatcggcaaggaaggccagaacgcacgactggcagccaagctgaccggctggaagatcggcatcgaatccgccgaggcccatgccaagaaggtcgccgctgaaaaggccgcccaggctgcggccgaggctgctgctccggaagccgaataggccgccgggctcgaaggcgaatgatcttcagggcgcattatttcctgatacgagccgcgtcagcaatggcgcggctcgctgcgtctacgctatccagcgctatgagtatgcttgattggcgtatgtgggctggtgcagtgtgcgcgaaatcgcccacaccagagacgaggtaacacgatcatggtcgcacgatgagacagggtaggcttgccgtcatcaccaactgaccacgcccatgcacgcgcgtggtcacagaataggagtaattagtggcgaaaccacgcgtatacgaactggctaaggttttgaatgtcgatagcaaaaccgtgcttgagaagcttaaggacatgggagaattcgtcaagtccgcttcttctacgattgaaccgccggtagcccggcgtctgaaggcagagttcgccaaggacaacgccaagggcgattccaagcccgcatcttccgtacaaaagcctgctgccaagcccgtgcagcagcgccgcccggccgcaccttcggccccggcttccacttcatcttccgcaccgactccggccgctcccgcacgtcaggcatcgcccgcctcggcacatcagcaggctccgactccgggcgcaccgacaccgcgtccgcagggcggcgcacgccccggcatgccgacccccggccgccacggtcagcacgacaaccgtgagaatggtcgcgataatcgcgaaggccgcgagaacggtcgtcagagtcgcccgaacgatcgccgtaacaacgatcgtcgtaacaaccagggccgtccgaacaatggccagccggggcagcatcagaacaaccgcgacaatgcttcggctccgcgcccgcacgctcagggcggcgccggtgccaatggcggcaatgccgcttcaaacgcgattccgcgcccgcacgctcagggcccgcgcccgggcaacaacccgttctcccgcaagcagggtatgcacaccccgacgccgggtgatattccgcgtccgcatccgatggctcgtccgactgctgatagcggtcgtggcggtcgtccgggccgtcccggccaaggccaggggcaaggccgcggcttccgtggcggtcgtccgggccaaggtggtcagggcggtcctcgtcccggccagtggggccacaaccgtccgggtcagggcggcggctcccagggtgccggtcagggcggcgcacgcggcggcttccgtgggggccaaggcggcggcaataacttccagggcggcggcgcaccgagcaacggtcccgcacgtggcggcggtcgcggcggtcgcggcggtgccgcaggtgcattcggacgtcagggcggtaagtcctcgaaggcccgtaagaaccgcctggcaaagcgccatgagtatgaggagctgaaggcaccgaccatcggcggcgttcgcatccccaacggcaacggtcagaccatccgtctgcgtcagggcgcttccctggccgatctggcggagaagatcaacgtcaaccaggccgcgctggtcaccgtgctcttccacctgggtcagatggctaccgccacccagtccttggatgaggagaccttccagattctgggcgaagagatcggctggaacatccagctcgtctccgcagaagaggaagacaaggaactgctccagcagttcgacatcaaccttgacgaggaagaactgcaggatgacgaggatctcaagcctcgcccgccggtcgtcaccgtcatgggccacgtcgaccacggtaagacacgactgctggataccatccgcaagaccaacgtcatcgcacgtgaggccggcggcattacccagcgcatcggtgcctaccaggtcaccgtgaaccttgaaggcgaaccgcgcaagatcaccttcctcgatacccctggccacgaggcgttcaccgccatgcgtgcccgtggtgccgagctcaccgacgtcgcgatcctcgtggtcgccgccgacgatggtgtgatgccccagaccgttgaggccatcaaccacgctcaggccgccaaggtgccgatcgtcgtggccgtcaacaagatcgatgtgcccggtgccaacccggagaaggtccgcggccagctcaccgagttcggcctggtccctgaagagtatggtggcgacaccatgttcgtcgacatctccgccaagcagaacctgcacgtcgacaagctgctcgaagccgtgctgctcacggctgacgctgagctggacctccgcgccaaccccgacatggacgcccgtggtgccaccgtcgaagcccgactcgacaagggtcgtggtgccgtggccaccgtgctggttcagcagggtacgctccacgtgggcgatgccatcgtggccggcacttcgtacggccgcgtgcgtgccatgctcgacgagaacggtcagccgatggaagcggccggtccgtccacacctgttcaggtgctgggcttgacctccgtgccgaccgccggtgacctcttcctggtcgcctccgatgatcgtgccgctcgccagatcgccgagaagcgtcaggccaccgagcgtgccgcccagttggccaagcgtcgcaaggtcgtctccctcgaggacttcaagaagaagttcgccgagtccgagatcgacatgctcaatattgtcatcaagggcgattcgtccggttcggtcgaggcgctcgaggattccttgatgaagatcgaggtatccgacgaggtcggcatccaggtcatccaccgcggcgtcggtgcaatcacccagaatgatgtcaacctggccacggtcgacaaggccgtcatcatcggcttcaacgtacgcccgaaccgtcaggtggcggacctcgccgagcgcgagggcgtggagatcaagtactactcggtcatctaccgtgcgatcgaagacatcgaggcatccctcaagggcatgctcaagccggaatacgaagaggtcgtcacctctcactccgagatccgcgagattttccgctcctccaagttcggcaacatcgccggcgtcatggtgcaggacggcgaggtcaagcgtggtacgaagtgccgtatcctgcgcaacggcgtggccacggtcaacgacctcgagatctcctcgctgcgtcgcttcaaggacgacgttcagtccgtcaaggaaggctacgaggctggtatcaacctcggcaccttcaacgacattgaactcggcgacatcatcgagaccttcgagatgcaggaagtcgagcgcaagtagtcattgttaagccctctctgacgagtgggctgtcagccgcaggctgactgggggagagacatggtagttccatgaattttctctcccccagcctcactgcgttcggcagcccctcgtcagagggggctcaagtctagaaaaggaaattcctatggcaggaaccaacccgcgcgccgcacgtattgcggccttgattcagcgtgtcgtcgcctcctccattgagcgcgaactgcatgacaagcgactcgccagcatcaccgtcaccgaagttcgtgtgaccaacgatctgcagatcgccaaggtctactggacccagctcggccacgaaggccacgaggaaggcgaacgcaagcgcgcccagcaggcgctcgatcaggccaagggtcacctgcgttctctggtgggccacaaggctggcctgcgcctgactccgcagctccaattcgtgttcgatgaagtgcccggcgaggctcacgagatcgaagacattctcgccgtggccaagaagcgtgacgaagaactcgcccgcgcccgcgccaccgcccagtacgccggcgacgccgatccgtacaagcacgacgacgaggccgaagccgagggcgatgagttcgagtccgacgaggagtagtgtgcttcatacaacacccagcggcctactcatcatcgacaagccgcaaggcgtgaccagtttcgacgccgtcgccgccgtgcgcggcgcgttgcacatcaagaaggtcggtcacgccggcacccttgaccccatggccactggcacgctggtcatcgccttcggccacgccacgcgactgctcaacgccatcgtggcgcatgacaaaacctacgaggccaccatacgcctcggcctgcgcaccactaccgacgatgccgaaggcgaggcgcttgtcgatgatgaagcccgctcccgctggcaaacgctgtcagcgcagctgactgagggcggccagagcggcgaaccaacggcgtcaccaactgcctcatggcaaaacctgctcactcgcaccatcgccaccaatttcaccggcgatatcgaacaagtacccaatacgttctccgccatcaaaatcaacggccagcgtgcctacgacttggctcgcgaaggcaaggatgtggaactcaagccccgcctggtgaccatcagcgaattcaccgtgctggatatccgcagcggattcgtagcaggggagcaggccgctgaaccattgcgggaagacgcgaacacgggaacgattcccgcacttgatattgacgtgcgggtcagctgttcatcgggcacctatatccgcgcgctcgcccgcgacctcggcaatgaacttggcgtcggcggatacctgacccgtttgcgccgtacgcgagtcggccgattcgcgttgccggacgataccagcggacttatcgcctctgaggcgatgcttgacacgcgaacccataccgtcaccgcacataccgatcagaagacgttcactaatcgggaagggcaaaccgtcacgcgcaacaagtgcgtattgaacactcctgaaggccttgccggtgacgagcgccgcaactggctgcttgaccatgccctcaccatggaacaggccgctcgaggcgcgatgccggcgcttgacatcacacctgaggaagccagcgaattgcgcttcggccgccgtatcgagcgtacaatcagcgagcccactgccgccattgtgccgcaaacgcatgatgtggcggcgattatcgagcgtgccaacgctcatcaggccaagccggtcaccgtattccccctcgcgtaaagtagacgcggtgaaaagtgcagcttgatacaggccgcgcacaacaacgcctatattgcatgaataacatcgcacggataaaaggaacagcacactgatggatatcacgcacctgacccctgacgccgaaggttcgattgaatggccctcgttcagtaacgacaagaaggccgtggtgacattgggcgcatttgatggcatgcacttgggacatcaggcggtgatcaagcgtgtggtggaactcgcgcaccagcatgatgctttttccgtggtgattctgtttgacccgcgccccgcattcgtgcacggctgggccgcctcgcaccatggcgaggaacccgcggtgcagaacgtggatgccgaagccttgaccagtgtggatgatcgactgcaccgcatggaacagttcggcgtggaccatgtgttggtggtgcactacacgctggccttcgcagccatgtcatacattttcttccttggcagactcaccggcaagctgggcatgcgtacgctggtcctcgggcaggatgccgccatgggcaaggggcgagaaggtgatgtgaagcatatcgccaatcttgccgccgccaccggtgtattcgaacttgatgtggtcgatgaccgtggcccgggtgaagtgcgcattccgcgcgatttcaagccggaagccccgagcgaatggggagagcccgtcgacccgctggccaatgccaccaaggccgagcgccgcgcatggagcaagaagaaccaggccaaggcaatgcgcgcctggagctccaccaatgtgcgctacctgctggctcatggccgaatccaggatgccaacgccattctgggtgctccgcacgccatcgaaggcgaagtggtacacggtgaggagcgcggccgcaccatcggatttcccaccgccaatcttggctccgacattgcaggctacattccggtcgacggcgtctatgccggttggctggtagatggtgagaaccgctggcctgccgccatctccattggcaccaaacccaccttcagcgagaaaacaggactcaacgaacgcgtggtggaggcctattgcatcaccgatgagtggattgatctgtacgaccataaggttcgcgttgaattcgtcggtttcctgcgcccgcaggtcaagtttgatggtcccgaccaactcgttgacgaactcaagcgcaacgtcgaagagaccaagcgtcttaccgcctgaggcatatctcagggctatttacgcactcccaaggcatctaaggcgtcggacaatgtgttggactccaccagccgaagtccctcgacatgcaccggcttgcgcagcggaggaatgactgccgttgtaaagccaaggcgcgcggcctcgcgaaggcgatattccatacgcggtaccgggcgcacctgaccggtcagggaaatctcgccaatggcgcacgtggctcgcgcaatgggttttgacgtggcggcgctcgccagtgccgccactatcgccaaatcggaaccgggctccttggcctggcccccggcaatagtggagatatacaggtcgttggacagcaggttgagcttgctgtgacggtagagcaccgcgaccagcatggcgatacggctggggtccacgccattgaccgcacgtcgaggtgtgggcagcaccgacgtggtgaccagagcctgtacttcgataggcagactgcgatgcccatccaatgtgaacgtcacacaggtgccttccatgggtgccgcgttggccgcatcagggccgtctccagacaggaacaatccggcgggatcggtgacctcttcgatgccctcaccgctcatgtcgaaacagccgacttcatcggtcggaccaaaacgattcttcaccgctcgcaacattctcagcgcggtctcgctgtcgccttcgaattggcagaccacatcgaccagatgctccaatgtgcgcgggcctgcaatcgaaccgtccttggtcacatgaccaaccagaaataccggaatgtcaagcgtcttagcggtatctatcagcgcgcttgccacttcgcgcacctgagtcgaaccgccggaaatgccatcgacctcctgcgagacgatggtctgcgccgaatccacaatggccaaggccggcttgttctgttcgatcagccccaatactgtggacagatcggtggtggaggccagtaacaagttcggctccaccgcgttgatgcgggaagcgcgcaaacgaacctgcgcctgtgattcctcgccggaaatgtacagcacggtattggcatgtaccgacggtgcgttgccctgtactgacaccgtgtttgatgtgccgccctgcgcccggcccgactgttgggcagaccgctgaccggctcctcggaatgtactgtctcccgccacaacgcgcgcgatattgccggccgtctgcaacagcaatgtcgacttgccgatacccggttcgcccgctatcagcgtcactgaacccggcaccacgccaccgccgagcacacggtcgaattcggaaaacccggtaccgagccgctcgacgctttccgtgcccacttcggtaatcggacgggctgcagatctggcgttgtcggcaaccgtaaccgactgcgtgcgtgatgttcggccgggagcggccgtgcgagagcctgccgccggccgagcctcgtgaaattcctcgaccgtgccccactgaccacactcggggcaacggccgtaccacttcggcccgttccaaccgcattcggaacatacatactgcacacttgatttcgccatggtctcaccctaacccaaacaccagcggacggtaaatttttaccgttcacaagagtttcacgcggcttgcgcacaacgactaagattacggccgtctagcgtcacgcggctgtgagagaatcggggtatgactaatagtgagaactcctcgaccacacaatcccatggcaagttgattgcagtggtggttgccgcagctgttgtgattatcctggcagtgctttcggcctttgtgtggccgggttgggccatccagaagaatgatggcacctccactaccacccaaaacagccagcagaaaaccgaatcatccgagccgatcaagccgaccatcgacgccacagctttgccggatgatgccagtgagctgttgaaggccatgccggacagcgtgctgaattacgcgcgtaccaaggcggatgcctccacgacgtggaattccgcatcgccgctcgaggagtacactctgacctactccactggtgatgccgccaaggatgtcacgctggtcgccgcgcagtggtcgtcggcggacaatgccaagacccagtacgatgcgttggtcgctgcgcagaccggcgatgagtcggcatccggcaacgtcaaggtttccggcaacgtcacgggcgcgtacgtggtgaaggccgatgcctccaacagcaagaacgccgctgccatctggcagaacgataccgtggtcttccaagctaccggcaccaaggaagcggtcgatcgcttctaccagaagttcccgatgtagtatctagtatcggctgtcagctgctgcacaaacttatgaacgttggggcatccacattgctgatgtggatgccccaactgcgttcagggcatatgcggactatcgacaacatactggtttcctctgtctggcaacacgtgtattatggtgcaagttgcaacttttacgattaatcgaaatggaggcttcagatgggttctgtcatcaagaagcgccgcaagcggatgagcaagaagaagcaccgcaaactgctgcgtaagacccgccaccagcgtaagtagtcttacctgcaatcaaggcattagaaaccccgtgatcgttatggtcgcggggtttctctttttggctcctttgccttgttcgggcaacagtaaagcccgcacctgcgatgtacagatgcgggcttggaaaagttcagtgatgtgagacgatcacttgttggcgttggtcaacacgcgcgggccgttcgggtcgccgacgatgaccttgtcgaccatgttgaggaacaggccgtgctccaccacgccgaccgtgttgatgaggtcttcggccagctcctgcgggtgatcgatgcgctccaggtgcaggtccaccacgaagttgttctcgtcggtgcgcacttccttgccatcggcgtcaagacgaagcaccggcttgtagccgcggtcctcgaacttcttgatgacgtggccagcgccgaacggaatgacctcgaccggcagcgggaacttgccgatggtgtccacaaccttggactcgtccacaatccacacgatctggttggagttggtggccacgatcttctcccacagcagagcagcgccaccgcccttgataccgttgaagttcttgtcgacttcgtcggcgccgtcaatggtcacgtcgatgtggtccacgtcgtcgatgtccacgatcttgatgccgtagctttcagcctggacctgcgtgcggcgagacgtggttacgccagtgaactcaagaccttcctcctgatgacggcggccgagctcgtccaccaggaacttcacggtcgaaccagtgccgaggcctgcgatcatgccgttttcaacgagcttggcggcttcgatgccggccgccttcttcagcgcatcctgctgtgccttatccatggtttctcctttgccatccttgcctccgccgcatggatcaacggcgtgaagccttatctcctatcctaacgcgaatgagcgattttgtgtcatcgtgtccgattgcggtacatattcgtgtgtttgggtgttagtgtcgtacgaatggtgcgttggcgatggtcaggttgccgtcgccgtccacatagccttcgatttcgatgctgcctttgatcggcatcggctgcccgttgaaatacgggctcgttttcggcgcgggggagaaggtcagcgtaccggataccgtcagtccgcttggctttgcggggtgtacggggtgcgctgattgtacaggttgcgctgattgtgtcgctaagggtgacgaagacttggtctctggccttgtggcatccgtcgaatccgtcgccgcagccggcttgcgcaaacttgccgcatccgccttgccatccagcaccaactgcacgtctggaggcacatcggtgccatgtgcgtattcggagcccagtagcgactgccagccttcaatcggcagatagccgtcgcgcgcacccgaacggcaatcgcccgcataggtgcgtgccagttcatcgaccaactcattgccctcgttgccggcgtgacctttgacccatcggaaatccaccgggccagggcgttgtgagatctcacggtcgatcgcctgaataagctctttgttcttcacaggctttttctgcgaatttttccagccgttcttcttccagcctttgacccacttggtcgagcaattgatggcgtactgcgaatccgattcgatgagcaatggctcagggcccgggtgcgctcgcaaagcttccagcactgcgcacagctcaccaatctgattggtgccgttggtcgcgccgcccgcatcataaccatggtcgtcgtgcttatggccgggcttgccgccggcgttctgctcatgatcggcccaggcccagcccattggcccgtttggattccctaatgcggacccatctgtggatactgtgatagtcatgttctccaccctaacgcaagttgtgcaatctcttgctgaagtggggttgcccagtgcgaggcaaaacaacgtagtgaagagtgtgaataacatcacacctattgactttgcttgaaaaacatgccatcgcgcgtgaataggtgagcgctcacaagaaaaacaagacatttcctctctgcgggtgaggccggcaacaatggcgcatccggtatctggaatgagaataagggactgtacaaaaccagtgacggcaacatcgaaatcctcaaaccagaggcggacagcgatggttcgacggccacggccgcatccaagggcaccatgcttatcgcaggcaactccaaaaccgtggcactcggtccaggcggcatggccttggctcccggcctgccgctcggtcttggctggttcatccgacgccgcttgggattggatgcctccgacattctggaccgtaagctcggcttgaagtaacggctggttcggacgtgattgctgtcacgtacggatcatgacgacagcgcgaaggtcctcatcggtttacgtcgatgaggaccttcgcgcgcattaggggagtctgttgcgggctgcgctacgcgggtcatgctgcgcgggcgtgctatgcggacaaactacgcgaacaagtcgttcagtgcctcggcaatcgtcggatgcgtgaacaccatatcgcgcaacgtgctggccggcgcgtcaagatccatcgccaacttgacgatattgatcacctcgtgcgactcgacggaaagcagcatcgcacccagaatgcggccagtattgcgttccacaatcgccttcatcagaccatccggtcgccgcattacctgggccttcggcacagcggccaccggcaatcgcttgaccacataatccaatccagccgccttcgcctcgcgctcattcaatcccacgcgcgagtaaggcgtggcgaggaatgtgctcgacggcacatgcttgcggtccttcaccgtgtacggacggtcggaaccattgagctgcgaccacaccacgcgatagtcatccagcgaaatgtacgtgtgctgcgggccgccgttcacatcgcccagagcccaaatgtcggctgctgtggtgcgcagaagctcgtcgactttcacggcaccgcgttcggtgagctccacgccagctgcctcaagatgcagtccctcgacgttcggcgtacgtccggtggccaccagtaccgcgtcggtggtcaggcagaatcgggcttcagccggctcggcgaaccgcggctcgccatcgtctgatggtttcgtttgaacgtgtgacatcgtggcgtgatcggtcgggttgctagtggggctggtggttgttgtagtgtcggtggcgccggtggcgtcggtggcaccggtgatatcggtatgagcgttcccggtgccggcgggggtggaatcgcaagcttgcgatgcgccgcgagccatacccttcaccgcaacggacaacctgacgccgccgtcagcagcaggcgcgatggccttggtatccgcgttgaacaggaacttgacgccctgcgcttccaactgtgcgcgaatcgcggccgccacatccgcatcctcgcgcggcaggaactcggcattgtgctgcagcacggtaaccgccgtgccgaaatcggcaaacatcgaggcaaactcaagtccaatgaatcctgaaccgataatcaccagtcgctgcggcatatcgtcgagatccatcagtccagtgctggtgtagacgccgggcgtagtgtggataccgggaatatccggaatgcgcggcgtggcaccggtattgatgaagatcttgctggcggtcacggcgaccgggccctcagcggtggcgatttccacgctatgagggccggtgaagtgagcgcggccggtgattacggtgatgttgtcttggtcggcgagcttgtgatagttcttgtcgcgcagcatcgaagtgacgcggcgcttctccttgatagcagcctcgaacgctgcttcgcgggtttcgggagtactgttcgcgccatcccgccgcgcctgttcggcggacaaaatcagtgacttggacggcaagcatccgatattgatgcaggtgccgccgtacatgtcggcgcttgcctcggcgacgacgaccttgcggccggctgcactgagcttggcagccaaggttttgccgcccttgccgaatccaatgatcagggcgtcggtggtgatagtgggggaggtgctgggtgtgctgatggcattgggtgtgctgatggacatggttacttccttacgtattcgagtgataagagtgcgttgtgctgatgtgttgtgtgccgtgcggcgtctgttttcttctttgactgccgaagcgttatcgactgatgctggctaggggaaacgcgcgggattattagcctttgcgctcgctgaatatctgttcggtgatgtcgtggatggtggtgtgttcgagttgttcgaggcaagtgcggttgagcccggcatagatgtcgttcatcactgcgcccattgaagatgacaccagacagtcctcgtgtacgtcgcccggtgtccagttcactttcacaaaagtggtgccggtggcttccgctaccgcgcgcaaagtgatttcggcggcgggccgggccagagcgtacccgccttcagcaccctctttagtggcgatgagtccggctgaggcgagcggtcgcattactttgcgcacgcgcgccgcattggtgcatatgttctcggccaggatctgactgggcaggtgtgtggcgcgatggtcaaggtagaccaatgcgtgcactgccagtgaatggtcgccgttcatgaaacgacctccttaccgagtcgatactgtaactatgatgtgtacagttatgatactgtaatcatatcagatacagttagtgtgtcaaatcggggttgaagaggtggatgactatgtgtataagtgaggtgtccacatggttatccacaatgaatgtgcgtaagtgaagctaggaccacatacctcggatcggcttccgtttccgcacccactacccatatggtggtgtcatgaacaggatgaccgacggcatcaccaactatggagctctgccaggctctatatacgatcagcctccggaagaatcggaggcagtttttgttccgcccgaatttgcggggtcattttctactgactcgaaatacccgacttctcgcgactcgtcatcgccgaacagtggtgcacatgattctgcagcgacaccgaccatgagcgaaagcctcgcccagcgcagacgcgacatggtcgcacgctgcaccgaggaagcgaaacgggcgggcaagaagctgcttttcggcatgaccacttccctcgctctgcaatccgtaccgattcccgccgattgcgacctcgactcggccaagctgcacactgtatccagcgttaagagcaggcggtttcgtacacgccatgcaccactgcaaacgcatatttggaaacatgcggctaaagccgccaatgtggaaatgaaccaacacgtgtttgcgctggacctgtttcacgtatgggcccaacttgccccgtatgtttcttttgagtccctgattgtgctcggggatgccgtcatcgctgctacgagcaaacagccagtattggccaaggatcgtgatgctgctgcaatctatcaggatctggtgaagttcgtggagcaatttacccgattcagagggcgcccgtcctgcgttcgagcattgcctctgatatcacctggtgctgattcgcccaaagaatcagaagaacgactctctctggtagcgcatgggattccacagccggttgcgaactatgtggtgccggatgcggcttttgcatctggagctcccataacgttggacttagcgtggccggagttcaaggtcgctgttgaatatgatggcgatcatcatcgtacgagtaaggctcaatggcgccgtgaccaagagaaaaggggtgtgctggtcgggcggagatggctggtcttcgtcgccacggcggcaagtatcgctaacgaggacgctcgtgctgaattcgctttcaacgtggcgagggcgcttgcttcgcgcggtgccgtattcgagtttcatgtagttgccatgtctcttgaagagttggcgcagagcctgctgtgaccatgatgttcgaaacggactgatgtaaaggcaatatttgtacgacctgttgttgtggtgtgtgcttgatattgcatgccgttcgattgcgatgcctcgtagtgatggatttcgtgaatgactagtgttcgattgtggagggaaatgtgtcatagtggtcgattgggggtgttgtcggtgcattgagcgtggatttgcgccaatgggtgtgggacgctacgcatgttttgccgatttttgcgtggcgtcccacggcccctcgggtaatggctgtgacgggtgtggcaggaatggcgtctttccggggtttccagtttgagtgtgtgggatgggggaaatgtaaaacgattgacttagctgttgtcccacgcttttgtgggatggcagctctggaatgggcaaattcgtcgtggcgtcccacaacgatgttaaaactcgaccatgatgcaagccgaccgaacgcttcggcggtcatctggccgctgtgaccccacaatgatgatgggaaactcggtcataatgtaggtagtcgaacgtttcgcggtcatctggccgtcctgccctgcagtgatgttgagaaaatgcagtcacggtgcatgaggagaaccgttgacctgcgtgtttcagtggtcgcgaactgcatatgcgctaaaaaaagctctgcaatggattgcatgaatccaatgcagagccttattggttgctgtgaacgcgactaacgcagcgatttcactcgctcagggccttgtcgaccacgacggtggcctcgtcgagtaccttgtccagagcctcgggggagacgaaggactcggcgtacaccttgtagatgttctcggtgccggaggggcgggcggcgaaccagttgtccttggtggtgaccttcagaccgccgatcttggcgtggttgcccggtgcctcggtcagcttggcggtgatgtcttcgccagccagggtggaggcggtcacgtcgtcgccggacagtgccgcgaacttggccttctgctccagtgtggtcggggtgtcgacgcgcttgtaccaagactcgccgaagcgctcgacctgctcctggtgaagctgggccgggttcttgccggtcttggcagtgatctcggcggccagcaggtcggggatcagaccatccttatcggtggtccacacgcggccatccttgcgcaggaagctcatgccggagctctcctcgccgccgaaggcgacttcgccgctgaacagcgggtccacgaaccacttgaagcccaccggcacttcgatgaccttcgcgttgatcgatgcggccacgcggtcgatcagggaagaggagaccagcgtcttgcccacggctgcgccctcaggccagcccggacggttgccgccgaacaggtactccacgcacacggcgatgtagtggttcgggttcatcacgccccagttcgggcagacgatgccgtgacggtcggcgtccgggtcggtgccgccgaccagatcgtacttgtcccaggcgccggcgttgagctcgtcgaccaggcccttcatggcgtacggggaagacgggtccatgcgaatcttgccgtcgtggtcgatggtcatgaagcgccaggtcgggtcgacctcaggacgcaccacgccgatgttcaggccgtacttctcgttgatgagcggccagtagttcacggaagcgccgccgagcggatcgatgcccagacgcacgccggagttgcggatcacgtcgaagtcgatgacgttctccaggtcgtccacgtagtgctcgcggaagtcgaagccctcgacgtactcggacttgatggcctcctcgtagggcacacgcttgatggacttgaagtcgccgagcagctcgttggcgcgagcggcgatggcgttggtggtctcggccggggccgggccgccggtgacggggtcgtacttaaagccaccgtcggtgggcgggttgtgggacggcgtgacgacgatgccgtcggcgagaccctcgccctcgaagcgctgggtgccgtcgaccgcacggttgtgggtcaggatggcctgggagaccaccggggtgggcacgaagtcgtcacgggagtcgacgcgcacgtgcacgccgttggcgacgagcacctcgatggcggtcttcttggccgggccggacagcgcgtgggtgtcggagccgaggtacagcgggccggtgacgccggccttcttgcggtattcggcgatggcctgggagatggcgatgatgtgggcctcgttgaacgaggtcttcagggacgatccgcggtgaccggaggtgccgaagatgacacgctgctcggggacttcgggatcggggacgaggtcatagtacttgccgataacctcatcgacattaatcagatctgctggggtggcgggctgacccgcattgtttgctaccatgttccctattctgccacgtttttcgccactttgggtactcttatgttaagagttgtcaacttttgtgcgaatcgtgtgccggttgtctagcgcttggtcatttccttctcgatttcctccagcgacttgcccttggtctcgggcaccaagcgcagcacgaacgggatggacagggccgagaacacgccgaaaatcgcgaacgggccgcccacattgttgccgaacgcatcgagcagcacgaggaagaactgggagacgatgaagttgcccagccagttcgccgccgagccgaaggatgagccgatgccgcgcacgctcagcgggaagatctcgccgataagcacccaggcgatcgggccccacgagaccgcaaagccgaggatatagaaagcgatgagaatcatcgtcggcactgccagcacggccacgtcgcccacgaagttcatcacggcgagcaccgcgagcgaaacggtcatcacggtggaaccgaagatcagcatgcccttgcgcgggaaacgatccatgataagcgtggccacgatggtgctcacgaagttcaccacgccgatgcccaccgacacccagatcgcgtcgccttcagggaagccgaagcccttgatgaacacctgcggcaggaagtagatcaccgagttgatgcccacgagctgctggaacagcatgataccgatggcggccaccagcgccggacgagcgatacggaacagttcgcgcacaccacccttggtgtcctgtgcggccacggccttgatttcgtccagctcaatctgcacctgggtctgatccacgtccttgcgaatcagcgtaagcactttgaaggcgttgcgggtgtcgcccttgttcaccagataacgcggggattcgggcagcaacaggccgccgagcagcaacaaggcggccggcaccagcgccgaaccgagcatccagcgccagtcgcggatgccgaagaggttgtggttcaggaatccgaggttggaggcgtaggccagcagaatgccgaaggtgaccatgagctggaacagcgtggacagtgagccgcgacgctccttcggcgccagttcggccaagtacgccggggtcagggcggaggccgcgccgaccgcgaggcccaggatgatgcgggcgcacaccatcatcgcgaatccggtggaggaggcgcacaggcctgagccgagcaggaacagcagcgcggagacgatgagcagcttcttgcggccgaaccggtcagacagtgcgccgatcgacagcgcgcctgcgcacgagccgatcagcaccgaggaggtgatgaagccggtctgagagacgctcaggccgaagtccgattcgataagcggggaggcgccggagatgatgccggtgtcgaaaccgaacagcatgccgccgagcgcgccgaaggtgaagatgaatgcgctgttgagcgggaagcgcgtggagaagccgtgcgattcggcggcttcgaggtcctcgattgcgttggctgccgcgtttgtggccgcgcccgccactccggccacgccggtttcgatggtttcgattgcggtggccgccgcaccggttgcgctggtttcctgcgccgcggatgccgtctgtttcgatacgggtgatgccgttgtcgtcgtcattgccttgtcctttcgccgttgacggaccgcgcctgttgcgtggcccctctgccgcgtgcaaggtcaggcttcgattgtctgaagtcgcccgaaaacaaaaaaagacctggaacaacgtggaattcgcatattacgatacgcaaattccacgtcgctccaggtcttgcctcgttttgagtaacaaccctgctacgcaacgtgtgtgaaagatagaatacgacttccgcagtcgcgacactccgaatcggcagcaaaaaacgatgatttttgacaacgattgcaggattctgcatggtggaatgatgtcggaatgggcgctgcggcaaatacggagaacgggtgtggcgaagcatcatcgcggaacattatggcgggacaccatcgcggagcaccgtagcgcatagttgccgtttcgcgatgctttgccggcattgccgtgcttttggggcacccagcgccgataatggaacacagtggcatacggcagcaaggaggaaccgtggcgaacgcatcgaacgcaacgcctgcagtgattgcggcgcgcatcgtcgatgccgtcggcggccccgcgaacattaccagcctgacccattgcgccacgcgactgcacttcgaactggccgatgccggccatgtcaaccagcacggtcttgaatccatccccggagtcctcggtgcattcccgcgagccggcaatcgttatcaggtcatcatcggcggagcggtcgcctcggtgtacgagcagatcgttcggctgcggacggcgcgattgatgccggcagcgcaattgccatcggcagtgatgcagtcagcgtcgcagtcaacgcaacccactcagtcaatgcagcccactcagtcaatgcagcccactcagccagcgcagcccgcgcagtcagcgcaatccacacagcccacgcaacccgcgcagtccgcgccgtacctttccgacgatgccgcaccatcgcgcgatactgccaccgacgccgaacaaagttgcggcccatccaatacatcccgtcacttcacgcctcgtaccgtccgcgagtggggcagtgccgcccgcgcttgggctgccgcgtttttcgactacctgtctgactcgttccgcccgattctgggtgtactgctcggtgcctcgctggtcatcgccatcgtcaacgtgatcgttgcactcggcatcgtgcctgacggcgagacctccgccggctggatactactcaaggcgatttgggagggtgtgttcaccgttctgccgattatgatcgcctacaatgcggccaagaaactggacgtcgacccctggctcggcggcgcgattatggccgcgctgatgaccccgcagtttactggcgtgatgtccggaatgtccggaatgtccgggacgtccgtatccagcgccctctccggggcgattcaatgctcggccaacgccgtattcggcgccgaaacctgcaccgtgtcggcgttcggcataccgattcaactcaacgactacggcggcaacgtcttcgtgccgttgctcatggctgccgtgctcgccgtggtctaccacgggttgaagcgcgtcattcccgacagcgtacagctggtgttcgtgccattcctctcactggtcgtcgtttttgcgctcaccatactggtcatcgggcctctgggaatatggctcggcggtgggctgggagcggccacagcatggcttaacgcgcacgtgccgttcctattcgcgctcatcatcccgatgctctacccgtttctcgtgccgctcggtctgcactggccgttgaatgccctgatgctgatgaacattcaggcgctcggctacgatttcgtccaaggtccgatgggtgtatggaactttgcctgcttcggtgccaccgctggcgtgctcgtgctggccgtacgcggcaaggattcggccatgcggcagaccgcggtgggggcgttgctcgcgggattgctgggtggcgtttcggaactgagcctgtacggcatccatctgcatcaccgccgcgtctaccgctggctgctcgccggctgcgcggccggcggcgtgaccagcgcggtgcttggctggctgttcccgtccgtgctgccatccggtcagatggtccggggcgtcacgaccacggcgttcgccttctcctcgttgctgacgattccggtgtttgacagaatgtgggtgtacgcgctgtccatcgccgttgcgtttgtaatggcgatggtgctgacggtgctgttcgggtaccgtacgccgccgcgcgccacggaggcgcagatggtctcggcgggcgagaacgtacgctcgcaggatgcggtgagagggattggcgcgacatcgtcggatgcggagtctgcggaagattccccatcgcggcctgcctccgatcggactcctgactccaacgccatcctgtcgccggtcgccggccggttgatgaatctggaagcgactggcgatccggtgttcgcctcccgcgcgctgggggagggtgtaggcgtcgtgccggagacggccggcgagacggccgtgctagcaccggtcagtggcacgctgaaaaccgtggcccggaccggccatgccttcggcattaaaaccgatgacggcatcgaagtgctggttcatgtcggcattgacaccgtcaatatggatggcgagggattcgtcgtggccgtgggcaaaggcgagcggatcgcggcgggagagccactggccaccgtggatttcggcaaagtcgcggcggccgggcacagcgttgtggtggtggtgacggtggtcaacgccgctgaactgaccgtggtcacgccgttgatcggcgacggtagcagcgacgacaacggcggcgactgcaaaaccgtatcagccggcagcccgatcatcgatgtggaacaatgacgttgcgaaaggatgccatggaaatactgcgagtgttcaacaacaacgtcgtgctcgccaaaggcggcgacggcggtgaggtgattctcaccggccgcggactggggttccaggccaagccggggcagacggtcgacgagtcgaaagttgtgcgcaccttcgtgccatcggacgggcgcgaccctgaccatctggcgcagatgctggcggacattccgcccgaaatcatccgcgtggtcgtcgaatccatgcaggagaccggactgggggagcgcgagaccggcagcaccacgctggtcatggccctgtcggatcacgtggcgaatgcggtggagcgggtgcggcgcggcatcgacatcacctacccgctgctcggcgaggtgagcaacctgtacccgcaggaatacgcgcaggggcgtgcgatgctcgcatcgctcaatgcacggctcgacgtcacgctgccggacggcgaggccaccgcgcttgccatgcatctggtcaacgccggcttcgccaccggcgacctgtcctatacgtacacgatgacgggcgtgatccagcaactgcttgacatcatcgaccacagctacggcatcacgttggaccgcagttccgtgaacgtgggccggttcatcacccacctgcgctacctgttcgtacgcatccaccagcaccagcaactgacggacgagccggcaccggtgatgaaggtgattcgtgagtcctaccccgctgcgctgcgatgcgcgcgaaccatcgcctccctgctcgaactgcgcctcgacacggatatcagcgacgacgaaatcgcttatttggcgatgcatgtcgcccgagtcaccggccacgcatcgtagtaacggattagcggattggcgaatcagcgaatcggctcgagtgtaccggtcatttcggcgaaattcgaggtggcatttgaagcagcggcctgcgcggtcttttccagcgcggaggcgtcgggcacgcgcacgatcagcgcgcggtgatccaccgagaaacggatgtggcgggtttccggcagcatgtcaccgtccacctgcgctttggccggcttttccaatgtgatttcggcactgacaccctggacctgttcgatggtcgagttcgtggacagcgggttctgttcgggcttgccgatgatcgtctggtgcaccacgtcgccgaacaggttggcccagccgaggatgccgccggtggtgtcgatgatttcgaagtccagcagaccatcgtcataggatgccgccggcatcagcgagaacatgggaatctggccgcagttgccggccatcaccgtgcggaaatcgagattcttgatggtgtgggtcgagccgtcggcgctggtgactgtcagcgtgccgcggaacttcggcgcgaacaggttcttcacgccgcccacgaagtaggcgagccagctgatgttcgccttgagctcggggttggtgtcgtcgatcatggccgcatcgaagccgatgccggcgatgatgaggaaggcgtggccgtggtcgtcctccgggtggtcgagcagggtgagacggcccatgtccaccaggcgggagccgtgggaggtggccacggtcagcgcggcgtcgatatcgtccacgggaacgcccatattgcgggcaaacaggttgccggtgccgatggggatgatgcccagcgcatggccggtgccggagacggcgctcgccaccgtgcgcaccgtgccgtcgccgccgaccgcgatcaccacgtcggcgccgtcctccagcgcctcaagcgcgcagaccctgccgtccttgtcaagctgggtgtcgtagaagcggatgcgattgagccccttggcctcgcagaacctctggatatgcagccggcgggcttcggcctgcggtttggacggattcacgatgaaggcgtactgcacctcgtcgtcccggcgcttctccagcgtctgagccagcttgcggcggcgctgcgcgcgcagggcgatgacgatgacggcgatgagcaccaccacaatggcgattgcggcgatgatcagaaacacggtgagggcaggctgaggcatggctcctattgttatcggtggggaggtcgtttgcggccatggtgcgccgtacgtgaacatttcctgcacgcaacagccccgtggggcgcgattatggttcaatcgcgtctcatctgacgaaattggccgggtggacccgtccgcggactttcccgggcttccctgtgatttccgcgtgactcccgcgcattcggccattgtcggtgtctgcttacgcggctagtctggtgcccatgcttgatattcaattcatccgtgaacacaccgatatcgtcaaggaatcccagcgcaagcgcggcgagtccgtggaactcgtcgacgaagtgctctcctccgacaccgcacgtcgtgaggcgctgaaggccttcgaagaggctcgcgcccagcagaaggaaatcggcaagaaggtcgcctccgccccggcggacgagaaggccaagctcatcgccgagaccaaggaactgtcccagaaggtctccgaatacaagtccaaggccgattccgccgccgaggaatacaccaccgccatgtggaagctctccaacatcgtggagcccgaagctcccgaaggcggcgaggacgactacgtggtcgtcaagaaggtcggccagattcgcgacttcgcggccgaaggcttcgagcccaaggaccacctgaccctcggcaccggcgtggccggcatcgacatgcgccgcggcgtcaaggtcggcggctcccgcttctacttcctgcgtggccaggtggcccgtatgcagatcgccatgctcaccatggccgtggaccaggccgaggagcacggcttcacgctggccatcaccccgacgctggtgcgccccgaggtcatgcgcggcaccggcttcctgaactcccacgccgacgagatctaccgtctgcgcgagcccgacgaccagtacctggtcggcacttccgaagtggcgctcgccggcatgcacgagaacgagatcctcgacctcggcaacggcccgctgcgctactgcggttggtcctcctgctaccgccgcgaggccggcgccgcaggcaaggacacttccggcatcatccgcgtccaccagttcgacaaggtggagatgttcgtctacgccaagcaggaggactcctacaaggagcacgagcacctgctggccatggagcaggagatgctcgccaaggtcgaagtgccctaccgcatcatcgacaccgcagccggcgacctcggctcctccgccgcccgcaagttcgactgcgaggcctgggtcccgacccagggccgctaccgcgagctcacctccacctcgaactgcaccgagtaccaggctcgccgtctgaacatccgcgagcgtatggaagatggcggcacccgtccggtctccacgctcaacggcacgctggccaccacccgttggctggtcgccatcatggagaaccaccagcagaaggacggctccatcgagattccgcaggccatgcgcgcctacatgggcggcaaggaagtcatcgagcccactaagtgggaggcctgagtctcatcgtgctttagctccctttaatgggggagctgtcagcgtagctgactgagggagagatcgctaatagccagcaggcgaatccaagaccgaccgcactgccgaatatcaacatccctcccttctgtataatgaatacttgcgcgtgtgaacgcgcatcaggacaggtgtctgagcggcctaaagagacggtcttgaaaaccgttgaggggcaaccctccgcgagttcgaatctcgccctgtccgcgaaccgaggcctgggcaacatgcccaggccctttttctttttctggaacctgtcttcttgatcgccaccggggtgctgatatattggtttgtaatgccgtaacatgcggtgtccccgttgatatgacgggccaatcggcgtgagccgataagaaaaggcccgacgtttgcggcatcgggcctttgcgttgattaccggcttgcgcctttaatcaacaaggttgcaagatgaatcatatcacgatgcacggtagtctgaccgtgaacgggcgcaccgtgatcgtccatgtgggcgatggcgaggcgaacgccacggttgacggcacgcacttcaacgtgcgtagcctgtggcagctctaccagttgctgagactgctcgtgtagcgtctcattaaggcgcggtgcccccctagtcgggtatcgcgccggcaacctgaaaaccgataatgttggcaagtgcttgcaatttgtggtggacgattgcaagctgacgtcttggattgttgccgctatccaatatctcattaggtctaccggtggaccaaaagtacgttgctttgtaaggggagttaatgaaatgaacaaacccgcacaatcgagcatcgaatcggtttaatgccactcacctcaacgggacgcgcggtaattgttagctaagttgacaataaaagagcaaaggcctaaattagcaatcagtcatcacgctgaggtgatgatttcactaggaaggagtagagatatggtatcgcacaacaagcgcatcgtggctgctcttgccgcggtagcagcaatgggtattggtttggccggttgcggcggcagcgacactgccggcgacacgaagtccggcagcgatggcggtgtggtcaacatcacctatatgcatcgtctgcccgattccgaaggcatgaccttggtcaacgacattgtggccaagtggaacaaggagcacccgaacattcaggtcaaggccaccaagttcgatggcaatgccgccgacatgatcaagaagctcgagaccgacgtcaaggctggcaatgcgccggatctggctcaggtcggttactccgaggttcctgaggtcttcaccaagggccttctgcaggatgtcaccgatgaggccgccaagtacaaggacgatttcgcttccggcccgttcgcactgatgcaggtggacggcaagacctacggtctgccgcaggacaccggcccgctgacttacttctacaacgccgctgaatttgagaagctcggcatcaccgtgccgaagaccgctgacgagctcattgagaccgccaagaagaccgctgcccaaggcaagtacatcatgaccttccaacctgatgaggccatgatgatgatgtccggccaggccggcgcttccggtccgtggtacaaggtcgacggcaactcctgggttgtcaacacccagactaagggctccaaggccgtggccgatgtctaccagcagctgatcgacaacaaggccgccctcaccaacccgcgttgggatgcatcgtttgataactccatccagtccggtcagctgatcggcaccgtggccgccgcttgggaagccccactgttcatcgattccgccggtggcactggtgctggtgagtggaaggtcacccagctcggtgactggttcggcaatggcaccaagaccggcgccgatggtggttccggtgtggccgtgctcaagggttccaagcacccggccgaagccatggagttccttgactggttcaacacccaggttgatgaccttgtctcccagggccttgtcgtggccgccaccaccgcggatgccaagaccccgcagaagtggtccgactacttcagcggacaggatgtcatggctgagttcaagaccgcgaacgacaacatgggtgacttcacctacatgcctggcttctccgcagtcggcgctgcaatgaaacagaccgccgccaaggctgccgatggttctgccaaggtttcggatgtgttcgacaccgctcagaagacctcggtggatacgctgaagaacctcggtctgtccgtcaaggagtgacctcactaggtcttgtcaacgggccggcttgaaatagccggccgtccaagacctccgatgcctcgcatcaccatagcgaaaggccggggcacatactccggccttccgtattgtttgggggtattgctgcaggggcgctgtggcccttgtcatttgttttactgttctttgcgaagacaggttttgtattatgactgcatccactactcaggcgaagggcaaagcacctaggcgtgccgccgccaagccgaagcggtccggcgctcagaagcgcgagaaccgcaccggctgggcgttcatggcaccgttcgccgtcctgttcactttcgtgttcatcttgcccatcatctgggccatctattccagcttcttccgtcaggtcaccgagggcggtggcgcatacggcggtggcgagctggtcaataaattcgtaggattccagaacttccagtatgctattacttccggcaacttctggtccggcgtcggcagggtgctgctctacaccctgattcaggtgccgatcatgatcatcgccgcactggcgttggccatcgtcatcgactcgttcgtggtcaagcatgtcaccggtttccgtctgggctacttcctgccctacgccatccccggcgtcgtggcctcgattatctgggtctacctgtacaacggccaaatctcgccgatcgtcaagggacttgccgccatcggcgtcaatgtggacttcttcaacaagaacatcgtgctcggctcgatggccaacatcaccacatggaccttcaccggctacaacatgctgattttccttgccgcactgcaggccatcccgcatgacctctatgaggccgcccgtatcgacggcgccaatggttggcagattgccacgaagatcaagctgccgaacgtgcgtggcgcggccctgctggccatgctgctttccatcgtcggcaccattcagctgttcaacgaaccgcagatcatgtctacggctgatccgggtatttccaagtcgtatacaccgatgatgatggccatgaacacttctcagggcaccattaccccgtctggtgacggtccggcctcggccatcgccattgtcatggctctgatcgcaggtgtgcttgccgtgctgtacaccttggccgaaaggaaggtgaacgagtaatgagctccgcaaccgttgaagaacgcgcccgcaaaaaggccgagcgcaagctcgaaaagcagcgtcaggctgcgcaacacgatttgcctcgctccatgcgaccgtccgcggccgtgaagaccctcaccgtggtgctgctggtactggtgttgatctacttcctgttcccgatttactgggccatcatcgcgtccaccaagacgccggcccagatgaccggtagcaacggcatgtggtttgctgtgccgcttgaccagctgcccaatgccatcgccactaactattccaagctgcttggctggactcgtggcaacttctggcgctgggtgctgaactccctgatctactcgggcgtctcggcattgatcggcaccatcgtgtctgtgatggctggctacgccaccgcaaaattcaacttccgcggcaagaacgcggccatcggcatcattatggcctgcatgctcatgccgtccgccctgctgaccatcccgatgtactcgatcttccacacgttgcacctgaccaacactatgctctcgatcatcatcccgtgctgcgtttcgccgttcggcttcttcctgggccgcacgtacgcacagagttcggtgccggacgaactgcttgaagccgcccgcatcgacggcgcgagcgaggcgaggatcttcttcaccatcgtgctgaggctcctggccccggccatggtgacgattttcctgttcctgttcgtggccacgtggaacaacttcctgctgccgttgatgatggtgtcttccgacaccttgaagcccgtgaccctcggtctgtacggcatggtctcgctggccacgttcaccgatcgcggcgccctgatgatgggtgcgttgctcggcgtgctgcccgtgatcgtgctgttcctcggcctccagcgctactggcagtccggcctcgccgccggtgccgtcaagggctaaccaatccgctgcccggcatgtcgtgtcactccttccggtgccgggcaacgtccctcccatattcagtgacacgattccaatcgtccggcgtcaccgtaagcgtcaaggatctacgcagtcagggtcccagggcccgcgatgacgccggtcattttgtatgcgacgaattcgtcgctttgtagttttttgatgaccaaccccacaaaggagcactcatgaccagcaccggccgcttcacgctgcccagtgaagagaattttgccgaaaagaccaaggaactcgccgaattgtggggtgcggacgccatccgcaactccgacggcacgcatctggacgaggcagtgctcgctcttggcaagaaaatctacagcgcctacttcccgacccgcgcccacaacgagtggatcaccctgcacatggacgagaccccgcaggtctacctgctgaccgcccgtatcctggccgagtccaacgcggtggatgtgccgctgatggacggtttcttcgaggaacagctcaagcctaaccgtgacgccgaccctcataagtactgggaagtcgtggaccgcaccacgggcgaggtcgtggacccgtccggctggacgctcgacccgggcgaggacaccgtgcacgtgaccgctgccgtgccgatgcacgaatacacggtgagtttcctggcctacatcatctgggacccggtcgagatgtacaaccacctgaccaatgattggggagacaaggaacacgagattccgttcgacatctaccatccggccacccgcaagttcgtgttcgatacgttcgagcagtggctgaaggacagcccgcaggtggatgtggtgcgtttcaccacgttcttctaccagttcacgctcctgttcgatgccaagcgtcgcgaaaaggtggtcgactggttcggttgcgcctgcaccgtgagcccgcgcgcattggacgatttcgagaaggagtacggttaccgtctgcgtccggaggatttcgtggatggcggtgcctacaactccgcgtggcgcgtgccccgcaaggcgcaacgcgactggattgacttcctctccggattcgtgcgcgagaacgtcaagcggcttgccgacatgtcgcacgcggcaggcaaggaagccatgatgttccttggcgaccagtggatcggtaccgaaccgtataaggacgggttcgaaaagctgggtttggatgcggtcgtcggctccatcggagacggcaccaccacccgcatgatcgcggacattccgggcgtcaaatacacggaaggacgcttcctgccgtacttcttccccgacacgttctacgagggtaacgacccgagcatcgaaggcctcgacaactggcgtaaggcccgccgcgcgatcctgcgttcgccgatcggccgtatgggctacggtggctacctctccttggccgccaagttcccgaagttcgtggacacggtgacccatatcgccgacgaattccgcgacatccacgaccgcaccggtggggtggccgccgaaggcgagctcaacgtggcgattctgaattcctggggcaagatgcgttcctggatggcgttcaccgtggcacacgccctgcccaacaagcagacctactcctactacggcattctggaatccctgtccggcatgcgcgtgaacgtgcggttcatcagcttcgacgacgtactcgcgcatggcatcgatagtgatatcgacgtaatcatcaacggcggcccggtcgacaccgcattcaccggcggcgacgtgtggaccaacccgaagctcgtggaaaccgtgcgcgcctgggtgcgtggtggcggcgcgttcgtgggcgtgggcgagccgagctcggcaccgcgcttccaagcgggccggttcttccagctggccgacgtgattggcgtggacgaggagcgctatcagaccctctccgtggacaagtacttcccaccggtggtgccggaccacttcatcaccgccgatgtgccggtcgacccggcggcccgcgaggcttgggaacaggccggctaccgcatcccgctgagcggttgcggcggtggccagtccatcaagccgttgggcggcatcgacttcggcgaacccgtgctcaacacgtatccggtcaatgaaaacgtgaccctgctgcgcgcggacggcgggcaggtgcagctcgcgaccaatgattatggcgaaggccgcggtgtgtacatctccggtctgccctattcggcggccaacgcccgactgctggaacgcgtgctgttctacgcctcccacaacgaagacaagtatgcggcttggagctcgtccaacccggagtgcgaggtggcgcacttccccgagcaagggttgtactgcgtaatcaacaacaccgatcagccgcagcggaccacggtgactctggccgatggcaccaccgaggacttcgacctgcccgacagcggcatcgcatggcgtgaagcctgattcccgcgttttggagaacggacccatcatgaccgaaagcaatgaagttttattcggcatcgcctcgcattttgcgctggaaggtgccgtgaccggcatcgaaccttacggagacggccatatcaacaccacctatctggtgaccacggacggcccccgctacatcctccaacagatgaacaccagcatcttccccgatacggtgaatctgatgcgcaatgtcgaactggtcacctccactctcaaggctcagggcaaagagacgctggacattgtgcccaccacctccggcgccacctgggccgagatcgatggcggcgcatggcgcgtctacaagttcatcgaacacaccgtgtcgtacaacctcgtgccgaacccggacgtgttccgcgaggccggcagcgcattcggcgacttccagaacttcctgtccgaattcgacgccagccagctgaccgaaaccatcgcccgcttccacgacaccccgcatcgtttcgaggacttcaaggccgccctcgccgcggacaagctcggccgcgccgccgcatgccagccggaaatcgacttctatctgagccacgccgaccagtatgccgtcgtgatggatgggctcagggacggttcgattccgttgcgcgtgacccacaacgacaccaagctcaacaacatcctcatggacgccaccaccggcaaggcgcgtgcgatcatcgatctcgacaccatcatgcccggctccatgctgttcgacttcggcgattccatacgctttggtgcgtccactgctctggaagacgaaaaggacctcagcaaggtgcatttcagcaccgagctgttccgtgcctacacggaaggattcgtgggcgaactacgtggcagcatcaccgcgcgcgaggccgaactgctgccgttcagcggcaacctgctcaccatggaatgcggcatgcgctttctcgccgactacttggaaggcgatatctactttgccaccaagtaccccgagcacaatctggtgcgcacccgcacccagatcaaactcgtgcaggagatggagcagaaggccagtgaaacccacgccatcgtagccgacatcatggaggctgccaagtgagccgtcagtcgaaccatacccgaaccagcatgatgggggccgagcaatgagcgatcagctgaccgaggtatacgccagcatcgacgccctagtcgattacgccttggatcatctcgacctcgatccacgcaacgcagactggacccgcaaccaaatcttcgccctcttccacctggattcctaccccggacccaaaaccacaacgtcggcggcgtcagtgtcagacgcagtccaagacattgtcggcagccgaagccaggccccctctgacgaaaagacccccgaccccctactcgccgccttccgcgccgccgccacaaccgccggcctcttcgatccggaggaaggcccggcctacgccgacaccatcatgggcatcctctccgccaaccccgccgatctcgacgaccggttcctgctcatcgagcacagggacggcggcatggccgccatgcaatggttctacgactactgtgtggccaacaattatgtcaagcgtgcccagctcgaccggaacccgcgcttcgactcgcacgggctgacggtgaccatcaacctcgccaaacccgaattcaagaacatgaagaaggcggcggccggcaacgccgtgtccggcggctacccgaagtgcacgatctgccatgagaacgagggcttcgccggacgtgacaagcgcacgctgcgcaccctgccggtcacgctcggcggtgagtcatggttctggcagttctcgccctacggctacttcgaccagcacggcatctgcgtgaacactgaccacacgccgatgcatgtggaccgcgacaccttcggccatctgctcgacttcgtggaccgcttccccggatacttcctcggatgcaacgccgcgctgcctcgcatcggcggctcggtgctcgcccacgaccactaccagggcggcggcgaactgctgccgatgcacaaggccgccacttgggccgccttcacgctcgccgactatccggacgccgtggtcgaaatcctcgactggcccggtaccgccgtgcgtgtggtgtcgaaaaaccgccagagcatcatcgacgtatccgacatcatccgcgaggcatgggtcggttatgacgacgcggcgaacggcatcgccagccatgacgcggacggcaaccgccaatccgccctctcgcccagcgcgatcatcaccgaacgtggctatgagatgagtctcatcttccgcaacaatgcgatcagcgacgagtacccggaaggtattttccatgcacaccccgaatactggccggtcaagcaggagccgattggactgatcgaagcccaaggcctgttcatcctgcccggacggctcgtcgaccagctcggcatcgtcgaggaggcgctcgccgaaggccgcgatttgcccgatgaagtcagcgaattcagtctcgaatggggcgaactcgctgaaacattggccggaaaccgcgaccgcgaggccatccaccaagccgtacgtgacgagctcggcagcgtctgctaccgcatcctcggcaacacggccgtcttcaagcagaaagccaccacgcaaacattcctcgaaagtcttggttttgccgctaggtgaaacaggtcaagtgaagtaagctcaatactgaaggaaaaccgaaggcaagtccttccaaaggaggagatatgactactgttctggttacgggcggtgctggattcatcgccacccacaccgacatcgaactgctcgacaagggctacgacgttatttccgtagataactacggcaactcgtctcccgtggcgcttgagcgcgtcgagcagatcaccggcaagccggtcaagcgttacgacggtgacgtgcgcgatgaggcgcttatggaacgcgtcttcaccgaaaacaacatcgattgggtcattcacttcgccggtctcaaggccgtgggcgagtccgtggccaagccgatcgaatactacgacaacaacctgtactccacgcttgtgctgctcaaggtgatgaagaagcacaacgtcaagaagatcatcttctcctcctccgccaccgtgtacggcacgccgaaggaactgccgattaccgaggagacgccgaccggcggcaccaccaacccgtacggcacctccaagctgttccaggagcagattctgcgcgacgtacatgtggccgatccgtcctggaccatcgtgctgctgcgctacttcaacccggtcggcgcacacgagtccggcctgctgggcgaagatccgaagggtattccggcgaacctcaccccgtacgtggccaaggtcgcggtcggcgagctcaaggaagtccaggtctacggcgacgactacgacacgcccgacggcactggtgtgcgtgactacatccacgtggtcgacctggccaagggtcacgtggccgtcattgaccacatcgacaaggaaggcgtgttcgtctacaacctgggtaccggccacggctactccgtgcttgaggtcatcaaggcttacgagaaggccgccggccatccgattccgtacacgatcaagccgcgtcgccccggtgacatcgccgcctgctacgccgacgcttccaaggcggagaaggagcttggctggaaggccgagctgaccatcgacgacatggccgcctcctccctcaactggcagaccaagaaccccaacggtttccgcgacgccgagtgatatgagcagatgagctccctctgatgagggagctcatctgtcgtttatcacacaatgcgcctatcggcggcccagcgggtgagctcggtgcgattcgaaagctgaagctttcgcagcaccgagctcacgtgcgtttcgaccgtcttgatcgaaatgaacagttcggccgccacctctttatacgtgtatccgcgtgcgatcagccgcatgacctcctgctcgcgggcggacagccggtccagctcctcatcatgagcccgtgccgcaccatcagcgccgccatcagaccccgccgccggcacaccctgaaaggccgaaagcacaaaaccggccagttttggcgagaacacggcatagccctcatgcacctgcttgatggatgaaatcaaatcagcgccggtaatcgtcttggtcacatagccctgggcgccggcgcgaatcaccgcccccacatcctgcggcgcatccgaaaccgacaatgccagaaacacggtagtgggggagtagggccgcgatttggcgaggatctcggcaccgccgccaccttcaccgccgggcacgtgcacatccagcaacaccacctgcggcttggtctgtgcgatcatcgccaccgaaccgggcacgtccgccgcttggccgacgatatcgaaggaatcacgcaacgtggcgattacgcccgcacggaacatctcatggtcatcgaccacggccacacgaatcttggctgtctcattctcgctcatcgatgttctccctgcgccgctttcagcgcgatcggcatatgcattctgacctcggtgccccagccggccctggacactatctccactgtaccgccgcgccgtttgacgcggccgataatcgattcgcggatgcccagccggtcgggcggaatggcgtccatatcgaagccttcgccatggtcgcgcacgaacacttcaaccatcgtgtcgctggcctcgcaatacaaagacaccggctcgccgccatgcgtgaccgcattgaccaacgcctgacgggtggcgtccagcagcgcatcggtctgggcactcggccgcgcgtcgcccacggtgaccacctcaatcggtttgccgtgctcgtcctccacctcggcggcgatctgcttcaatccggctcccaccgaacgatccgatgtggaacgttcctgatacagccattcgcgcagctcgcgctcttggctacgcgccagggcgaatacggtagtcggttcctcggagtgcagctgaatcagcgccaacgtttgcagcacgccatcatgcagatgggcggtcatgtccgcgcgctcctcttcgcgttccttcaatgcctgctcgtgggtgagtcgttgcagcatcgcgttcgcccacggcatcaccgccaccacgataccgacgatcatcacgaatccgctggcaacaatgcgtcgaggagagctgccccacccgggaatgctgacattatgcacatacaatgcccatcccatgaaaatcagtgcgatgccgcccaacatagacaacagctgcgtgcctcgcggactaagattcatccatgccagtgcgatgccgcccaaccctaccagcagcggaagcacaatctgggcatccgcaccggtgctggtgagcagcagtccggtggccatcaacgcgaaaccggccaatgccacgacggccggtttcggagcacgttggatggcttcggacaatgattccggtgcggcagccgattcgtcgtcatgagcggcaagtggctgattgcctcgcgcaagcggcgcctgatcaacgggcactgtgcgagctgcagccgtcaccgggtctccggcgggcatgaacacccacaggaatacataagcgatgatgcctgcgccgtagaggaaggtcagagcgatgaacgcaatccgaacccatgtcacgccgatgcccaagtgcagggcgatgcccttgcacacgccggtgagccagcggccctgccgggggcgcatcagcggcatgcgcgcgggcagcaatggttcgggagatgacgtcatactcctattgtgccgcgctcagggcgttgcggccggggttttacccggtgttcagggaacaatcagggtgttccccgagcgttgtggcagtggtcgggcggtgtaatggaatcatgagcaatccaaacgcgaatccgtatcagccacagccgcagcctggtccgcaaaaaaacaagacatcgcgacgcttcttcacttgggtgcgatccagtggactggttcgcggcgacgaccggtggatcggtggcgtatgcagcggcatcgctttacggcttggctggagccccacattagtacgtgcgttggtgattgtatgtacattgttcttcggttttggcgcagctctgtacgcactcggctggtttctgatgccggatgtacgcgatgggcacatcttggccgaggacctcattgccggccaatgggactggaattgtcttggatgcttcctgttcctcgccgtgacaatcgtgattccaggtgcggggtgggtttgtattgcgctcgccgccttagcgctttggttgttagccaaaagcggcattcgccagcaggaagggtacggattcagggcatctgcgccgcgaccggtttcacagcctgtgtcatatccagctccacagcctgtctcatatccagccgcgcaaccggtccctcaatctcctttgtattcagctccgcaacctgtttcacaatctgtttcacgaaccgcgcctagtgtttcacaacctgtttcacggcctttctgtcagtcgatgcccggcgcggtgcccggcgcggttcccagcacgatgcccggcacagtacccaacgggccgtttgcccccgaccgtatgaatgcgacggcttatgcccccaccgagtccaagcgccgcaagccggcgggcccaatcgtggtcttgagcatactgggccttaccttcctctcctttgccggtctgatgggactgatttgggtaaacgacatgggcattatcggcattatgcgtctgagcaccatctggattgccgcagtatgcatagtgatggggctggtggtcatcattctcggattcagagggcggcgtaccggtggtctgattcctctcggactggttgccggtggatgcgcgctctgcatgaccatcgtttcaggcacgtatggcgtgcactaccgtgatcttggtgccagcggcatcaatactgttgtttcactgagccaatctgtcagtgcgagaaacagcgatggcatgaacgatgtgcaaaaggatggcatcttcgttgccgatgccagcgatgccacgttcgaaacattgcagcaaggtgtggcgttcagcggtgaaaactacaacaccgatcaggcgatcattgattggtccgattggggcaagacacatgggccgcacacggtgaagatgctggatggcaaaacttccatcagtaattgcccggtcggtaccatcaccatagccgcaacacaggcgcaagtgcatatcgttctgccggattcctgcacttacgccttcggcaccgccgactcctacttcacttcgagtgacgtcggcggcaaatacgagatggtatacaacaactacatgggtctaagctttggtttcttcgaagctgaaagtgccaccaatcccatgaatgggcctgattacgaatggttggataagggatccgccatgccggacaacggccca

SEQ ID NO: 878 - DNA, 30003 bp, Unknown
  R14_18m  MAG No. k141_17089
cgccgccgcaccaacgggttcttcacctacgcgcagatcgtgggcgcggcggccatgagcttcatgcatggcgcgcaggacggccagaagttcatcggcgtgctgttcctcggcatggcgttctgcaacggccaacccagcgtgaccggtgtgatgattccggtctggctcatgattctgtgcagcaccatcatgggcgtaggtacgtccgtcggcggtgaacgcatcatcaaatccgtgggccaggacatggtgaaactcgagaaataccaaggcttctcggccgatctgtcaagcgcgctgtgcctgctcgtcatgaccgtgctcggcatccccgtctccacaacgcacaccaagaccagcgccatcatgggcgtgggcgcggtacgccgcctctccgccatcaacttcggcgtggtgcgcgacatgatgctcacctgggtgttcaccttccccggttgcggtctcatcagcttcgtaatggccaaactgttcatggtcgtgttctagaaaggattccacccatcatggcgagacaaaaagacgtgttctacttcgacggattcctccgcagcgcggactacgcatgccaggccgcgaagctgctgtccgaggtcatgcacgacttcaatccaggccagctgcgcgaacgcatggacagcatgcacgcgattgagaagtcggcggacgaggtgcgccacgacatgatggacgaactggtgaccgcgttcatcacgccgttcgaccgtgaggacatcgacgagcttggccacgtgctcgacgatgtgaccgacagcatcgaaggcgtactcaaccgcatgtactacgacaatgtgaccgacatgcgcgacgatgcggtccagatgtcggatatggtggtgcgtgccacggaaagcatctgtgagctggtcaacgaactgccgcgattccggcattccaagacgttgcgcgaactggtgttcgccatcaacacgatcgaaacggacgccgaccacctgttcatcgagtcgatgcgcacgctgcacaccacctgcaccgatccgctgcaggtgttcgcctggcatgacgtgtaccgtcacctcgaacagtgctccgacgactgcgagcgcgtggccaacaccatcgacagtatcgtcatgaaaaacagctgaggttggtttttcataacctccctctgatgagccgagccgtgaagaaaacgccggaggtgtttttaggcaagggtgagtgacaacgagcgaataagaggtcagctgcaagctgtcctgaatcgcgttcgaggtggcatcgcgaagcgatgacggagggagagacctacttgaccaaaggcccctcaccgatgggcgttgagccagaggatggcgagttgggtgcgattggtcaggccgagcttgtccagtatcgcgctgatgcgattgcggaccgtgccttcgctcaggaacagtctggcggcgatgtcgcggttatcgaggccctcggcgaccagcgcggtgatctcacgttcgcgctcgccaagcaggccctcgatggaatcggcggtatctccggaatcgtcggaatcggcaggattcggagtccgttcggtgagcttgccgagcacttccgcgccgagcaccacctgaccggccatcaccgcctgcagcgcaggcccgaccgccgccacatcctgtttgatgagatagcccttggcgccaagccccatcgcctgcgcgatatacgactggtccgcaaacgtggtcaggaacagtatgcgcgcggccgggtccgtggccagaacctcgcgcgcggcatccaaaccgctggtgcagggcatctgaatatcgatcagcagcacgtccggtcggctcgccggcgtctcgaaataacggcgcacggcggcgtcgccgtcatttgccgtccatagcacctcggccgtgccggtggccgtcagaatcgtctccaacgactggcagacgatcggatcatcatccacgattgcgattctcatcaatccctcgattccatggtccaacgcttcttcggcacggatacgaacacacgccagccgccctcatacggcccgcagaccgcggtgccgccaagggcgcgtacgcgcgattcgatatccgccaaacccatgccgcgcatcagctcatcggccgaaccgcgcatatcggcaacactgtcggcggcgagtcgcgagccgacgagcgtggcacgcatcgcacgcgggcgggcagcggccgtccgggacccatcggactcggacacggccggccccggatcctgaatgaccaactgccagaacgcggggaagtcacgcaacgtcacgctcgcctcgcgcgccgcgctgtgatgcaccacgttcgacaatgcctcgcgaatcacggtcgcgaaacagcgcgagaccggcgcaggcgccttggcgatatcgttggccagcgtcacggcgaaaccgggggagatgccgtcgaacgacgtgacggcatcatcgatctgcgcggcgaaatcagtgccatcatcctcaagatcatgcaccgaacggcgcaccatcgtcatcgcatcatccaacgtcgcacccaacgtggcgaacccttgcgcagcgaccgtatcgttcgtcgccttggccaccgttttgccggcctgcgcctgcatgatcgcgcgggtcagcagatggcccacattgtcgtggatctcccgggcgatacgcgtgcgctcgccgagggtcgccatgcgaatcgactgggcgcgttcctcatcgatgtcggcgatgcgcgaacgagtggcccgcgaggattcgcgcgccctgtcctgcgcgtgcagcaacgcgcgccgcgcctcgtccgaggaggcgcgggcccggcccagaacgaatccaagcagggcgaccatcgtcatcaccagcgtctggagacggtcggtgccatgggcgaaccagagcgcgatcggcggcaacagccatatccagcgcgcggcgaccgaaaaccacggggccaaacgtattgcatcggcaagggaacggcgagaggccgcggtccgcgagacactgggggagcggccgcttgccgcagtccgtgccccagttcgggcaacggtcgaggcgagggccggcagctgtgcagtatcgtaggcgatgagcggcatgaacgcgcaccatgaaggcactgccacggcgatgacgagatacgccgtacacaagacccaagaccattgcgcgggacgcagccatttcaccaatccggcgacggaaacggccaacagcaggccggcgatgaacacgccatcggaccgtagcccgacaagccaggccaaagccaggcccaacacgagtagcaagcccatctcggccaacacgcgcatggcacctccccggctcgacgctcttccaccaccagtctagcggtgtgcggaacacgacgaacttgacgggcgtgcggaattacccgcatgacggtccaagacaacgggcctacacttcccgaatagatgaggcacaagcgtcggatgtcgtcgacacaaccgtaaagggatgataccgatgattacgcaaagccacagggcgtccaactattcgatggacgagatcagcctgatgccggtcgataaggtgtacaaggccatgcagaccgacgccgaaggactgtaatgacaaatgtcacgcctgtgcggccaagtcgtgacgtttgcctgtggcggcgtccggccccttcttgggatgatggaatcgccaaggaagggagtgactatgacaaccgacaacagagcttccgaacacgactcgacaaccaacccggctctggccgtgcacgtcagccaactggtcaaacgctacggcgacatggtggcgctcgactattttgaccttgacgtgaaccagggcgagattttcgggctgcttggaccgaacgggtccggcaaaaccaccgcgatcaactgcatcctcgcgctgctcacctacgattcgggcacgattcgcgtgttcggccagccgatgacgccgacctcctacgcgctgaaacgtcgtatcggcatcgtgccgcagaacgtggccgtgttcaacgaactgaccgtcaccgaaaacatcgactacttctgctcgctgtacgtgccgaagaaaatcgaccgcgcgccgctggtcgaggagtccatcgaattcgtcggactccaggacttccgcaagttccggcccggcaaactgtccggcggtctgctgcgacgcctgaacatcgcctgcggcatcgcgcacaagcctaacctgatcttcttcgacgaacccacggtcgccgtcgacccgcaaagccgcaattcgattctggaaggcatccagcggctcaaccaggccggcgccacggtgatctacaccagccactacatggaggaggtcgaacagatctgcgaccgcatcctcatcatggaccacggccggcacctggcgctcggaaccgccgacgagctcaagaacatgatcgacacgggcgagcgcatcaccatcgaaacgctcgatctggcggattcggcgatggccgaggtccgtgcgctgccgtgcgtgatcgaagccacctacgacggcaaggaactcgacgtgcgatgccgtcgcggcgaacacaacctgaccgacgtgctcgacgcggtgaaacgctccggcgccaacatcggccacctgaccagtcgcccgcccaccctgaatgacgtattcctggaactcaccggcaaggcgttaagggactaacaatcttgcccccgctggcgggggctcccgcgaagcgggcgggggcggtcccgtagtaaccaccctcagtcggcttcgccgacagctcccgccagcgggagcaggtaaggagacatcatgtggaccacatttctggtcgcattgaaagcgaacctgcgcaatcgtcaggcactgttctggatgattgtgtttccgatcgtgctggcaaccatgttcaacgggttcttcggcggactgtccgagggatacgagctcaaaccgataccaatggccgtcgtcgaagatagccgctggcagcaggcagacggagcgcgtacgtttgtggatgccttgtctggagagacggcctcatcgtcggagtctttggacggcacggcatacgccgatatcaatcagcaattgctgaccatcaccgcagccgacaccgtgcggaaagccgaacagctgctcgccgatggcacagtccgcggctacctggctgctgacggcaacgggcgtttggcgataaccatcagtcgggaaacggtgaccgcggccaatgacaccacaggaagcgtcggactggatatcagcctatcggcattgcgcagcgccatcgacctgtacaaccgcaccgacgccgtcacccgacaaaccatcgccgacaatccacaggctgcgctcagccgcaacttctggaatagcatcgggcaaagcgtcgatgtgactcacgaaacaacgctcacgcatttccagcccaatgccatcgccagatactattacgcgttgctggccatgtcctgcatgattgccatggggtactcaatcagcacggtctccacagcacaagccaacctgtccgcattgggcattcgccgcaccgtggcgccattgagccatgccagacagcttattgccggtttccttgcctgctggttgtgcgcatcggtcgcattgcttatcgcattggcctatattcgcttcatttgcgacatttcgtttggagggcgagaaccggtgacggtggtcgcggtaatcatcgccgcattcatgaccagttcagccggtactttgctcggcgcggtaccgaagctttcctacgacacgaaatacggtttgtcgagcggaatcgcctgcacattgtcgctgttcaccggactgtacggcagcttcgccatgcagatcagtgactggatagcacgcaacgcgcccatcctcggcaccatcaaccccgcgcaacaggtgacgaacctgttttacgacattttgtactacgacagctaccagccgttcatcaccacttgtgccattttgctggcgatgagcgcggtattcctcttggccggcatcgcaatgctgaggaggcaacgctatgaacacctgtaaagccacattgcgtgtactgttctcgcacagggcctacctgttgatttacctcgtgttcgtgggcatcatgatgctgtctatcagctggtcgatgctgtctggcacatccgattccgcagccgcggcattcgagccggccaaaatgcgtgtcgccgtcatcgatcgagactcggacaggggcggcatcgcgtcatcgatgcgcacatacctgtcggattccagcgaactggtgaacgttgacgatgctagtgaaactctgcaacaagccgtcgcctcgaactgggtggatctgatcgtcatcatccccgatggtttcgccgacgatttcattgatgccgcggcgacaggcgagaatccaccaagcgtggacacggtcaccagctatacgtccggcgcaggctcgatggcccggatgaacgtcatcgggttcctttcactcacacgtacggcactgattggctcgcatacgacggtcgatagtgcggcgctcgcagctatggtcggtatcgacattggagacactgcgggtgattcgtctgaagatggcatgggcgggtttggtgaattctcgaatcaggacatgcttgatatgctgccggccggtcagattgagaaacccagcgtcggcgatctgttcgaggcatcgaaagcggctgccgcatcggcgagtgacatggacgcgaaccataaggtcgctgtgatcgacacggcaagcgcggacgcggaaagtgcttcggacatggcggccagcagatttggcaacaccatgaaaaccgcgctgtatccgctgtttttggcgatgaccgtctgcgggtcaatgattctgggcatattcaccaccggggaagttcgccgtcgtctcaccgcatccccacaacgcatgtcgtcgatgggactccagcggttgctgacgctcagcggattcgcgctcgtcgtatgcgtcggttatctggtgctggcggtcggtctgatggtcgcggcaggacttgatccgttgcacctgagcgtcgggggagtgctgatgacgttcggcgcgacctgcgtgtacgcgctgatgaccgtcgcctgtggattcatgctcagcgaattcgggttttcggaggcggctgccaacggattcgccaatatcttcggcctgctcatcatgttcacgtcgggagttgcattgccgattgacatgatgcccgccgtgatggtgactatggccaagttcctgcctggctggtggtattgcaccgcgatcgacaacgcgctcggctccggcacggcggaggaaaccggcataagcgtcgccggctgggccggctcgctgggattggtcgcactgttcggtgtgatgttcatctgcattggcctggccgccggccgcttccgccgatcccgtcccaccctggccgcgcccgccaccacgcagctggccgagtgagaaaatcagcctttcaaccgataccgctgcaccgggtcatcggcgaacttgactcgggcgacccgcccttccttcatcagctcgcgcatgccggacgtggcggccagcggagtcaactgcagttcgcgcatgatctccttgacgctcatcgccgaatgccgttccagtacggtcataatcgccttgaccacgtcacccggtgaactgttcgccatcgtgcgctgcttggtgatggtcatcgtgaacgtgttgatgtcgttgcgcgtggtcgccggttcgatgccggcctcgcgcaacgcggcggcgatgcgctggtagccgtcgccgccttctgggttcacaaacccgccgcccggatacggcgtggactccagcagcgtgaacaggaactggtttcgggtggagacgaacggtgcacccgtcaccggatgcggactcgccagcacatcatgtgtcaccatgccatacagaccacccggattggtgatctcgatgcgatcggtgaacacgctgatatgcacctgcgtgccgcgcgcatcgggcgaataatcacggtgggtgagcgcgttcgcaatcgcctcgcgcaacacgagtggcggataatcgggcttcttcgcgccaatccaacgcatcaacgagtcgaccgcatcgtcgatcatcaccggaatcgaaccgaccaccgacttcgaggcgaccaatcgttcgtcgccccggaacacatcgtcccggctcgttcccggaaacacggctatcgaaatgccgagccgcggatagaacttctgcggatagcggcccaacgccagcagtccggccaaggtgggacgcagtattccgccgacctccgactcgtcggaatcatcatggcgcaacacctgcagatccagcagcacatcgatgccgtcccggtcggcgaacacgcgcggatgctgctcgcgcacgcgcgccaacaatccggcaacaagctgcgggtcgaggtcatcggtcgtggcgccgggcacgatatccagatcgtatgtgggctgcagatgctcctcgatgagccggtcgacctcataggaggtcatgcgccggtcgccgtcgccggtgcggatgaacgagccgccgtgcggtccgagcgcggtggtgaagcagggcttgtcgcgcggcagcatttcgtcgatgcgcgcgaacaccagattcgcgccttcgaacgggcaggtgacgatcacgggccgcaccaccggcgtcatcttctcgcacgcctggctcagcgcctcctgcatggcgcgcgcgtcgaatccctcgaccggcgtgaacccgttcttttcggacaggccaaggatgatccagccgccggagccgttggagaacgcggacagcgtatcggtgatggtcgaggagatcttgcgcttgcattccttgacctcgcactgctgcgtatcgttgccgatcagacgcatgagttcgatcagctcagtcattttggcagtatagtcatcgaccatggcggcctccttgacaccattgtgccccataatccgccgcccgctcgcctccagccccgccggttcaccccaattcatccagaattcatgggttactggtcaaagtacgaatgattgccgagaggctgtcgtatatgcgcaatagcggctgcaaactgtgttgcgccagagcgttcaagtcttttagcaaagtcgggaatgtttatcggtggccgatgtcgagaatcgataagctcacgtatggcgctagctgtggcttccggatttcgtctaagtaatacacagagcaaatcatctggcgtgatgacctgaatggagaaagagtcaagcagtttctggggaaaatccttgatattgcgcgtggccagtgcgtctgcttgtccctgtgccgcagccgcaagtacgtgacgatcatccgggtcaggcagatcgaattggctccattccgattcctcaacatgtatggaggattcggggaatgcctggtccatcattatcagtctttttcggaaggcttgttgtgcggcgtcaggcagtgttcgggaggcggcttcctgtgcttcttgtaatacgttaggcgaccacaggggaagaaaaaggtcatgctcggccaaggtgagcagaacatcggtcaaggtgatggaatagatgacattggcatcaagaaacaccgaaagcatcggcccgtactctccttacctccgataccgcatgcatggcttcctgcggggtcggctcgggcaggtcgtacaattcggcgtcttccccgacgccgatcatttggctcagggcgcaatccttggtgtgtttcgaggctcgcttgtattcaagcaggtcttccagccggatgcgacggtgattggacggacgtgaaaaaggaataagtcctttatcaagcagtcttatcagtgtttgccgcgaaatgccgagcattgccgccgcctgttcggtagtcagatcttgttcggtggcactgatcgttacacttttgccttcggcgagaaggatggccgtctgcctgacggcgtcgcaaagctgcgaaggtaggggagtctccacgccgctggcatctttgatgaagatccgctcatcaagaaatcgtgcggtgaatgcctccaatgtcgtcatgtcgtcaatgttgatggatggaaggattgttcttggaatggtgagtttgtcggattctgccatggtgacctcctttttatctatcacagtataaaacgtccaaagcgaccaaaacgcctaaaacgttcaaactatgcgaattgacgatggttatcgagttttcgaatatgggttgctactggccgctaacgaggtcgaggagggcggattatgttgggtggcgtgggaatcttgcgtgtgatttgatgctgccgttgctccgattgagggtatgtgggccaagggccgggtgaagttggcgtccgagccgaagggcaaacggttcggtttgttcgatgccaagggtcgcgtggtggatatcaaggcgccgatcggccccgattggaaaggcgcgaacggcgtgaagccgattcttgccgtcatggtcggcgattcattggtggccggatgtggcgtggacgaccagtcgaaaggcattatgccgctgcttgccgcgcgcgtcgcaagcgtaccggtcggccggtggcctggcgtacggtcggcaagctcggcgcgaccgcccggcgcgtgcgctaccggatgatcggcgatatcaacgaccggccggatgtgctgatcgtgtgcgtgggcggcaacgacatactcgccggccgttcggtgcgcgaatgggccgccggcctcgcgccggtgctggacgcggccaagaacaaggccggcagggtggtgcacacttttgctggtcactccatccaccactgccgcgaaaccatcggtgatgatcagcctgtcctcattgagcgactggtcagacctcttgccttggcagtgctgttctatgatgtgcatagcgattttcgattccatggttgtcagaacgcttaaaggcgtctactggctcattatgatggcagcagtgacatgcggatatggggggcgctgtctaaatgaaagtgcaacaccctttagattggagattgtccagataaccagtgaaagggtgttgcactttcatttagacagcggggggggacgattgagaagtcataattccgttacactggcaaggacaaggaactaaggtatgcgcggattgtcggtattgagcagggcgttgcgatgggcgttggtgggtatgacgttttcgatgctgtccaacgcgattttcgaggggtcggtgattccttcgattctgatcgtcggactgccggcatgggtgatcgcgttccgcaagacgttcaatctggtcatcgacttcgcttctccggtatccgcatggatcgtgcagcggttcggctcgttccgttcgcttgcgaccacggagggcgtggaaggcgtactgtgcctggcggtcgcgctggtgcccaacggttggacgtattggaagtggctgctgctggccctgtcatgcctgctgctgatgaccgggcaggtcatcgacgtggcctccgaagtgttcgaggtggatgcggccggcgacgacgatgacatgctcgtcaagtacagcggctacgtcgccgtgattgccagcgtggccggtacgttgctgggccaggttgccggatcggccttggccaacgcctccatcatggccatgctgctcacctcgtcggcactgtcatttgcctgcgcgctgacgcgattccgcacccgcgagttcatgccgggattcggcaacgatggtgcgggcggcgatgacggcgacggctccgccgacgaatccacggcggccgacacgtcacacgcgccgcagcgcactccggtcacccgcttgacccgggtcagactgctgatcgcatcgctgctgcttgcgctgattccgtcgctgtgggcaagctatgcgttgctgggcatcggctcccggtacggcagcgatatgctgaccgtggtctacgcattcggcggcgtgggcagcatcgtcggatcgtttgtctacatgcggctctccgcaaaactcggcatgcgcgccgtgtccgccatcggggcaatcgccacggcgatttcccttgccgccgtactggttcccgagtttgccgcggtgtgcgtcggatggctcatcaacaacctcggctatggcctgctggcgcatggcgtgatcgtatcgcgacaactgctgctgagcggtggtgacctggccaaattcagcggccgtgccaggttcgcgtatgcgatcggcggtgccgtcggcacgtggggcggctggctcggctccgcccactggcagatactcgccgtcgtggccctggtactgtgcgccggattcatcccgttgctcaaggccatgcctggcccggtacggcactgaggtgacggatggggccggctggcatctcgtgcgccgggcgatttcggcagattttgccgtgctgatgtatgcaggtgttgacgttcggcgaggttcccagccacattgctgtgtgattgatgccgctcgataggcatgtcaggccggacacaccacggcgatgccgaatgggcgacgggccgacgacccgcatcatcgcagcagccgggttttgccatccttgacaagcagggcctgccggttggtgaggggcttgagactgagatcggcaccataccggtcgagaatgcgttgtgcggcgtggcccatggccgttgcatgatggtgggggaccacgcggaaatcagccaagcccaatcctgcgtaatcggtgagatcgggggctttgtccgtgcggtccatgagcttgatatagccgatgtcaggtgccgtgatgaccgagcccgcggactcgccgatgtacggcgtgccggcgcgcacctgctcgatgatggcccggtcggcaccggtgcggcgcaactcctgcaggagaaagaacgtgttgccgccgcccacatagatgcagtcggcctcggcgatgctacgcgtgacgcgttcggcggacccgctcggcacatcttccacatccagttgctccacctcgaaaccgaggcgttgcagcgcgtgtttgctcaacgccgagtgaaccggcccccacggttccacggcgctcgccgtcgggatgaacgcgacccgcttgccttgcggatgcggttcgacttcatgcacggcggacgaggcgttgcggaatatcgaagtcagcagcatcgtaaccataaaagccttcttcacatatcgactaggcgactatgcggcagtgtcggccttgaatatacggaagtgttcgtgcgttcgctctgggtatatccggcctgatcagcgggactcggccaatgtgatgccggccgccgtcatctgtttgcgggccgcgacaccgagctcctcgctgaccggtacggtcaggtcctcgaacacggtgacctcgaaaccgaacttcccggcatcgagcgcggtgtccttgacgcaatgcgattcggcgatgcccaccacatccacgcgactcacgccggcggccttcagcgcattggccagcgtcttgccggcggattgctcggccgcaacctcctcacgggtctggatacggtcggtattgtcctcgatgccctcaaaaccggaatatgccgccgaatactggcccttcttgaaatgatgatggataatcagcgccttgatcgccggatgcaattcggcgttcggcgtgccggccgcaccatgcttcggccacgtgtccacgaaatccggttccgccgaccagtgcgcgcccggctcgatatgccagtcctgcgtggttgcgatatacgcgtactcgctgcgatgcgcgttcacataatcggcgatccgctcggcgaccgcgttgccgccttcgactcccagttcgccgccttcacagaacgtcggctgcatatccaccacaatcagtgccttggtcatcatcattccccctattgccttggattcgttttgaatattgtctcgaactcgacgtgcgattgctctcatcatagccatgcgcggccctgtgggaaacgttcgggcttacactgcaagcagcaatcgaatacaagaaccaggggagggtgaccaagaccatgctggaccatctgacgttgcacgtgaaagacatcgaccgtagcatcacattctacaaacaggcgctcgcaccgctcggctatatcgtcaaggcgcatcatgagcccacgctcggattcggcgtggatgacggaaccctgcactccgatttctacgtgtcgccgattgacgggccggaggcggaggcttcgccggtcacgccggtcacacacatcgcgttcctggctgacagtcagcaagccgtgcaggcgttccatgcagccgcgctcgccgccggcggccgagacaacggcgctcccggtccgcgcccgtaccatcccggctattactccgcattcgtgctggacccggatggcaataacatcgaagccgtcgtggattgggctcattcgaacgagtaaaaaacatatccgtgtcgtgcctcaggcagcatcgacggcgtaggctccagtcagtcggatttgtggtcgcgacggcgttataggtcacatcacgcaagcgtgacggtgacggtctgctcggcggtttcggtgccggtccatgtgccggctctgcggttccaatccatgccgtccgcgtgcagtgcatcaatgccgtattgatgcgcctgtgtgaccagccaccctgccgtctgccagcaaagtcgagtgcggttgtcggcggacaggccgtccggcagcgtgatcgtcaacgttgtgctggccgtattggtcgcagcgccgttgttcgtgccggttttgccatttaggggcataaccgagaccttgacattcggcagtgtagcgcttatggcggcaaccaacccgtccgcgtccgaggaggttgctggctccaacgcgcacgtgacgcccgccgaccgttcgccggtcagccccgaggcccaagcgcgtgccatcgcatcccatgtggcatatagttccgggtagcctgagcgctgcacctcctgcgcggcgtcctccaccggaatcgtctcccaatccggcacctgcagcagatggtcgtagaagatgtttgtcgcataggtcatgtcggacacctgctccgccgtgccccagccttggctgggccgctgttggaacaggccgagcgaatccaagtcgccgtagtccagattcgtcagcctcgactcctgcatggccgtggcgatggccaccgtcgccgcgtgatccggcagtccgcgcgtgacggcgatgttcgcaatcagcgccgcgttctgcgcctgatcaggcgtcaaggtgcggcgggctccgtcgggcgacaccgccgcgcaatatgcttcctcggccgtgcgcgcggtctcgtgaggcgtgaatagccgtggcagcagcgtccatgccgcgatcagcgccgcaacaacaagtatgacggctgcaatcagcgcgcccgcgccatgggagcggcgtctgccgcaccgcacctgttgtcccattgcgcctccaatatttcggtgtcatggctgaccgtgaccggctggcctatgcagcatgcgagatttgtcgtgttccggctcggccgtcatcatgacagcgtggcatatccacctgaacggcggctgcgccatcacgcgactttgtgacaattcttcacgcttcctgacatccgcgcaatcagaccggggaatgatacaccgacatctctattgcaagttcgacgcagctgataagtcgattcgcaatcgtctatttgcgtttcaaggggctgatttgctcgttccgagacatccacttccgtttcgaggggctgatggccgagtagcgacagctccaaaacggcgaaatgacgttggcatgaagccattcgtacttgggttttggccaatgaccagccccttgaaacggaagtggatgtccccaaaccacgaaatcagcccctcgaaaccgagaatggcggtcgggattgctccgacaccaggggagctgctgccgctattgtgtgaaaggcgatttgtaccgggttgaaggagaggaacacatggcacaattgcagccgtactgcgcgattgagggcaatgatgatggattgcccgtcgtgttcgtgcatggcatgggtgtggaccatcgttcgctgatgatgctcgacaaggcgtttgacggcaatgattcaattcgccgtatatatctggatctgcccggtttcggccgtacgccggcattgcccgagcatgcctgcgggctgccggaaatggcggattggctgcaaacggccattgacggccttgtcggtaaagcggctccattcgccatggtcggcaactcgatgggcggtgcgcttgtccgcgaagtattggcgcgcgaacctcgccgagtggccggtatggcattgatcgcgccggtcgtggacccgcagcatgccggccggcatgtggccgaacatgtggttgcacagcccaatcccaagctgacgcactccttgccacaggaacaggtgttcgatttcattaccatgggcgtcaaccagtcattcgacgcgtggcggcgctaccaacggttcatcctgcccggcgtggcgttgtgcgaccgtgcggcatgcgaacggctggatcagcgttattggctggccgataatcccgaggaaatgctcggcacatatgcgggtccggtgctcatcgtcaccggcaagcaagaccagatcgtcggatacgaagaccagcaagccctgttgccgcactatcccaacgccaccttcgtgactctggataatgccggtcacaacgcgcacatcgaccaacccgaagccgtcatcacgctcgtgcgcgaatgggtggctcatatggcgttcgttccgttgagctgacggtctgctgacagtctgccgaagcctatatgcatatgagcgaccaatgccggttgacgcaatacgccttgcaaggtatatcgtttttcgatatagtcatatcgatgttcgcggtgtcgccaaaaacgtcggcacctgaaaggaccgggctatgaaaaactacatgaaccgatgggtgttgctcgcgttgaaagccatcgtgattctggtctggctggcctgcctatggggccaactattcgccgtaccgggattgagcggcgcgctggccggcctctgcccgagccagacgtcgatgcactggtcatgtctcattatgggcgtgctgttcctgctctgcatcgaagcggcgttcgtggccgtatggaaactgttctccttgtccggatcgggcgcgaactcgagcaggtgatttgagatgacgattcgcatcaatctcgacgtcatgatggccaaacgcaagattggcgtcggcgagctcgccgaacaaattggcatcacgcccgccaacgtgtccattctgaagaacggacgtgccaaagccgtccgcttcaccacattggacgccatctgcaaggcactcgactgccaacccggagacatcctcgaatgggaagatgtcgattgatcgacacgccaccggctcgaactcatggttcaacttgtagtctctctcaaaatcaatgatgccctatcatcctgcaagacgatagggcatcagcatgtgattatgcgcagctgatatgtcgcgttgttatcactcggcgtccgcggccggtgcctccttgggcgcggagaggaagtgctcctcgctgggcagcacggcgttcaggattacggccaccacgaacgacacggcgatgcagttcgaggcgaagatttgttggaacagtgccgggaactgcgcgaagatgtcgctcacctgggtgaagccgatgccgatggtcagcgaaagcgccgcaatcgtgatgttgcgctgcgtgaagcccgcttcggcgatcatctggaagcccgaaagaatgatgttgccgaacatcatgatcgtgcagccgccgagcaccgcctgcggcagcgagttgaacacctcggcgatggccggcacgaagctcgccagcaccagaatcagtccgccggagagaatcaccttgcggttgacgaccttggtcatggccaccaatccgatgttctgcgcgaacgaggtcagcggcaggcatccgaacaggccggatacggtggagatcaggccgtcgccggcgatggcgcccgcggtctcgcgttcggtgggcgtacggttcaggcccaccttggtcagcgcggcggtgtcacccagcacctcgaccgaggagacgacgtagagcaggccgatggagatgatcgaaccccagtcgaactcaggcttgaacggcatgaactgcggcacggacacaatagcgaggttctggaaaccggagaaatcgaccttgcccatgcagatggccgccacatagccgaccaccaggccgaacagcacggacagctgcttggccgtgcccttcatcaacagctggaacgccaggcaggcgaccaaagatataagcccgagcgtcaggttctgccagcttccgaagtccttggctccgctgccgccgccgaagctcgtggcacccacgttaagcagcgagaagccgatcgacgtgaccacgatggcggagacgatgggcggcacgaaccgacgccaatacttggccgtcaaacccagcacgagttccagcaggccaccgaccattaccgcgccggccactgcgccatagcccttgtctgcgcagatcgccacggcggccgccacgtaggtgaaggagatgccggtgaccatcggcagacgcgagccgatgagccacgcgccgtacagttgcaggcaggtgcccaggcccgccaccagaaggccggcctggatgatggtggccgattgggccggggtcattttcgcggccgaggcgacgatgaagatcggggcgaggttcgccacgaacatggccatcacatgctgcaggccgaacggaatgcccttccagaaggatactggcgcgttcagcgaagacagcgcctcaaaggatatggaattcttggttttcttctctgacatgattcttttcttctctctgttgctcccgctggcgggagcagtcaatgtgctcagtgcctaaatgtgatttcgccggtctcgggattcatggactcgacgatggccagcgaatccacatcgtagccttcggcacgcagcgcgtcaccgccgccctggaagcccttctccacggcgatgccaatgccctcgaccgtgacaccggccgcctcgcacaggtcaatcagaccgcgcaacgccttgccgttggccagaaaatcgtcaataagcagcacatggtcgccggcgttcagatacttcttggccacgatcaccgggaactccttctgcttggtgaaggaatagaccgtggtggtgtactggtcgccgtcaaggttgatggactgcgccttcttggcgaacaccaccggcacattgccgaaatgctgggccgccacacacgcaatgccgatgccggacgcctcgatggtcagaatcttggtgatgtgcttgccggcgaaatgagcggcccatgccgaacccatgcggtcgaacagacgcacgtcgcactggtggttcagaaacgcgtccaccttgagcacatcacccgccttcaccgttccctcgctctggattcgctcctcaagttcctgcattagacctcccattgctgtatgtcagtgaatgatatggatacttgtaagtgtacgttgtcctgcgctgacccgtgcatgtggtaaacatgaatgtcgcgattcaaagggaggcaacagtgtacgacgagccggaagtcatcgcacgcagcgcgcaggaactcgtaggcgatctgaacccgcagcaggcggaagccgtgcaataccgcggtcaggcgctactgatcggcgccggtgccggctccggcaaaacccgtgtgctgacccgccgcatcgcctggatcttgagccagttcggcgcatggccgagccagattctggccatcaccttcaccaacaaggccgccgccgaaatgcgcgaacgactcggctcgctgatcggcccggtggcccagcgcatgtgggtctccaccttccattccgcctgcgtgcgcattctgaggcgcgacggcaagtccatcgggctcaagtccggcttctccatttatgattccgccgactccgagcgactcgtcaaaatcatcgccaccgaattcaacctcgacatcaagcgctacactccacgctcgatcctcggccatatctccgacctcaagaacaatctgaccggttggaaggaaaacctcgccgttcacgcgcctgacttcacgcctggccagcgcggctaccagttcggcacggtgggcgaccttgaagccatctatgcggtgatctacgccgaatacgagcatcgcttggccctggccaacgccgtcgacttcgacgatctgatcggccgcacggtcgagttgctgcgcaccgacccggccgtcgccgagtactaccatcaccgcttccgttacattctcgtcgacgagtatcaggacaccaaccacgcccagtacgtgcttgtgcgcgagctggccggcgtggacacgggggagaaggccatcccgggcgcgccgaacgccggcaagtccggccccgcctggatcaccgtggtgggcgattccgaccagtccatctacgcgttccgtggcgccgacatccgcaacatccaggacttcgagcaggacttcccgaacgccaagaccatcatgctcgaacagaactatcgttcgacgcagaccattctggacgcggccaacgcggtgatcagcaacaacgagggccgcaagcccaagaaactgtggaccgcgctcggcaagggcgagccgatcgtcggctacgcggcggacaacgcccagcaggaggcccagtgggtggccaccgaaatcgcgcgcctgcacgccgaagagggcatctcctactccgacatggcgatcatgtaccgcgccaacgcccaatcccgctcgctcgaagaggcgctgatcaacacgaatcagccgtatcagctcgtcggcggcaccaagttctacgaacgtcgcgaaatcaaggatgcgctggcctatttgcaggcgctcgtcaatccggacgacgatgtgaatctacgtcgtattctcaacgtgcccaagcgcgggcttggcgaccgcgccgaaggcgtgctgctcgcctacgcgcgcgagcatggcaccagcttcttctacgcactcatgcacttggatgagatcgaggtgccgacccgcaccgccacctcgctacgagcattccgcgatctgatgggcgcgctctcgcagttcacgcacgcgcacgactccaagcccagcgagatcgtggccgaagtattggagaagtcgggcttaagggccgaacttgagaaatccgtggatccgcaggacgcctcccgtctggagaacctctcccagctgcagtccaccgcagccgaattcgaacagaacacgcctgacgccacgttgtccgcattcctggagaccactgcgctcgtggccgactccgaccagctgcccggtgaggcggaggactccggcaaggtgacgctcatgaccttgcacaccgccaagggcctcgaatacccggtggtgttcctgaccggcatggaacagggcaccttcccgcattcgcgttcgatggaagacaccactgaactgcaggaggaacgccgactcgcctatgtgggcatcacgcgtgccaagcagagactgtatgtcacgcgcgccgccgtccgctcccagtggggccaggccgccgatatgatgcccagccaattcctcgacgaaattccggattcgctgattgattggaaacgccgtgaagccggcgtggagcgtatgcgcgccaactgggagaccgatggattcgccgacgatttgggcggctgggatgatgacgatttcggcggtgccacgtttggcgggtcgtcgacgttcggctcgcgtggttcgtccggttcgggttcgtcctatgggtcgcggtcgcggtatgggtcgtcgtatggctcgggttccggctcctcgtcgtatggttcccgttcaggttcttcgtacggttcccgttcatcatcatatgattcccgctccggctcgtcctcctacgggtctcgctcccgttcggggtcgtcttacgggtcgcgttcccgttccggttcttcatccggttcatatggcggcacccgtggcggcaaggtcaccacgcgccgcaccacaccgaaatccggttcgaccggctctgccgtgcccagctcgaagctcaccaaggacaatggcctgaatatcgccgacttcgccgtgggcgacatgatcagccacgaccagtacggtctcggcaaggtcaccgacgcgcaagacaagggccgcaattcggtaatcaccgtggacttcggctccgccggcgtcaaacgcctcatgctccgcgtagcacctattgagaagttgtagatagattggcccctctgacgaggggctgagttatataccaaataaattcacaaaaaacaagacttgtgttcttcatcactatctgggcataatgcggaggttgcgcctacgagccctgggaacaggggagaggaaaaagtagttatgaagaacaagctgtttgcatccgtgcccaatattctgttcggcgcgctgatcaccatcgcgccccagacctttgcgcacgcctgcaccggccatgacatgccgggtgcctgccactactcgcagcaggcggccaccggcatcggcgtcgtcatcctcgtgttgggcgtcgtggctttgttcgtcgccccgcagattcgcatcggcctcaatatcgccgccgcagccaacgccctgctactactcgccgtacccaccttcctgatcggcatctgcaagggcgcgatgatgcactgccgcatggttatgctgcccacgctcatcgtgctcggcgtgctcaccatcgtgttcgcggccatcgccatctggctcgactctcacgccgccaagcgcaactgatcgagcagacggccggagcccagccattccgaacgctggactccggtctcgcttattgcaaccgcactataagcaacataaggactcatcgtgccatcccatatcgcattgcgcggccttccgattgaaaacctcaaacgcaagccgttccgcaccggcgcactgctcgccgtcgtcaccatcctcgcgctgacgttcttcggcggcaccatgctgaccatgaacctcaacaccggcatgaccagtatggagaagcgcctgggcgccgaccttatggtcgtgccgcaaaacaccgcgcagaaggctgaagcgctgctcaccagcggcaatcccagcactttctatttcaccaaagacatcgccgacgaggtcatgcaggccgacggcatcgcacaggccaccgaacagacctatatatcatcgctggccgccgcctgctgtgccgaaaagctgcagatcatcggttacgacccggacactgacttcgtcatcgaaccatgggtcgcatcccagttcgaaggcccccttgaagacggtcagatgattgccggcgcaaacgtcaacgtgtccaccgacggcaccatcgaactctacggccataagtggccggtcatcgcccagctcgccaacaccggcaccagcctcgacaattcggtgttcatcaaccaaaacaccgtgcctgatatggtcgccgcctcggccaaggtctccaagcaggtcatgcccgccgaatatgcaggcgaagccgtctccaccgtgatgatcaagacgcagcggggttacgaagcgcagaccgtggctgaaaacatcaagcgtcttgactcccggttcgccgatttggggtacgtataccccggcggcatcaccgccaacaccagaacttcgctgaccgcgcttgtcacctacctcaagattttcgtggcggtgatctgggtaatgggcgtgattgtgctgctcgccgtattcgcctcgtcggtgaacgaacgcaaacgcgaattcgcgtccctgcgcatcatgggcgccacgcgcggcatgttgaatgccatcattctgaaggaatccgccatcatcggtctgatcggtggcgtaatcggcgtcggcgcggccagcctggtgattttcccattcagttcgctgatcggcaaacaacttcaattgccgtatctgcaagccagcccggttgcggtgatcggattcattgccgtgaccattgtgtgctctacggtcatcggcatcatcggttcgctggccaccatgtggcgtctcggccggcccgaagcctacctgaccctgcgagagggggagtgatatgactgagacaactacgccgactcggctgaccacggttgagccgaccaagctccagccgaccacgccagctcagccgaacgcgccgactgtgccggattcgccgcacgtaaccgagacgccctccccggaccatctgctgaccttgacggacctgacccgccagttcgtccgccgcggcacgccgttcgacgccgtcagccacgtgaacctcaccgtcgatgccggcgaattcatcgccatcgtcggccggtcgggcaacggcaaaagcacgctgatcaacatggtcgccgggctgattcgcccgacctcgggaaccgtgagcgtggctggacgcaatgtggccgacttgggcgataaagcactgtccgtgctgaggaatcgcaccatcggattcgtgacccaaagccagaccctgctcggcaacctgaccgtgctcgacaacgtgattctgcccgcaacgatgtttccggagccgctgccgttcgcccaaaacgcagaagcaacggatgccgttgctcaggtggacgctgttgcgtcgaccgatgccgtggcacaagccgctgccaccaatgatgaagcagccgccgacctgttcatgccggatgtcattgcgccaatcacagaccgggaaaacacgccgtcaaacacggctgcgagccgtccggacctgttcgccacccgagctcgtatgctgctcacccagcttggtgtcgccgatctggcagacagctacccgcgcgagctgtccggcggtgaaatgcggcgcgtctccatcgcccgcgcgctgatgaaccagccgagcctgctcatcgccgacgagccgaccggcgacctcgaccaggagagcaccgacatcgtaatgcgtctgctcagagaccaagccaacaacggcacggcgattctcatggtcacccatgatcccgatgcactcgaatacgcagaccgggtgtatcgcatggacgccggagtgctgtccatagcctcggtgtaatatagtctgctggtgtctgccaacaggtagataccgtctggagtcatagcccatcagcgggtcggcggtaggtgatcgcaagaaaaccaacccgttcgtgttcgttcacgacgaagcgctggggaggcccggctcagcgcttgccaggcatatgcaaggcaagcgttccgttcagataacgacagaaggattaatccaatgacgaacgttcagcgttctcgccgtcaggtgcgtctgtctcgcgccctcggcatcgcactgacccccaaggctcagcgcatcttcgaaaagcgtccgtacgctcctggcgagcacggccgtgaccgccgccgcaccgagtccgattacgcggtgcgtatgcgcgaaaagcagcgtctgcgcgctcagtacggcatctccgagaagcagcttcgcgccgcttacgagaaggccacccgtactgccggccagaccggtaacgccatgctgaccgacctcgagacccgtctcgacaacctggtgctgcgtgccggcttcgcccgcaccaccgcccaggcccgtcagttcgtggtgcaccgtcacatcctcgttgacggcaacatcgtggaccgcccgtcctaccgcgtcaagcccggccagaccattcaggtgaaggccaagagccagaccatggttccgttccagatcgccgccgaaggcgtgcaccgtgacgtgctgcctgcggtccccggctacctcgacgtgaacctgccgtccctgaaggccactgtgacccgtaagccggaggtcgaagagatcccggtgcaggtcaacatccagtacgtggtcgaattctacgcccgctgatccgggccctctggtcaacaaatccaggacataccgctcgaaccccgcgcttctttcgagaagccgcggggttcctgcgttgtagggcgattactggccgcacaccgcctgacgaatcatcgtcgcgtacgcataggcaccggtcatattcggatgaatgccgtcatcgttgaggtattcgctatgaccttcgctatacccatgccaatcgatgatgcccacgtttttgttcttcttggcggcctcacgcagcatcgtattgttgttgttctcctgccacgggtatggcatacggatggtgatgaagtatgtcggcttgccgccggtcaggtcaatgagctgttgcacttcctgctcattcgaaatcacgccgttcgtgccgaggccaaacaccaccacactgccactgtggccggcagcggtgtcctgctgatacacatccaccgcctgcggcatctgacggttcggcaggccatcgataaaagcgttcgggaatgcggcctggatggcgtccgaagtacccgacgtcactgaatcgccgaccatcatcatatccgcgttgcagctttccgttgccggatcataggcgtacttcgaaatgtcaagattgtttggcaccttttccgcaatcggtttgatggtgggcggctgagaatccgaaccgttcttattcgcgtcatcggtattggtttcgccgttcgcggcattcgtggcagaagactcgggctcgggcttcgccggtttcttgaccggcttggcgggtgccgcgagttcggggcgcagctgaatggctcgcgcttgagcgatgccattccaatccaccggtgcccacgtcagcaccacaacggtcaccaatccgataaccgacatgacccacgcgcccgggcgcagctggtagccggctttcggcagcggcttggcatgttggctgcgaggcatctgcaccgatttacgggccgcctcgaccagctggtagaaggcttccgacgccgccaacaccacgatggcctcaagaacccaaccccaccacggcaacgcctgcgttcgtgtcgccgggttcatgaactgcagcagcggataatgcatgacgtacagcgagaacgatcgcgacccgatatagcgtaggggagcgcaacccagcacgcgcgaccagattgagtcattgttcacggcacaggccaaggcgcacaacgatatgaacgcggtaatcaggtacccgccttggtacatgtacgacagatacccgttggcgaaccagaatccggccagcagtgccgccaaagccgcggtgccaagaacattgcagacgatagtgagacgggcgcccgtcttgtcgccggcctgacgtccgatctgcactgtttgcgaagccgctccagcttccgcaacttccgtacctcgcgaggaaggcgcaatccagatagccaacagcgcgccggcggccagctcggcgagacgagtatcggtaccgtaatacacgcgggaggtattggccgggtcaaacagcagcaccatggcggcggtggaagcagccatgatgacaagaatcgccatggagcgcacccatttggacttggtgattttgccgagcaccaccatcagcaacggccaaatcagatagaactgcatcgtcacgcccaagaaccacagatgggtcagaggagaaggcaatccggccgcctcgaaatacggcaccttgcggaagatgtacacccaattgctggcgaacaaggcgctcggcagcgaatcggaaaccactttctgcaacaggctgggagcgaacatccaagtgagccaaggcaccacggcaatggtcgccagcatcaccggccataaacgagtaatgcggcggatcagatatcggccatatccaaaggacccggtgcggtccaccatgttcagtactgaacgtgtggcaagaaaaccggtgataacgaaaaacatcgtcacgccaatgaatccgccctgcaatagcgacgggcgggtgtggaatgctatgactccaagaatcgccagagcgcgcagtccatcgatacccctgaaatgggcaggctcagacgattgagatggtgcaggtttcgaggttatgctcatagtaccctaagtgtactctcaggaatcgtcaggtatactacccggattacgcatatctcaggtagtgacctatgccgttatgacttatgacttccggcagcccgcaccgaaaccgccggaatggtgacataatcggaaccatgattcttcatctgcatttggtccgtcacggacagacctatttcaaccgatacaaccgtctgcagggatggtcgaattcgccgctgaccgagtcgggcgtcgctgatgccgtcaaggccggtgagcgactgaaaggattgacgttcaccgccgcctactgttcggacaccacgcgtgcccggcagacggccgagaaaattctcgacatcaacgaagccgcgggtaacccgcgccccgcactcgtgacggacatgcacttccgcgagcagttctacggctactacgagggacttgacatggccatggcctggtacgccgcgggagcgcctcacggcgccaaaacctacaaccaaatcgtcgagaagttcgggttgggggcctcgcgtgattttctcaaggaagccgatcccttccacgatgcggaatccgatgaggaatattggacgcgcgtcgaaggcgcgttccgtcttatcgccgacaactcgaatctcaaggatggcgacgatgtgctgcagatttcgcatggcaacacactgcttagcctcggccaccggttcggcggccctgacctcgatctgaacgaacgcccggccaatggttcggtaaccgtgctcgacttcgacaccgacaagccgttcggcgaggccgtgaccatcgtttcgtacggcaagtagcaaatagcaagcaatacatatcgaatagcacgtacggtccacggcggcacgccgcaaacgaaagcgtcagcaggacacctttcgcctatagccgcatgcatccacgcgcacggttttcgccctgcgcgtgcaatggtatgccaagaaatagggaaggagtgctacccttaggcgagtaagtgtgaccgcaaggaggaaacaatgggagtcggagagatcgctggcctgatcgcggccatcgcgttcgcagtattggccggtttcatgatctatccgctgatcaggctgggcaagatgtttgatcagatatcgcagacggtccgggagtccggcgaacacgccatccccgcgctggacgaaggcgtgaccaccgtcaagcaggtcaacaagtcgcttgaagacgtgaacaagatttccgccgcggcttccaccaccgccaacaacgttggtgcgttgactgatctgtatggctctttcctcggtaagcccatcatcaagatcgcttccaccttctacgcgctgaaaaccacgggtcagtccttccttgcgaagaacgccgcgaaaaccaccgtcaacgacaccggcgagaagggggagtgatgttcaaacgcatcttctgggtcggcgtcggcgtggccatcggaatcgttgccgtcaccaaggcacaggcctatgtcaaggccaatacacctgatgcggcacgccagttcctgcttggccccgatcaggacaatgtgccgatgaaaacactcgaagggttggtcaacgagttcaatgccgcccgtcgagcccgcgaggctgagctcaaccgtcagtacatcgagcgcgccaactgacacgcgcatgccgccttgccatctagtcactgaaccagctagaacaaactagtcctcataatccagtctttttccaccaataccaggcgcaactgcgcccattacccaaacaaggagttcatccgctca

SEQ ID NO: 879 - DNA, 10902 bp, Unknown
  R14_18m  MAG No. k141_17091
aattgaacttctacctctattccacggacttgagcgagctgaccgggtctacgcgatcgagcactgggttggtgaacagctgcaccagcagcgcgaacgccagcgtcgccaccacggcaatcgcatagctgtaccagtgcacttccacttcgaaatacagcgacggcatattcaacgcagcagtcagtaatccgcctatccacctgccaagcggcagaccaaccaccacacccataccggtcaatatcatcatctcgcgattcacgtagttgtgcacctcgcggtcatagaagcccagcaccttcagtgtggccatctcgcggatgcgttcggacacgttcgtattggccaacgtaaacagcaccaccagcgccaggccgccggcgagccccacaatcagcgccaccacggcacccatcaaatcgaacttaaacgtggcggccagatgcgcacagctcacggccttgagcaccgacgattcctcgcccaaccgatccgcatattcggcctgttcggtctcggaacctttcagcttggcgagcatcgcgttccacgtcaaggtcgaggcagtgccatctcccgaagccgaagacgtcacaccgccggccgcaaacttctggtcgtacagtcgctcactgatgtacacatcagagccaataagattgcgcgtcacggccgtgacctgcaccttggcccggctgctaccgccattgcccagcgtgacggtgtcgccggcatgaatattcagcgagttggcggcggactgcgatacaatcacgccactatcgtccagcgctacagtgccgccacccgctttgccgaagatattgggcagcccaaaccatccatcatcgccggcttgttccagcgtgaccatatcgttcaagatattcagcgaatcgttgggcacggtcatcagctgcacggtttcgctttcctgcgccgcattgctcatctcgccactatccacgcgcagattcagcgtttcggtggtttggccatcttgtgccacctgcttgcgcatcgcggtggcgtcatcgtcattggccacgaccatcaggtcgtactggtagatctgctcgtattgtttgacgccaatcgtgtcgacggtgtcattaatcgcaaatccgcagataatcaacgctgtgcaaccggccacgccgcccacggtcataatcaagcgcgacttgaatcggaagatattgcgcgcggtgactttgccgaggaagttcagccggctccataccgggcgaatccgctccagcaatatgcgagcgcccgctttcggtgccttcggccgcatcagcgcggcgggcgtgtgccgtatctcctcgcgacaggcgagcgcggtggccacgcccacgccgaccacgaacagcacgatgccggccgaaccgtacagccagtcgtattcgagtcgcacaccgggcaatatatacagtccctcaatcaccaccagcaggaatgccgggatgccaaggaatccgaccagcagaccgatgccgccgccgaccaagcaggcgagcaacgcgaacagcagataccggctggacacggcgagtccgccatagccgagtccaaggtaggtgccgataagtccgcggtcttcctcgaccatgcgggtcatggtggtcaggctcatgagcacggcgaccagcaggaacacaatcgggaatgcgcggccgatggattcgatggaactgacgtctgatttgagcgagctgaatccgtcgatcgaagcgcgcgtctgcacataccaacgtgcgttggccacatcgtcgatgcgccgttgctgcttggcgaattcgctttccgcttcgcttcgcttcgcatcgagttcagactgcgcatcatccagtttcgccttgccgtccgcgagctgttgttcgccttcttccagctgccgctcgccttcttcgagctgctgcttgccgctggccagttgggcggcctgcgcttcaagttgcgccgactgggtttcgagggttgcggcattcgcttcgagttccgcggatttggtattgagctgtgcctctcctgcagccgcttcctgttccttggcggtcagttgcgcgttctgctggtccaaggtggattgtgcgggggcaatggtttcgtttaatgtgcgctgcaaatcggctttctgctgggtcagactgtctcgctgcgtttgcagttccgtttgcttggcggccagctgttgccgcagctcactgattgacggcacttcaggcagggtaatgccaaggcgcgcgagcagttgcttgatggcctgccatgtgggtgagttgaagtcgatattcgggtcaagttgcgccagtagattgtcggcctgttgaatcatggacagcatctgatcaatttgtgccacgccttggtcgatttgggtaatgccctgttcgattttcgtgcgattggcagtcagttccgtttgcgccgcatcgagctgtttgcgagccgaggtgagctgcgctttgcccgattcgagctgggtgcgcgcttcggctatctgctggcgaccttgcgcgatctgttgacgggccgatgcaatctgcgcacgtccatcggcgagctgccgttcgccatcggtaatggttgtcctgttgttctccaattcggtacggctatctcgcaatgtcgttttgttggcttccagctcggcccagttgtcgtcgatctgcttctgggcttcgtccagctgatcgttggcctcgtctttggcatcatccagtttgcgctgcgcgctggagacgatctgttgacgacgggctttctggcgtgtggcctgtatctgatgttcgatacggtcggccacggttttgatggcttcatcgtaggcatcggaaaacgtgtcaaaatcggacgcaccagtgacggcaaccgatatcgcagtgtatatattgccggtcacgccgtcgccgggtgcaaagaacgtatagtcctcggatgaggtggaccggaaggaggtcatgcccgaatagccgtctggattgctgaggtcgcgcgggtcgagtacgacgccggtgatggtgagtttcgtggggaactgcggggattgctcggcgtcggcgtccgtattggcgtcggacttcgcatcggatgccgaggcattggcggcgacacctaccgtatcggcattattggaatcgtcagtctccgtggccgctaccgatatgacggatgaagaggtgtcttgtggcgtcacagtaatggtgccgccaatcttgagtccgctatcgttcaggaattgctgcgtaaccgccacttcgccggccttgttcggcagtttgccctgccgtatgtacggctgatcaagcccttcggtaccgatttcctgcatggtcacggttttcttggtgccgtccaccaacgtggtcaccgtctgagaacgttcgggctgcacggtttgcacaccgtcgattcggcgcagtgccgttgcatcatcatcggtcaggccgtatgtggatagcacctgcaggtcatgcagtccctgctgatcgtaaaaacgaccggccgccagaaaagcatcgcggcatccggcgtagatgccggtcagcacggccacgccaagcagcgtgatgacggcgatcgagacgaacctcttccagctgcgcagccagcaacgcaacgtgtctttggcaaataccgcagaaacgcccgctcctcgaccgtcgttatcgtcgaggttcggccgtttcacagactgtttcacaggttgtttcacgaatcgcctcgcttgtttcacggggcgtttcacagagtgtcttgcagtgagcatcgccaattacctaccattcgatatcggcgatgggccgcggcgttgcgttgacctcctcgctggtcaccttgccggagcggaagcgaatcactttgtgagccatcggtgcaagcgcggaattatgcgtgatgatcattacggtcatgccttgtgtttggcaaatatcctgcagcaactgcagcacttccttgccggtctcgtaatcgagcgcaccggtcggctcatcgcacaacaacagcttcggctttttggcaatcgcgcgggcgatggatacacgctgttgttcgccgccggacagttgcgcggggaagttgtccatcctctcccccagtccgactttgcgcagcgtttcctctggatcgaaatggtcagggcagatttgcgaggcgagctccacgttttcgagcgcggtaaggttaggcaccagattgtagaactggaagacgaagccgatatcgttgcgccggtaggtcaccagttcctttttccgcagacccgtaatatcgcgtccgccgaccactacgcggccggttgtggcggtatccatgccgcccagaatgttcaatgccgtggttttgccggcaccggactgccccagaatcacgcttaattcgccttgttcggcggtgaagctggcctcgtcgagcgcgcgaatcacactgctgccagaaggatattccttgaccacatggtcgaattcgatatacgccatcgcacacctccaacgcgctcgtggcagccacctagccccataggccccgccagaacttcctgctatactcaagtaaaacaacactgtgtcggttctgcaaccaacagttggattgtgggttgtcggaacttggggagaaggccatgtccaaagaattgacggaaagccgccgcacccgttacacgagacgtgccatgcaggacgcgcttatcgagttgctgcgcgatcagccgctcggctccatcaccgttaaagcgttgtgcgagcgggccgatgtgaatcgttccacgttttacgcgcattatgcgagcatcgaggaactgctgcacgacattgaagacgaaaccatggcctgggtcaccaccgcactcgaacagctactcgcccagccagatcctgccggcatcgagcatgttattgagcgcatctgccagtacattgccgacaatcgcaatcatctccaagtgctgatgagcccgaaagcggatatcggtttccagcagcagctgctgggattgatttacagccagcgcggtgtaggcgaacagttgcaatcttcggcgggttacccagccgaggcgcagatgcgtatgcgattcgccgtgtccggcagcattgggcttttgcaatattggctcgccaccgatctcgcggcctctcccgaatcggtgtcccacaccatcttcaccatgtgtatgcctgccacgcagtgagcacagtgaattcagtgaactcagtgaactcagtgaagcgtgcggtttcataagcatcgctcgctatagcttcgcctgctcaccggccgcgcccacgcccgcgcttgcaatagcgcacaaatagacgattgaccatttctgagacgatacggcggcatagaataacgaacgttgcgcatcacggcaagccccgcgtgcgccaaacccaagaaatgtgagagaagagcacaatgagtactactgatgcgcctaagaagccgcgcgaaaccgacgacgtgccggtgccggccacgctgcgcaagtcattgaaaaaccgccacatccagctgattgcgctgggcggcgccatcggaaccggcctgttctatggttccagtgaatccatcgcgctggccggaccctcgattctgctcgcctacttggttggcggcctcgcgattttcgcgattgtgcgtgcactgtctgaaatgtccgttgaggatccgaaggcgggcgcgttcagctactatgccacccgctactggtccaagcgcgccggctttatttccggctggaactactggttcaactacatcctcgtctcgatggtggagctatcagtggtgggttcgtttgtgaactactggttcccggcgattccgacatgggtatcggcggccgtgttcttggtgatcatctgcgccgccaacctgctgggcgtctctaaattcggtgagttcgagttctggttcgccatcatcaagattgtggccgtgatcgccatgattatcggcggcctggccgtcatcatctttgtcctgcccaccgcatccggcgtgcgcgcaagcttcgcgaactggttcaccgtgggtaacggcttcttcccgaacggcctgatggggcagaattccgacggttcctggaccggcctgctgatggcactggttgtggtgatgttcagcttcggcggcaccgagctcatcggcatcaccgccggcgaaaccgaggatccgaagaccacgattccgcgcgccaccaatgatattatttggcgaatcctcgtgttctacatcggcgctctgggtgtgatcatggccgtagtgccgtggaacaccatcgatggcaagtccagcccgttcgtgcagatcttcgattccgtgggcattcacgcggctgccggtattttgaacttcgtgtgcctgaccgctgtgatgagcgtctacaactccggcctgtacgccaactcccgcatgttgtactcgctggccaagcagggcaatgcgcccgcttacttgggcaagctcaactcgcgcggcgtgccagtggccggcgtgctgacgtccgccgcgatcaccgccatcgccgtggtcgtggtgttcgtgtggcctgagttcgcgttcaactacctgatgtcgattgccaccattgccggcatcatcaactggacgatgatcatgctcaccgaaatgaagttccgtaaggtggtcgccgcgggcggcgctcccgaggattccgagctggccggtctgagcggccaggaggcactggacgcgattcacttcaaactgccgtttgccaaggtgaccccgtgggtggtgctggcgttcctggcgctggtcgtggtgctgatgtgcttctccaccagctaccgcatcgccgtcatcgccggcgtgatctggctggccatcctcttcgccgcctaccagctcactcaggcgaagaagtaaggctccatttgcgaatagctctcactgatgagcactcagtgagagctattcgcaaatgggatttattcatgaaacagctcatcgatgccgacgagctgaacgtcggattgagacgccgcagcatcgtcgaccagtgattgatcgaaaccgccgagcgaaaacagcaggtatgttcgctggccgataccggttcgcgcagcacggtctcgcagtagattcagcacggaacggtccaccggcgcattgcggaatttgcactcgcccacaatggcagcatcagacgcattgtcaacggccatcacgtctatctcatcctgacgatcccaccaacggccaaccgcacgcgcacggaagggcaaccgtccagcagcactctcacgccacatccattcacggcacagaccctcgaacggtttgccggcaaaatcatgtaataccggcttgatacgacgctcgtatacgccttccacatcgccccgctccaattccgaacgatacggaaagacaaacgaataccagaatcggaagaaattgtcgctcagctgatacagcccacgcgaacctttcgcccgctccttaggcttcgccgtgactgggaactcacgttccacaatccccagttccataagattggcgagatacgacgatactgttgcgtttgccatcatcgtgtgtgtcgcgatctcattcagcgaagttgcgccgagcgcgatcgcccgtatcacgctgttatatttcgcagtttcccgcagttcttcgtgcaacaaaaattcaacctcgctgtatagcggagcaatgcgtctcagaatatgccgcttgacatttgcgtctatggtctcatctgggtcaaattcctctaggtaacgcgggataccgcccagtattgcgtaggccagcgccttatcctcgctactatagttggggaagaattgcgctgcatcccaatatggcatcggcagcatcttcaggatgccggtcgcacgaccatatagcggcgatttttctcccaacagctccttttcgatgaagctcatggcactgccgcaaatcacaatcatcagatttgcatgacgcaacgtgtggtcccaaagattctgtagcactgacggcaatgacggatcagatttgaccagataaggaaactcatcgaatatcacaagcctgcggccgccatcgctcggctctggcagccgggttaactcggttaacgccctttcccaagaaggatattgactcagataatccttgcccggggcacccgcctcgaacatgagacgggagaacgatgccagctgttcatctttagtggcattctgcgccgcgaagaataaggtttccttgtcttttgcgagttgaataagcgtctctgtttttcccacgcgcctgcggccgtagacgaacacaagctgtgccctacgctcagtgaaacattcctgcagttgcttgaggtcatcgtctcgtccgatgaatgccatgctgcccgcctcctttatgccatacgccggcgtatttctatcgcatcacgatttattgtatcacgattagtataatcgtgattatacaagctgtgacgaggtgcgggtacgggccaatcggcatcgacgagaccagccgcaggggctacaattacatcaccgtggtcgccgatctcgtggagcacgatgtcatcaacgtgacgccgggcaaggacccggccacggtcgaacggttctcgcgtgatttcatggaccacaacggggtcccggaatatgtgcgtctggtcgcctgcgacatgagcctgggcttccggaagggcatccgtgagcatctgccccatgcgcggcggatcgtcgacaagttccacgtggccaggcacgccaacgaggccgtcgacaaggccgggaagacggaaggccgctccaacccgctgctcaaacggaccaagtacctgtggctgcgcaacgaggaaagcctgaccgaactgcaggtggagaccaagcgcaacctgacgaggcaacggttgaagaccggccgcgcctgccggatgcgcgaggtcctgcaggacatccacacggacagccgcaccccgtccgaggcatgggtgcgcctgcatcgcctgtgctcatggatgatgcactcgaggctcgagcccatgaaggacctcgcccgcatgatccgacgccacttcgccgagatcgtcgcctacttcgagcacccgtacaccaacgccgtgctcgagggcgccgacagcgtcatccagaacgtcaaacgacgggcgagaggcttccgcgacatggactacttcgccaccatgatctacctgacctgcggcagactcgacctcaaagccgtcaccaccacttgaccatcacccaccacaaacagcgaatagcctcaatttgttatctttaccgcgcttgcgtagacagagaacgctcagacctcgaagatcgccgcatattcgcgagagaacccgcctagtcaatgagatatggattgaaaacacgctcggtgacggggatatggagcatcagcatggtgccgtaaccaagaaccaccagcaggaacagtccaccgggcatgtagaaccagctggccaccagcagcgccacgaacacggcatccacgatgaccagggccacggtcatcgcgatgtgggagatgccgaagatgaaggcgttcttcaaggtgccggccacggtgttctcgaagcgtgcctgaagcgcgaacacccattcgaagccgataagccagaggatggtcagcgcgaatttgatgatgagcagcggcgtgatctgcaggacgatccatgaccagaccagtgcaatcagcaccaccaagaacggcagccacagcagtgtggctttgatgaagttggctttgaatgacttgaagtagttggcggttacgcctttgccctcgccctcgatggagcggcggcaagcatcatggccggcggtcagggccgcaccgatggtgatgagcggaatcgaagtgaccagcatcagaatgttgatccatacgccgtcaacaagattgctccacgcgcgcatgaatttcgagtccggtgccagccagttcatcaactactccttgtgtcgcctgtggctcccctctctgaggggagctgtcatcgcagatgactgaggggagacttgatggagctcaggatactcccctcagtcggcttccgccgacggctcccctcaaagaggggagccggattggtggagctcagcccttgacggctccgccttcggccctgcaattacggactcgcctacgacgaggctcatcattagcttcgccgctgtcgcggctcagcctggagcctgctggaagcccactgggcttccagccatgggctgacgacgcgagtcgtcagcccttgacggctcccgccatgacaccagagactatatacttctggcataccaagtagaagacgatgatggggatgattgccagcaccaggcaggccatcatggcgcccatatccacggaaccgtagccgcccttgaggtattgcacggcgaccgagatggtcttgtacttgccgaggtcgagcgtcaggtacggcagcaggtaatcgttccagatccacatggcttcgaggatggccaccgagacgatcgacggcttcataatcggcaccacgatctggaagaagatgcgcggcactgacgcgccgtcgatcatggcggactcctcaagctcctgcgggatgcccttgatcacgccggtgaagatgaacacggccagaccggccccgaaaccgaggtacacgatgcacaggccccacggggtattgagcttcagcatgtcggcgatcttggagagggtgaacatcaccatctggaacggcacgatcatgttgaacaggaacagggtgtagagtagcttcgcagcccagttgttcacgcgcacgatccaccatgcgcacatcgaggtgcacaccagaatcagcaccaccgagccgacggtgataagcagcgtccagccgaaggaggcgaa

SEQ ID NO: 880 - DNA, 7472 bp, Unknown
  R14_18m  MAG No. k141_18370
caaccatgtgcaaagttccccgcatatcgatgtgtaccatcggtatgcggggaactcgcatattatctcgaccactatcatgcgtacggtgctaatatgacggcgatatggcaggtgatattcgcatgaaagaacctcgcacgcagcgcacggaacaggtgaacaccgcgcaacaggaccattcggcgaactatctgtttctgattatcggcacgccgctggtggcgttcctgattgcggcttccgcgatgctcgagtcgcgtgggtttccggttccgctggtgcgtatcggcaccggtgccgcggggcttatcctgcaggcgattccgttcatgctgctgggcgcgatgatgtcggccgtggtcagcacgttcgtcagcaccgattctctggcccgccacataccgaaatcgttggccggcggactggccgcggcattggcggccggcctgtgcctaccggtgtgcgattgcatggtggtgcccacgttcgcgaatctgatgcgcaaacgcctgccgctgccgtgtgcggtgacgtttctgtgcgcggtgccggtgatgaacccgatggcgatatggtccacatggttcgcattcaccgacaaaccatggatggtggcggcccgcatggggttgggcatggtagtggcgatagtcgcgggggtgtcgttcgcggtgtggccgctccgctcccctgcggtgcgtgagaggccgctgacgattgggcggtcgttgatttgcgaggattgtgcaggggcgacgggtgattcgcctgagaaccacccccagtcggctttgccgacagcccccgccggcgggggcacggggcgcggattggagcggttcacgcatttcattcggcatacgcatgacgactttatgcggatgatgccgattctgctgttcggcacgatcattgcctccatcatgcgcaccgcattgtcgtcgttgaccaacggttcaagcacgctcgatgacgccggtgccatcgtactgattctggcggcgatgggactggcgttcctgtgttcgctgtgctctacgtccgatgcggtgatcgccgccagcatgattggcgcgctgccggtctccgccatgcttgccttcctggtcttcggcccgatgctcgacctcaagaacacgctgatgctggccacggaatgccggccacggttcatcatccggttcatcgcgaccgtggcggcggcctgcttcctcgccgcgattgccgcccatctggtgatgggagcgtagccatgaagcgcaaagtcacactccccgaccgcgtggaggcgctgtgtttcgcggcgctgggcgcggccatcgcctatgcggcggtgggcggatcatacaccacgctgaccacgccgcgttcgctgccgtatctcatcatcggtgcggcactgctgttcgtgctggcgaccgcagcatggctcggactgttccacgccacggagcgttcggttttgcggttcctgatcgccttgattattccggcgctgctgatcgtcgtgccgttccagcccagcagcggcagcggcggcttcgacgagtacgccggcggccgcgctatcgccattccccgcagctcgcacaagcctgatggcgcctcgcagctgcacggactcgacacgacaaacaagaccctgaccatcagcgacgacgaattcggctcatggttcgagcagatcgaccataatccgcagcgttacgtcggttaccatgtgcaggtcaccgggtttgtgagcaagtcgcgtacgttcgacgcggacgagttcgagctgtcccgccagttcatgtcctgctgcattctcgacatgaccccattcgggttcatagccagctccggcaaggccggcaccccgcataatcacgactgggtcaccgtcgacgccgtcatcaagcagggcgcctacggctccgccggccacgagcgccaaggcctgatactgcaggtccggtcggccagcaaagccgcggccgccccgaccggctacttctactggcagtaaatgacgcgtctcccgaaatggaaagcactgcgctgcgccatgactcgccccatatcggcagaaatcccgcgttacaacgaaaggtacgcgggggctctgcctttatagggctcaaaactggcagaaatcccgcgcaggcctcgttgaaacgcgggatttctgccagttgattcaaatcatgtgacaacatgccgggcatctgatttgctttaataacgataatgaatatcatttgttaacagaaaggggcaaaacgtcatgagcatcgagcaaaccgcgaccactcggcgcgtgacgcgaccccgactcctcatcacccaggtcctggcggaactatcccgattcgccacggcccaggaaatcaccgacatcctgcgcgagcgcggcacgcgcatcggcacggccaccgcctaccgcaatgtgcagatgatggcctcccaaggcgagctcgacgtaatccacgtcaacggcgaggccctctaccgcgagtgctcggaccagcatcaccaccatcacatcgtatgccacgaatgcgggcggaccatcgaaatcgagattcccggatttgagcagtggatcgacaaagccaccaagcagttgaagtaccagaccatcgcccacgaactggagattttcgacctgtgccccaagtgtgcggcgaagcatgccatcgaaccgcctctcagcgtcggcacctcaccaaaggatggaccactgacgacgccagacgatactggccgtcggcgctcgaacaaataatggcgcagtcccgacgctactggccttcagcatcggtgcccttccaatccttggcgcaatagcgacgatataagctccactcgcatcgttagattgccaacgcttggcgcagcaccgacgccagacacgctcatcgtcgtcgttccaccaatatttggattggtaccgccaccacctataccaggcgtcgacactcggccaacaatcggcccgttaccgacacaaaactgcatgaggtctcattgctcttaatagcagcaatgggcctgataatcactttcaccaactttcgccgctgccgtctgccgccctacagtcgcagacgaacaaacgctgaaaggaacaacaatgactatcaagaccatcgatgagcatgcttacgagatcgttaccgaagagggcaccttcgccgtctgcaaggacacgctggccaagttcgacgccaccaagcacgagcacggcgtggccgcctgtggccgctgcggctgctgcttcaccggcgactgctgtgacgacaccggctgcgagcacaaccacaccgaagagtgcgggggcaaggcttgcctgcacgcttgccacgagaaccgcgaaggccacgagtgcgccttctgccaccttgccttcgacaccaacgagaagtgccacgatgagatcctggccgacctcaaggaactcaaggccgagctggctgtctgagttttaggtttccgatttctcctgcggattgactcctctcagggaggggagtcagattccgacacgaaccaccgcgcttaccgtatgatgtctacgggcgcggtggttttgtttttctcgatgatggcgcagatttgctcgggcgcctccttgcagccgcgccggacccatagccagataatcgatgagacggcggagaccagaatttccagcgcataggcgcgcggaatgccgccgtagctcagctcggcacccacacgggccgcctgcccaagcagcatctgcttcaacacatccttgacccggtcatacatctgcatatcgttgcccgaacgggacagtgcgtcgaagaacgcatactcacgcttgacaaagcgcaacgcctcggcttcgtgttccagtcctacaatctggtggccaacctctcggccaaggagaacgtggagctcgcctccgaaatcatgaaagacgcgcaggaaccgacccaagcgcttatcgacgtggggcttcaggaccgtatcaacaacttccccgcgcagctttcgggcggcggacagcggcgcgcggccatcgcccgagcggtggccacgaacccgaagattctgctgtgcgacgagccgactggcgctctggactacaacaccggcaagcaggtgctgcagattctgcaggatcagagccgtaagaagggtgcgaccgtggtcattgtgacgcacaattccgccatcgcgccgattgccgaccgtgtgatccacatgcatgacgcgcgcgtcaaatcgatcgaagtgaacgagcacccgatggatatcaaggatctggagtggtaagcagtatgaccgatctcaatgatttcaccgaaacgaccaaccttacgcccgcgaccgactccgcagccgattccgccgcaaattcagcaaacgactcctataccgcgtccggcagaacgccccacgcgcacaaggccaagcgcaaccgccgacgcaacgggtcattccataagcgcatgctatggaaagacacccgcgtcaccatggccaaatccaagggtcgattcgcctccatcgtgagcctgatgacgcttggctcctttgcgctcgtaggcctgttcgtcaccggcccggacatgcaaataaccggcaccgacttctttaatcagaacaatctcgctgacataaccgtcatcagcgattatggcctgaccaaagctgacgaaaacattattcgcagcgcgccgaagtggccaaggcgatgaggggcggggccgtctccgagtccgcgccgatctactacgaggagatgtcgaaagtggccggcaaggagaacgacaaacagtcgattaccctgatcgccactgatgacgcctacaatttcggcgactacatcaccctgcgttcgcgcaccgggcacaagccgcaggtgctcaccgaccgtggtgcgatcatctccgaacgtatggcggggatgatggacgccaaggtaggcgacacgattaccgtcaccgattcgagcggtaccgagcgcaaggtgcgcgtggacggcatcaccgaaatgcatatcgggcatttcatgttcatgacttcgggtggctataagcacgtgttcggcgaacagtaccagtcgaacacctatatggtgaggctcaagaaccatgagacctccaatgtggagtcgcgtagcgccaagctcataaagttggacggcgcgaagggcattgtgcagaacacgacttcgaagaaacaggtggccacaatcgtcgacttgccggatcagatcatggaagtgctgattctcgcggctgagctgctggccgtggtgatcctctacaatctgacgaatctcaacgtctccgaacgtatccgcgaactgccgaccatcaaggtgctcggcggactcggcgtgctggtctaccggcggttgaagacggtcgacatgctcggcgccctgaagtcggtggaatagcagcggaatagcaaatgggatcggctttgaagccgatcccattcaattattcgctcactgctttctgagccttctgcgatttctgctccttttggcaatcagggcatagtccgaaaacctccagggtgtgggattcgacggtgaagccgtggccgtcggccactttgcgcagccaagcctcgctgggcggatcgatttccacggttttgccgcaccgcttgcacaccaagtggtggtgatgtccgtcgtcgccgcataggcggaacagctgctggccgtccaggcggatcgtgtcggcggcaccggcatcggccaaggcgttgagctggcggtacacggtggccaagccgattttcgagccttcgtcctccagcctgcggtgcaggtcctgagcggagatgaactcctcacagtcggccaaggcggcgcgaatcgcgtccttctgcttggtctggcgttcgatatgttcaaccatcgataaggtcacgccttctttttcaggtcgtcccagcagccggtggcctcaaggtcagcaaccgtggcatcagggttgtcggtgagcacggtgatgtggcccatcttgcggtcgtggcgcacttcggccttgccgtagtcgtgcacattccactccgggtgggtggcgatcagcgcgcgcgtcggctccacatgctggccgagtacgttgaccatcacggccggcgagagcagcttgggcttgggcatgggccagccggcgatgccgcggatgtgggcgtcgaactggtccatcgagcaggcctcgatggtgtagtggccggagttgtgcgggcgcggggcgagctcgttgacgatgacctgatcgtccttggtgatgaacagttcgatggccagcgtgccagccagttcgaagcccttggccaagcgaatcgccagttcatgcgcttcgcgagccacatgttcggacacttcggcgggggcgatggtcatgtgcaggatgttgttgcggtgctcgttacgcacgatggggaaggtgacgaagtccttgccgttgccggagaccaggatcgaagcctcgaatgcgaagtcgacgaagccttccaggatgctcggcgggaagccgccaccacggtcggaacgggagcggatcttctccaagtcggcgtcggaacgcagcacgagctgaccgtggccgtcgtagccgccggacacggtcttcagcacggccggataatgaatatcatccaatgcggcgtcaagctcatcgaagttgttgacggcgcgccacggtgcggtggcggtgccgtggtcgttgatgaaccgcttctcgtgcacgcggtgctgggtcacgcgcagcaggtcggtgccctgcggggtggcggtgatgccgcgcacctcgtcgatggcatcggcgtccacgttctcgaactcgtaggtgagcacgtcggactgcacggccagatcatggatggcggttttgtcatcgtattcggcggtgatctggaagtcggccacctgaccggtcgggcagttcggcgtcgggtcaagcacgccgacgcggaagcccatgtagcgggcggacaaagccatcatgcggccgagctggccgccgccgatgatgccgatggtcgatcccggcatcagcatcgaaacacgaccgcctgtttcctcagacaagctgggcattggattcagccaccttttctttcagttcgttacggtaatcctcaagcttgtcggccagttcgggctcgaaggcggagagcatctgcacggcgagcaggccggcgttggtggcaccggagttgccgacggcggtggtggccaccggaatgccgccgggcatctgcacgatggacagcagcgaatcccagccggacagggcgtgggagcgcacgggcacgccgattacgggcagtgtggtctgcgcggcgatcatgcccggcaggtgggcggcaccgccggcaccggcgataatgaccttcaggccattggcgcgggcgttgtgcgcgaactcggccatgagctcgggcgtgcggtgcgcggagatgacctgcttgtggtaggcgac

SEQ ID NO: 881 - DNA, 19266 bp, Unknown
  R14_18m  MAG No. k141_19369
atacgacgaccccgcactcatgcaggccgcgctcggcaacgtcgccaaggcccggggcatgacccagatcgccaaggacgcgggcgtggggcgcgaaagcctctacaagagcctcagcaaggacggcaaccccagcttccagaccatcgccaaggtaatccacgccctcggcggacgcctcaccatccaagccgcctgaaaaacaaaacacaagcgggagtagggtgaatccaccccgtggcatactccgtatcaggattagtgtgaaagcctctgaatcaaccggttcaggggctttactcatatccacccaatggtcatgtgccatggcaatcaaccggcatgaccgcctatgcgcgtagctcagctggtagagcggcggtctccaaaaccgcaggtcgtcggatcgaagccaaccgcgcaatccccagccgcgtctacgacatcctcaaatggttgggcctcatcgtcctgcccgcactcgccctgttcgtcagtacggtcggccccgcatggggctggactcacgtggacgcgatagtgaccacgctcaacgcgctcggcatcctcgccggcgcgctcatcggcgtcagcgccatcaaacagcgcctcgacctcgccgcatgaccaccacgcacagttcggccccgtccggcatcgcagacgactcaacccgagtcggcctacttgccggtcggggccgttctcgcgttgtggcagagggcttcgcgggctcgatttttgcccacattttgcccacattatcccgtgaaaccgagggaatcggcgggaataagaaaagccgctcagccctactcccgcaaggccaagcggcttgtttccgccgaaacggattggtggaggcgcggggaattgaaccccggtccgatgaccgagcccacagtcttctacgtgcgtagtctgctggccaagttggcgatttttctgcccccatcgatgtcgcagacaactgatggcgagcatatccgcagttaaagtcccgatgcagccctgaggctcaactgcatcagcaagtcttctaaacgacgctcagcatcctcccaaagacgaggaggagtgaacggagcggctgctcactggttaatcctgactaaaaatcaggcagcgagagcgaactcagtgcggttagatttagcacttattcttttgccggggtcatccacgagcggacccggcgttctcggcacgcttccctgcagcgaacaggtcaccgtcgaaaccgatcgcccccaatcttgagttatcaaacttccggcttttcagccggacttttcagcatacaccctatggcgctactcgcgcaaatcgccggcagcgaacatcgccccggcattgacgggaccaacgttgtcagcaggaccaacggagcgaacgccgccccggaaccaacggaaccaactgaatcgccgtcacttgatgatgggcttctgggatgcggaaacatcaatctgatgtttgccggcaaagccagccgtgccagcggtgatgttcttgtcgatttcctcgacttccgccagcttcagcttcagttgcgaggagtctccccaaatgattacgcggtcaccgtcgttaagcgtggtggtcaccgaatcctgcgtctcagcggtgaccttggtaatggacttacgcatcgattccggcaatgcgcccagaatcgccagcgcctccttcaccgaacggttcttgagactggcgtctatatccttgacctcgatcaccgggatgccatccacgttggcgttcttcaccgagttcaacacacgcgcctgggaatccaccgcggtcagggtatcgcctcttttcagcatggccgcaggccgttgcgccttgacttccacgctcatcgacttggggaactgtttggagaccttggcctcgctgacgccgggaatggatttgagttgctctgtgacctcatgggtggagaccaggaacaacgactttccagcctgcttatcggcgatggcatggatggtctgcgcgctcacccattcgttggcaccggatacgccgatctcgctggtttccagacgaaacaccgacgagaagagcagcagccacgttagccccgtcactacagccacgctgacgacagcaatcaacacgcgtaacgcaacgacacgtacgttcgcacgcttgcgttctttggcgcgttcggtgaaattcaccactttcgggcgtgatacgactcctagggagccggtggtctggtgcagcgtttcggcaacgtaatcctcgctgtgcagccgtcgtgcatcgacgaaggcaccggcctggcccttggctaccgtcacatcgtcgatgatctccggctcgtcgatctcatgcccggaagacacggaccggggagcgcgagacttcgacgagtgacccgtgtttccgcgtgaaccgatggtgcgcggcttgcggggacttccggacgaacgacgtgagccgttgtcattgcccccggatctgaccgtgcgcccggacatcactcgcagctttcccgatgggcctcaagtgcggtgagcagcacctgatccatgtcagtgatgtcgcccgcgcccacggtgaagatcacgtcgccgtggtgggcacgcatggccatcatcttggcggccaggcacatatcctcgaccggctgaatccacgtgcctgcggaagcgtccttgagtccctcagccgcgtccacgatggtggaggggctgatgtccgggaaatcggtctgcttttcacgggccgggaagatgccggtgataatgacgtcatcggctttggccaaggattcggcgaactggtgcgcgaagaacttggtgcgggagaacaggtgtggctggaagatcacacgaatggtcgaatcggggtaccggcgtcgggccgcatccagcagggccgcgatttcggtgggatggtgggcgtaatcgtccactacagtgacctgcttgaccgtgccgcgcacctggaagcggcgtgccgcaccgaggaatgtgccggccgccttggccgcgtctgcggggctcacgcccagcagcacggcagcgctgatggcggcggccgcattgcgcgcattgtgcacgccaggaaccttcagggcaacgctctgagacaccggctcccccgccgtcaccgcggccggcagatgcagggtgagctgttcgacgccgctgcctgcggtctcgctttccgaagcgatccagacatacgcggcaccgcccaaatcgggcagggattcacgcgcggtagtgccgtaggcaacggtatgggatttcacgtcggcgggcatggcctccagcacggcaagtccgtcggggtcgtcgatgctgatgatcacgtgaccggtggcccggccggcgtgggcaacgaacgcggcacggtagtgggcttcgtcgccgtaatggtcgagatgatcggcttcacagttggtgataatggcgatggtcggatggtatttggcgaagctgccgtccgattcgtcggcttcggccaccagaatatcgcctttgcccgcgtgtccaccgtccagcgtggtgccgtccgggccttggataaagccgccgatggcgtagcttggatcagcaccggcgttcaccagaatgtgggacagcatggagctggtggtggttttgccatgcgctccggccacggtgacggctcgtttgccgttcatgagcagggcgaggatgtcactgcgatgcacaatacgcttgcccgccgcgtgtgctgcgacgatttccggattgtccggtttgatggcgctggagtagaccacggtctcggcctgggcgacattttcggctcgctgcccgaattcaacggtgatgcccagcgtttcaagtcggtcggttttggcgctgtgtgcgcgatcggagccgtccaccgcgactccttcggcgtgcagcatttcggccagaacgctcataccggcgccgccgataccgatgaaatgggtggcgccgagatccgcggggcgggccgcagcatcgaacgaggcatacgtggggtcaagcacgatgggctgatcttgagacaattcaaaactcctttggggattccagcaccctatattatgaccgtatctcgtgttgcgggacgggattggtctgtatcgcgcacgggatgatatctgaatactatttggatggttcggctaattgcagaacgtgccgggccatgatttcggcagcgtttctgatgccgtattcccatgccttgcggccgaattcggcaagtcgttcgtgatcggcgagcagatcgggcacatgctcatgcacccactgcggggtcaggtccttgtctgcgaccagaaggccgccgccggcgttcaccactggctcggcattgaaacgctgctcgccgttgccgattggcagcggcacgtaaatggccggcagacccagtgcagccagctcggataccgatccggctccggcgcggcaaatcaccaagtcggcacaggcgaaggccagatcgattcgttccagatattcggcggtatggtagtcaccttgtccggccgattcggggccgatgccggtaagcacgtccgcgccggccgaggccgtgaccagttcgcgtacttcgctgattttgcctcgcccggtcaagtggatgatttgtgcgtgggccaacaggtctgcggcggaggaggcgatggcgcggttcaggctttgcgctcccagcgatccgccagtgaccagcaccagcggacggttcggatcgacgccaagctgcgcggccgattcacggcgtacggcggcacgatcgtcaccgatgcgtttggtcagggaggcgatggtcgggcgcaacggcagaccgacacgctcgacgtcggctccggcacgcggtttgagaccggtgccttcgtacacggtaccgatgaaatcggcccaacgagcgcccagtttattggccatgccggcacgcgcattctgctcatggatggcaatcggaatgcccatcttgtgtgcggtggcgtagacgggggcggaagcatacccgccgaatccggccacgacatccgcatgccgcgtttcaagaatggagcgcaccttggcggtttctcgcttccattttgccgggaagcgaagcatgtacaggtcagggcgacgcgggaacggcactttttcgatggtgtcgagctcgtagccggcctcaggcaccaaatccttctccaaacccaccgcagtgccgatgacggtgacctgtgccgtgggttcgatgtcgcgaatcgctccggcgaccgcgagcagcggattgacatgtccggcggtaccgccgccagcaagaacgatatgtggtgtgccttgattcatgattaccgagtctacttacgcgctctgacgcgactgttttatctgcggttgagaacgcataagtcccacaaccagtccggccgccgtcaagcacatgatcattgatgagccacctgcggagacgaacggcataggcacgcccaataccgggaacacacccacgaccacgccgatgttgaccatggcctggcccacgatccaaatggtgacgcacatcagcaccatggcaacataacgatcggtgacctgcaatgcgatgacgatcatgcaccaggcgagaatcgcgaagaacagcaatacgatggcgcaaccgacgaatccggtctcctcgccgatgatcgcgaaaatgaaatcgttatgggcggccggcaggtaattccatttctctcgcgaattgccgatgcccaatcccagaaagcctccggaggcgatggcgtacttggcgtgaatggactggtagcatacgctctgcgcgtcagcggccgagcaatcgccatatgtggccagaatacgacgcatgcggttcgggctggaaaccgccaatgcaccgaccataaccaccgcgcccaatacgccgattcccatccatttgccggggaatccgacgatcaggaaggccacgcctccgatggagaccagaatcatggccgtgccgaggtccttgccgcccatcaccagcgccacgcctatcgcatacaacaccaacggcgcggcatatgctttgattcccttcttgtggtacatcttgctgcaggcatgcaacgacgagggcagccatatgcacatcgcgaacttcatgaattcggccggctggatagtggtgaagccgaggttcagccaacctttgttgccgtagacgtcgatacccagcggagtaaaggtcagcgcctgcaacaggcaggcacccaccacaaagaacacgccggtccgtttccagaacgtcaccggcatcgtcaatgccacgaagcccagcaccaagccgatcaggcaaaacgcgccctggttcagaagctgaaggaacggcgacttgcccagtgcggccatggtgaccgtggagctggagaacaccatgatcaggccgaagcatgtcagccccaccacggccatgcggaatccgtggtagcaccatagcgggttgagcaagcttcgccaacccgtgtagtcggtgatctcgagtgcgggcctgtcaggggctctgtatgccttacgcttatgggtatcagtggaggccatgcacctcgctccacgtcttggctgcggcggcgaatcgattgcctcgatccgcataggacttgaactggtccatggaggcgcaggccggagccataagcacgatgtcgccggcggcggcatacgtgccgcaggcttcgacggcacgatccatgacggtatcgttgtcttcgggatcgatgatggtcaccgggatgtccggagcttggctggcaaacgcttcgaccatcggctgctggtctttgccgatgatgacggccgctttgatggtatgtgcctggtccttgaccaggtcctcgaatcgactgcccttggccagacctccggcaatccagatcacagacttggccgggaagctggacagcgaggcgcgtgccgcatgaccgttggtggctttggaatcgtccacgaaacgaacggagccgccctcgactgcggcctcagccacggtttcgatgcgatggccgcccggcttgaacgaggtaagcgccttcaacgcggtatctcgatcagcgccaagtcccagcaccaacgccaatgccgtcaatgcatcggccaccagatgcgggtacagtgagccgtccggctctgccagatgcgtgaaatcggtgatggcggccagtctgaccggctcccccactgcgccgccggccacgccgctcctgtccacgatccagccatcttcaatgccgatctgaccggcctggggggcctcgagcgtgaatcccaccttgcggcatccttcggcggtttgggcctcggccgccagttcgctgactttggcgtcctgcgcattgtagacgatggcgcgtttggcgttgtggaacaccttggatttgtcggcggcgtaattctcgcgcccgccatgccagtcgaggtgatcgtcggcgatattggtgatcgccgcgcagtcaagtgccagcgaatcggtgaagtgcaattggaaggagctcagttccacgcacagtacgtcgtgctgaggattggtggcgcaacgagacaggctcatgctcatgtctccggaggcgatattaccggcggtcggcgcgtcgagtccgcaggcggtgagcatttccgaggtcatctcggtggtggaggttttgccgttggtgccggtgatgccgatccatggagccggagtaccggtgcgctcgttattcacacgcagctgccatgcgaattccacctcgctcatcacggggatgccacggcgttgggcttccagcacgaacggggtgcgggggttgaacaccggggacgacatgacgtagtccacatggtcccagtccacgtcatcaaaggagcggagaccggcctcgggcttcctctcatcgacgccaatcacgtgggcgccgcattccctcaatacctccgccaacgaggtgccggacacacccagtccagcgatcaccactgtcttatccgctacttgcattgttcctcctgatataggaattccgtgggtgagcataatcccacccagatttccgctagctgaacagcaggccggagcgggtgacccagtcgccgtagaaaatcgtcagggcgagcagcacgaagatgagttcgatcatccagaaccgcaccaccaccttggtttcggtccaacccttcagttcgaaatgatggtggatcggtgccatcttgaatacacgtttgtgggtcatcttgaagtacccgacctggatgacgtcgctcatggcttccatgacgtacagtccacccagaaccaccgccaggaattcggtgtgcgtggcgatggacagggctgcgaacaggccgcccaaggccagggacccggtatcacccatgaaaatcgatgcggggttcgagttgtaccacaggaagccgaagcaggcgacggccgcgcatacggcgatgacggtcagatcgagaggatcggacacagcataggaatatccgccatggctgccgcccttgatgtggtagctttcccagaatgcgatgatgccaaaaccggtgaaggcgatcatcgacgaacctgccgccagaccgtcaagcccatccgtcagattcactgcgttggtccatgcggtcatcaggaagttcacccagatgacgaacaggatgatggccacggttcgaccggcgaaatcgaagttgaagaacggccgttcgatgaagctgatgcccgcctgcgcactggggaatcccgatttggtgggaatcagcagcgcaagtaccgcgtagatggtggcgaagatgaactggccgatgaacttgccgcccaccgataggccttcgttctgcttcttacgcaccttggcgaagtcgtcgataaagcccagcagacccatcgacagcatggcgaacagtacgagcaccgcggaccaggagggcacgtcgcccgaacgcaggtatcggtacagtgcggaggatgcccaaccgagcagaatcgcgaagttgatgaccacgccgcccaacgtgggggtgccgcgcttgaccagatgcgactgcggcccatcctggcggatgtactggccatagtgcagcttgtggaccagccgaatcagcagcggggtgccgactaaggtgacgatgagcgacaccagcattccaatgatcagagcaatcacgtgcagcttctctttcttgtcggtttcttggggtggttatcgggtcagttctttgcccagcgttcagccaaagcgctcaggcctgacgcgtgcgatcccttgagcagtaccacagcgtcggaatggttgcgcgccaagtcgatgaccagctgttcggccgcatcgatgtcgtgtacgcaatccaccgacgcggattggctctgacgggcaccgtccgccagagcctgtgccagtgcatcgagatgttggtcttgggcggaaccgaccgcgatgatcgcgtcgatgcccaattcggccgcatacgtgccgatagaggtgtgcaatgccgtctcatcggcgccgagttccagcatggcacccagcagcgccacgcggaacggatccttgccgtcatttgagttccaagccttcaacccgttcaggccggctttcatggagtcgggattggcattaaaggaatcatcgatcagtgtgaaggaagtcccctcgcgattcaccgtggacaatgccatgcgatgagggctgatggtgtgctgcgaggccagaatccgcgccaccgtttcgggtgccataccgtaacgcatcgccacggttgcggcggccaacgcgttcatcacgttgtgacgtccaggaatgcccagatgcaccggcgtatggttgccgtccgcatcgaccaacgtgaattcagcatgatcggaccggtcggcagtgacatcaatggcccgcacctcgggctcctgcgacgatcccaagccgaaccacagcacatcgccgctggccaggccggccatgggaaccacgtgttcgtcatcggcgttcagtaccgcggtgcctccgggaagcagtccctgcacgatttcgcttttcgcctgtgcgatgcgttcgcgggagccgaattctccaaggtgagcgacgccgaccttcaatacgattgccgtgttcggcggtgcgatacgggtcagtcgcgcgatttcgccgatatggctggcacccatctcagccacgaagaaccgggtgtgctcatcgacccgcaacgcagtgagcggcaggccgatctcattgttgaacgatcccaccggagccacggtcgggcctacggtggcaagcagggaggagagcagatccttggtggtggtcttgcccaccgaaccggtcaatccgatgatgtcgaagtcgccgtccagctcgcggcggcgaacgatgttgtgtcgggcgagctcgccaagggcgtcgaccgtgtctttcactacgatctgcggcaggccatcggactccacctcatggtcgacgatggccaccgtggctccctgttcagcggttttcgccacaaagtcatgcccatcgacacgctcgcctcggatggccacaaacaccgatccggggccggcctgccgcgagtcgctgaccgtattggtggctcgagactcggaatcggcgtctccgatcaatcgaccatcgacggccttggcgatctcctccacactcatcggaaccatggtgtttcaaactcctttacgattacgcttcgtcccgcatccacggacttaattgagattgttggccacatgcagggcactgcgtatgttgtttttcctcacgccggcggccagtaccatggcgatggccaaggacatgtgcccgagtcggacgcggtcgtacattgccggtgaatccgcagccatttcatccgattcgggtgtcgacgaggtcatggacatgtcatgttccgcaacgaatgcgtagcgtgtcttcaattcgtccaagcttgcgcttgcgttgacatcttccgtgcccagcacatccacgttcaccgattccaacgcatgctcggccaatgtgcggtcatccatggcgatgatcacggccgccacaccgtcttcggcgcacacggacagcgcgcgctgcatatcgaggatgcccagaggatagttcaggttcatggtacgtgtcatcgacgtggacccggatgcggtgattaccgccaccggattgcccagcatgtgcaggaattcggagagctgggacacgcctgcgtcaacggcctgctcatccgcaccggtcaccgcgaacaccgccatggcgttggatggtccgccggccaggccgctggccagatcgccgagtacgcgatcgtcgcaatcgccgtagagcaacggtatatcggcattggcgatctgccctttggacgcgcgtggcagcaacgccgcataggcaccggcctgtgcggcatgcagtacatcgggttcctgctcatgcgtgcagatgaacagcgagccgggaatcacggtatccacggcatcgctgagtgaggtaatggtgacattggtggcgaagggtggatcgacttcaaaaccgtaccgttcgaccagcattcccaaggtcacccgctgggcgatggattcgctcactgcactcatgggctatcgcctttctcccctgatccttaccacgtgactggaatagcattttttcgtggactggagacaggcacctcgtatttctgcataaggaactcacaaatctgtgcggaaacagggccggccgtcagaccgccgaacacaccattcggatccttcagcaccacggtgaccgcatagcgcgggttgtccgcgggaatcaccacggaataatcggagataatggacgagagcgcgccatccgaaccctgcacctctgcggtaccggacttggcggccatgcggtaaccatcgaccttgacgaacttgttgtagctctccgccactgattccatcgcattcatcatgtccgatgcgaccttttcatccaccacgcgggtggcttcgcccttcttggtctcagtggtcttgccattggcatcggtggttgatctgatgatcgactgctgctgcttgacgcccttgttcgcgatggtggccaccacgttgttgagctgcagggcgttgacggtgtagccctgaccaaacaggatggtgttgcgcgtacgcagatcccatgccgaagggctggtgagcagaccgctcgattcaccgggcaggttcagtccggtcggttgtccgatgccgaatttggtcaggtactcgtagcgttgctcatccggatagttctccccggccataatcatgccgacgttcgatgagttctgcagaataccggcgagcgtccagcgctcagtgccatggtcgaatgagtccttgtaggtctggcccttctgtgtgatgtggtccgggaccgacaattgatcgctcatcttatgcagtcccgtctgcagatagccggacatggagatgaccttgcccaccgaaccaggctcgaaggtttcggacacggcccgagacgggctcatcttcgccgcatcggtaccagcctgtacttcatcgctatcggccagtgcgagaatctccccgctctggacatcctgcaccacggcgatcgcccacgctgcaccatacttggattcggcctccttcaaggcctttttgacataccattgcacatcacggtcaatggtcagggtgacatcgtcgccatttttggccgccaccgattcggtcatggtgccgggaatctcttcgccgccattaccacgctggtaggtttcatggccatcggttccggtaagcgtcttgttctcgacctgctcgatgccggcgacgccatcgccgttgtcgttcacgccgccaagcagcgcgcccatgagatcgccatccgcatacagtctttcactgctcagctcaccccagacaataccgcccaggtgcaacgcctcgatgctgcgcttgacctgtggggtcacgtctttcttcagaatcacatactgcccggtaccggacagatcagcgcccagttccatggcgttcatatccaggactttggccagcagtcggcccacggccgccgctccggtagcacccacgggtttgccgtcaatttcgtggcagtaatcacgggtgttgtcattgcaggtaatcggctcgaactcctgtgcagcctccggattggcgacgatagtataacgctccacgctttgagcgagcacggagccgttggcgtcgaggatacgcccacgcttggcgctcaacgtcacggtcagggtgcggttagccgtggccgcttgtgcggtttgacggccgccgatgagctgtgtggaggccagctgaatcacgcatgccgacgccaccaacgccaatgcggcgccgatggcaatgcatttgaacgcgaaggtcttgaccttggcgaactctacgatgcgacgaatggtgttcactgggttccgcctttgttggactggtatccgcttaagtcgatggacactgatccttgctgcgggaccatgcccatgtcgctggccttgtcgggcaggttcgcgactaattgatcgagtttggcctgatcgtcttcgacatcttgggtaagtctgttgatattggtttcgatctgtgccgcctcaaacgagttctgcaccatctgggtacgcaacatcagcgcgccgaacaaggtgccgacgaggaagatcactgcgatggccacgtgcaccagcggtgcgcttcttgttctggtccattcgatgacccgtccgacgacattgccccgctcgtctccacgcgggttggagaccacccgcagctcaggtcgggaggaggactgatgcttggtgtgcggtcggttcgaggccggagccgcgttcgatcgaatgttacgtgcggttgccatatgccgttatcccctccttgtacgaattcgcgctgtgtttttggctctgcccggagacgcggagccttgtatcttgacgtcattcaggccctgcgcggtttgcgtaaagcgtttcctccatcgtgacggaatatcacggctgacttccaccgcccgcaaccgcaccgaagccgatctcgggttggctgcgatttcatgttcgtcggccttgatggcacctcgcgtgagatccgtgaaaaacggttgggcatccggcggtatgacaggcagaccagccggaacatccactcgcagcccttgtgccatgaacgatttgacggttttgtcttcgagcgaatgataggactccaccaccagtcgtcccccgacatgcagtcggttcgcggcttgcggcaatgtggaggcgagcttgtccaattcgccgttgacttcaatgcgcaacgcctggaagacgcgtttggcgggattgcccgccgggcggtgggcttgcggcaccacttcatcgaccagacggttgagctgtgcggtggtggtaaacggctccttgtctcgacgtgccacgatggcgcgggcgatctgacgcgagaaacgctcttcaccgtattccttgaatatacggaccagttccgccgcatcataggtggcaagaatccgttcggccgtcaacggctggctgacgtccatgcgcatatccagcggcgcatcatgcgaataggagaagccacgatcggtttcgtcgatctgcaggctggataatcccagatccatgaatacggcgtccacacgttctatgcctcggtccgtcaacacctgatcgagctgatcgaaggcggcatgcaccgggatgaatcgatcggcgagcccctcccgttccatgcgttcggtggccagccccagcgcttcactgtcacggtcaatgccgatgagccgagcctgcggtgcggctttgaggaaggcgatggaatggccggcaaggcccagggtgcaatccgctgcgatggcgttctcatgttccaaggcaggcgccatcaggttcacgcaatcgtccagcaataccggcagatgaatattcgccacatcaaccatcagaattccacctccggcaacacatcgtcagcaatatcggaatatccctcttccttctcggcgaggtaggactcccacgtgtccttattccacagttcggcacgggtgccaacgccgatcaccacgacgtcggaacccagattggcgtaatcgcgcagcatctgcggcaccagcacgcggccctgcttgtccggctgctgatcgacggcgccggaaaggaacacacgcaggtattcgcgggcggctttgtttcccaccgacacacgctgaatctgcgaggcgatacggcgaaattcatcgaacggcagcaggtacacgcaccgttcctggcctcgggccatgaccaggccctgccccagctgggagcggaatttggccgggagcgccatacggcctttggcgtcgatcttcggcgtatatgtgccgagaagcagcggcggcagaccagccatgagatcagccatagtggtggagccttgtgcgttggcatcagcgtcgcgaatcgtctgatcggcaaccatggctccacctccttcatcgttacgtgggatacacttcggccaactggttcaccactctaccccacgattccccatttctccccactcatgcacgatttgctcacccttttagggcaattaccgatggattgcgcgtgtcggccacgactgtcgcacgaatgggcgctccgcacatccaatccacgttgcgcactccaccgaccgagcagcatggcgaattcacgctgaattcacctattccgggttgtccgcatcactgacgtagggggtgtgcggtaaatttgaatgccttaagttttttctgccccacggaaatggaacgaagagaacagcatgtcgagttacgcctcccagctgcatgaggagcagcaggccgtcgatcgcgcctatggacgattggatgatctgcgagccgaaatgtggcaacgcctggacaccgtacgcgccgccggctcccacggatcccccacgcaacgcagcgaacgagactcctttgccacaatgtacgaaaaccgcctcacgcaattgcgcagcgttgaggatcggctggtgtttggtcgtctcgacgccaagaacggcgaccgtcattacatcggccgcatcggcctgtcgagcccggaccatgagccgattctgaccgactggcgtgccgaagccgcacgtcctttctatgaggcgaccccctccaatcacggcgacatcgtgatgcgcaggcatatcaccttgagtttccgcgaagtcgtgggcgttgaggatgaggtgctcgacgtgcattccgaccaagtcggccaggcgtcttccgccggcacgttgaccggcgagggtgcgctgctggcttcgctgagctcacgccgcaccggcaagatgaccgatatcgtggccaccattcaggccgagcaggaccgcatcatccgctccgacatgaatcgtgccgtggtggtgcagggcggtcccggcaccggcaagacggccgtggcgctccatcgcgccgcctacctgctgtacacgcaccggcgcacgctggaacgttccggcgtgctggttgttggccccagctcggcgttcctgcactacatcgatcaggtgctgccctccttgggcgagaccggcgtggtctcacgcaccatcagcgatctgattcccggcatcaccgccacggcggtcgactccccttatgcagccaagctcaagggcgatcgacgcatgacctccgtagtggccaatgccatcgccgcgcgcgtgcgtgttcccgctgttctgccgacagtaaccattagcggcattcaggtaccaatgctggccactgatatcgagcaggcgcaggcggacgcgaagcgcacccggcaacctcataacaaggcccgcgagacctttatccgttcgatgctgaccagcatgcagaaccgttatgccgaacagcttgattacacgccggatcaggcggagctgaaccgcgcgatgtcgttgctgcgtatgaacgagcaggtgcgcaagaccctgaacctgtgctggctgccgatgaccgccccatggctcatcgatcagctgttcgcccatcccgaacgtctgaagtctctggctggttggctgaccgacaacgacatcgcggcacttgcccgccccaagggctccccgctgacccgctccgatattccgctgctcgacgaagcgatggatatgctgggccccgatcccaagacggtggcccgccagtccgccgccgacgcacgtcgtgccgccgaagagcagtatgccaaagacacgctggccgcgaccggtctgggtggaggcatcgtctccagtcagatgctgctcgaccagatgaacggggacgacgccgagctgaccgcgcagcgggccgcggccgaccgtgaatggacctacgggcacatcgtggtcgacgaagcgcaggaactgaccgccatggactggcgtatgttgatccgccgttgcccctcccgctcgttcaccatcgtgggcgatgtggcgcagacctcggcgctgggtggcacccgacgctggagcaaatcgatgaaccgcctgttcggcgaaagccactgggatctgaacgagttgaccatcaactaccgtaatccgcaggaagtttccgaactcgcctcacgatttgccgagaaggaaggcctctacatctccacggtcaatgcggtgcgcaccatccccgattcggtgtcccgcaatgtggtgcccgacatgtcgtccttgctggaaacgacggccgagcaggcggcgcagcttgccgaacaattcgtttcggcagacggcaccggccgcatcgccgtcatctgtccggatgatctcatcgccccggtgcgcgacgccgtgcgccgcaaactggccgccgttcttgacccggccgaatacgcaaggctcatcgagcagcccgaatgggatgagcaaatcagcgtctgcggcaccgaaacggtcaagggtctggagttcgatgccgtcgtggtggtcgagcccggtctcatcgaggatgacgcgccgagccgcctggtcgccgcctcggacctgtacgtggcaatgaccaggccgacccagaaactggttatagttcggacaagaacggacgaaaagtccctgaacatctaaggtatgaagcatgcccaaagcactgttattggaaaacattcaccccgacgcggccaaatcgctgcgtgatcacggtttcgaagtcgagaccatgaagggagccctgagcgaggacgaactcatcgacgcgctggatggcgtggacttggtgggcgtacgctccaagaccaacgtcacagcccgcgtgctggatgcgcgtcctacgctaagcgccatcggctgcttctgcatcggcaccaatcaggtcgatctggcacatgccggcaagcgtggcatcgccgtgttcaacgccccctactccaacacccgttccgtggtggaattggtgatttgcgacatcatctgcttgatgcgccgcattcccgcacacacgcatcacatcaagcatggcctgtgggacaagtccgcttccggctcgcatgaagtgcgcggcaagacccttggcatcatcggctacggcaacatcggctcccagctgtcggtactggccgaggccctcggcatgcgcgtggtgttctacgacattgaggagaaactggcactgggcaacgcccaccgttgcgataccctcaacgaactgctggaacagtccgatgccgtgaccctgcacgtggatggccgcaagtcgaacaccggcttcttcggcgaagaccaattcgcccacatgaagcaggacgcgattttcattaacctttcgcgcggtttcgtcgccgatctgggagctctgaagcagcacctcgattccggccatctgtctggcgcggcggtcgacgtgttccccgttgagccgaagaagagcggagatccgttcgagacctcactggccaacgaagacaatatgattctgactcctcatattggcggctccaccttggaggctcaggaatccatcggccatttcgtctctcagcgtcttgaggattactggttcaagggttctacctcattgtccgtgaacctaccgcagatcaacctaggtgaacgcaagggcgtgtgccgtatcgcccatctgcacgacaatcttcctggtgtgctggctcatgtcaatcgcgtgctcggcgaagagaacatcaacgtttccttccagtcgttggccaccgaaggcgaacttggctatgtggtcaccgacgtggctcagaagcccagcgccgccacgcttgaagcactacgcaacatcgagggcaccgttcgcatgcgtgtcatcagctgacg

SEQ ID NO: 882 - DNA, 4751 bp, Unknown
  R14_18m  MAG No. k141_19373
cattcctcgcgtgctttccgaggcgtactacatcgccaacaccggccgccccggcccggtggtcgtggatctgaccaagaccgcacagaccggcgacatgtactattcatggccgcagcgcatgattctgcccggctacaaccccaccaccaaggcgcacggccgtgtgctgtccgacgcggcgaagctgttctctcagtcgtaccgcccggtgctgtatgtgggtggcggcgccgcccgctccaacgccggcgcacaggtcaaggctctggccgacctgaccggcgcccccgtggtcacgaccctgcccgcacgcggcatcattcccgactccgacccgaagaacctcggcatgctgggcatgcacggtacgattgccgcaaccggtgccgtgcagcgcgctgacctgcttgtggccatcggtgcacgtttcgacgaccgcgtgaccggcaagctcgacgccttcgcaccgaccgcccgcgtgattcatattgacatcgacccggctgaaatcggcaagaaccgtcagcccgacgtgccgatcgtgggcgatgcggctaccgtgctcgacgacttgattcccgaaatccagcgcacgcaggccattcagggcaagccgaatctggccccctggtggaaggcgatcgacggctggcgcgaggaatacccgatgacgtgggatgagccgaccgacggatcaatggccccgcagtgggtcatcaaaaagctctctgagatggccgatccgtccaccatctgggtgaccggtgtgggacagcaccagatgtgggcttcgcagttcatcgatttcgagaaccagcacgcttggatctcctccggaggcctcggcacgatgggctacggtctgccagccgccatcggcgcatccgtgggctcggcccgcgagttcgagggcaagaagccggtgtggctgatcgacggtgacggttccttccagatgacctctgaggagctggccgccgcgttcctggaccacgctccggtgaagatcgcgattctgaacaactccgtgtacggcatggtccgtcagtggcagacgctgttctacgagcaccactactcgcagaccaacctgctcgatggcgaggcgcacggtgccgatggtgcggcggcactggtcgacggcgatgcgccgctcgaagtgcctgatttcatcaagttggccgaggcatacggctgcgagggtatccgcgcgttcaccgaggaagaggcgattgccgccatcgaaaaggcgaaccagatcaacgaccgcccggtactgattgatttccgcgtgtggaaggatgcgatggtgtggccgatggtagccgccggcgcttccaacgacgaggtgacgtacaagcccggcatcaagccgctgaccggcggcaccccggctccgggaaccggtccggacgagcatgcgaccggcgtgttcgagcacgagaccgccgctgccgcggcgagcgagcactgaggagaggagaacactcatggctaactatcctgcatcccagcctggttcccagcgtcatacgctgtccgtgctggtggagaaccgcccaggcgtgctggcgcgtatcgccggcctgttcgcccgtcgtgcgttcaacatcaactcactgtccgtctcccccaccgagcgtccggacatctcacgcgtcacggtgaccgccgacgtggaggccgtgccactggagcagatcatcaagcagctcaacaagctgctgcacgtgctgaagatcgtggagctcgacccgaactccaccgtggaacgcgaactggtgctcatcaaggtggccgccgacgaatccaaccgttccgacgtgctggagatcgtgcgcctcttccgcgtgcgtgtggtggacgtgaatccggaatcgctgaccattgaggccaccggtgccgaaggtaagatcgatgcgctgctggggcttttggagcattacggtgtgattgagctggtgcgctccggtgccgtagccgtgacccgcggcccgcgcgccctgagcgaaaaggtcgtcggttccgaggttaccgggcgctgattcggcgactgcggggagacccagtccaagctcaaagggcggatgtgcatgatgcatatccgcctttttcatgtgtgcatacctcatcacccgtgctgcaagcaaaatgacagcaccttatgctagcattatgacagcaacaaggaggtgcatcatggcaacattgaccatccgaaaaatacccgatgagcagattcaacagctcaaagaagtggctgagaaaaacaaccgctccatggaatctcaggtgcgatccattcttgaagaatggctggccggcacggtggcgcatgaaatcacacgaaagaccaatttctacgacgagatccgcgaattcatgaagaacatggattttgagggactcgacaagggggaactcccactatccgagcgaaattccgccgattcccgaccgccagtatcttttgaataggaatcggccatgattattctggacaccaacgtcatcagcgaaatcatcaagaaacagccagacgaacacgttgccaattggctgaggaaccaagatacaagcaatctggcaaccaccgccatcaccgtcgccgagttgttggtcggaatatgtcgcatgcctgaaggcaaacgacgaaagtacacagatacgaccgtcaagctggcgcttatgacattagaggacaggacgttcgcatttgacacccaggcagctgcggattatgcccatatccttgtcgaacgcgaacgcaggggcacacctaccagtattcaagacgccatgattgcggcaattgcctgttcctgggatgcggccatagccacgcgcaatatcaaggacttcgaaggtaccgacgtggaattgattaatccgtgggagtttgcatagcggtaggccccggcaaactaccgaggccttgtgaacgttacggtttctcccgctactccaattgttcggagagttcgagccattcggcttcgagattatcgctttcagtattgacggcggtgagttgttcattgagcttgttgagaccctcgtagtcgctcgggtcatgggcggccatctgtgcctcaagttcggtcttccgctcttccagtttggcaagcttgcgctcgatggcattcacgcgcttggatgcctcgtggaaggccttgccggtgagcttcgaggtggagtcctcaccgttattggctccctctgacgagggagctgtccgcgaagtggactgagggagagatgcagcaacattgacggcggccgccttacccctaccagacttcgccgagctgctaccggtgcccgcgaagccaggcgtgtcagccggcaatcccttgccgttcttaatagcctcaaccatatcgaggtaatcctgcacaccaccgggcagatggcgtaccttgccgccaatcagcgcgaactgctgatcggtgacgcgctccagcaggtaccggtcgtgggatacgacgatcaacgtacccggccaagtatcgagcaaatcctccatgacggcgagcatatcagtgtccagatcgttgccgggctcgtccatgatgagcacgttcggctcgtcgagcaggatgagcagcaactgcatgcggcgcttctgtccgccggagaggtcgcggatcggcgtcatcaactgggcggattcaaagccgagacgctccatcaactgtcccggcgttacttccttgccatccacaatgtagctcggcttatagcgggaaagcacttccttgatcttgtactggcccagtttctccagctcatcaagacgctgcgagagtacggcgaacttcacggttttgccgatgttcacatggcccacggtcggagtgatcgaaccgtcaatcaacttcagcaatgtggacttgccggcaccgttcgcaccgacgatgccgaaacgatcgccggggccaatcagccaagtcacatcgtcaagaatctcgcggccggaaaccgtcaccttgcgtgcagccgaggtgacaccggctgcagcagtgccatcatccgaattcgttgcagcagtgtcaccgccgatggtttcaccacccgtgttcatgcgacgaacctcgcgatcgtcagcaagctgcggattgccgctctcagcctcggccttcttacgcgcttcctcagcggcctcgacggcttccggcacgccggcgtccaccaggcgcaggtcagtcatgtcggtgaccgccacctcaacggaaccgtgcagctgcggctcggcgtacatggcgttgaccacatccacgcgggaagcggacgcggagagcgccgccacatccgggtcgatatcggccataccctgcggtttttcgaaaatctgcgtcacatcgaccaaatcgaccacctgtttgccgaggcgtgaggtggccatttgcttcagttcaagtgtgttacgcatcggcggcacatcggcaatcaattcgcgtgcggccttgacgtggaacttctgcttggtggaacgggcacgggcaccgcgcgaaagccatgcgagctccttgcgggccagattgcggcgcttcgtttcacgcacatcagcctggcggtcgcgttcgacgcgctgcagcatatatgcggaatacccgccctcgaacggctcgatcacgccatcgtggacttcccacatcgattcgcagacctcgtccaagaaccagcgatcgtgggtcacgagcaacagagcgccctggcctttggaccagcggttcttcagatgctcg

SEQ ID NO: 883 - DNA, 33269 bp, Unknown
  R14_18m  MAG No. k141_19492
ggcaccgcaatagttcagcagatcgggcaaatcgtattcattggaaccccagccgtgcaacagcacgaacaccggggtggtttcaggaccggtcaaacgggtcaaggccttggcaatcttcatggctcccagtgtatccacgtgaccgccgcgaccgcatttgaacggtccataagcaacccatatagcaacgccgttccattcaagtgtccgatacgttatcgtcgtagacgtgccgcacggggaacggcctcgtgcacagcagccatagagaacaccataaagggggtgcgcaatgaccaggttcaatactcagctcgtccacggactgccggttggagacaacaacaccggagccgtgaacccgccgatctacaactcaacgacatatgccttcgagaaggtcgacgcgatgccccgctatgactacgcacgaagcggcaatcccacgcgcgacttcctggaaaagcagatcgcacaactcgaacaaggcacgcgaggcttcgcattcgcctccggacttgccgcgattcatgccgtgctcagcattttcaagcccggcgatcgcattgttgtgggggacaacatctacggcggctcgtattcgcagctcaatgagttcttcacccgttggagtgtgatcgtcgaatccgtcaacacccaggacatcgcagcattggaggccgctgtcaagggcgaccgcgcgaacggcatcgcgcctgcccaagccgtctacttcgaaaccctgaccaacccgctgctcaaagtcaacgacgtgcgcgccatctccacggtggcccaccgttacggggcgctgtcgatcgtggacaacaccttcgtgaccccgtacctgcagcagccgctcaccttgggcgcggacgtggtcatccactccgccaccaagtacctggccggtcactccgacgtcaatgccggtctcgtggtcgtctccggtgaggatttggccaatcgcgtgtacttcgcccagaaccgtcttggaggggtactggcgcccactgaatgcgattcggtgcgccgcggcatccagacgctgggcctgcgcatggaccgacagcaggagaacgcgctgtccatcgcgcagtacctgctggtccatccgctggtcaagtccgtccactatccgggcctgcccggtgcaggcgaccaaaggctcgcctccaagggactcaagggcgccggcggcgtgctgagcttcgaggtcgtgcctggcgtggacccggccgacgtgctcaacaatctgcacgtgttccgactggccgtctcgcttggcgcggtcgaatcgctcgccgaactgccgtgtcgcatgacccacttcgaactgccgcgcgaggagcgtttgaagatcggcatcaccgacgaactcgtgcgtctcgccatcggcatcgaggatgcagtggaccttatcgaagaccttgatcaagccttcgaaatcgcctgctcccgttacctccagaactatgctgaagcggacgtattcaaccagttgacctcgggggtgttcgcctgatccaataacactgccattactgctcattactcctgcgacgggccggtgctgacattcggtgccggcccgttcgtatacgccggaaaaggtgagaacaatacgaataaagagtgcctgagtcggggcatggactcgggcagccggggtagagggtttccgctcttatacccatccataaccaacccatatagcaacgccgtggtaggcgatgggcttttgcattatggtcgtaaccatgccgcacggggcgtcggccgagaccgcccgccgtgccgccaccacgcttcaacctactgataaggggacaattatggcaaggttcaacacgcagctcgttcatggtctgccggtcgacgacaacgacactggagccgtgaacccgccgatctacaactcttcgacgtacgccttcccctcggtcgactccgtgccgcgctgggattacgcgcgcagcggcaatccgacccgtgacttcctggagcaccagatcgcgcagctcgaacacggtcgccgcggcttcgccttctcctccggcctggccgccatccacgccgtgctctccatcttccagcccggcgaccgcatcgtggccggcgacaacgtctacggcggcagctactcgcagttgaacgaccacttcacccgttggggtcttgaggtcaccaccgtgaacacggccggcgacctcgaccgtctcgaacgcgccatcagcggcaacggcgacactgcccccgcaaaggccgtctacttcgagaccatcaccaacccgctgctgcaggtcaacgatgtgagccgcatcgccgccatcgcccacaaatacggcgctctggtgatcgtggacaacactttcgtgaccccgtatctccagcagccgctcgacctcggcgcggacgtggtcatccactccgccaccaagtacctggccggccactccgacgtgatcgcgggcctcgtggtcacctccagcgaggatctggaaggccgcatctacttcgcgcagaaccgtctcggcggcattctggctccggccgaatgcgacgcggtgcgccgcggcatccagaccctggccctgcgcatggaccgccagcagaagaacgccaaggccatcgcccagtatctgctcaagcacccgctggtggccagcgtgcactatccgggcctgggcgaggacggcgagcacgagcttacggtcaagggactcaggggtgccggcggcgtgctgagcttcgaggtcaaggagggcgtggatccctcggtggtgctcgacaacctgcacgtgtttcgcctggccgtctccctcggcgcggtggaatcgctcgccgaactgcccgcccgcatgacccacttcgaactgccgcgcgaagaacgcctcaaggtcggcatcaccgacgagctcatccgactgtccatcggtatcgaggacgtcgacgatttggtcgaagacctcggccaggccctcgacaaagcgtacgaagccctgccgctggatgtcaagcagaccatcgacgccgacaacgacagccagatttccaagctgatcgcctgatatcggccgattatccaatcgaccgcgctcggcaaccatgaggtcgggccaggtctgacggacagggaagccggtctggaatttcaagcaaaaccatcgcaggtggcccgcacgaatccaatcgtgcgggccacctgcgcatatggtgccatatccgggtgaacggcatggtatccgaatgaaaatcgatagggaggagcggatatgtccgtgaaggaacacaaccgagtgcaggggctgcagccggaacttgaggaatactaccggtggttccatcggcatcccgagccgtcgtacggggaggtcaaaaccacggcccgcatcaaggagatcctgaccgtgcacggcatcgaaattttggacacgggactcaaaaccggcttggtgtcacgcatgcaaggcacggcggaccccaccgcggagccggtgccgggccgccgggcatgtggtggcggtgcgcggcgacatcgacggcctgcccatacaggagcaggccgggctgccgtgcgcttccgaaaccccgggatacatgcacgggtgcggccatgactacaacatgaccaccgccttcggagccgtgctcttgcttcagggacgccgcaaccggttcgccggcacggtgaagctcatcttccagccggccgaggaatcccgcggggccgcaggcaaccccaccggtgccggccgtgatcaacaccggcgcggtgaacaaattccgcatcaccatccacggccgaggcacgcatgccgcccgcccgcaccgcgttccccgaagaccgcgcgataatccataatcgcgttcaggccatcgtggaaggcatcgccgccacctacggcgtcaccgtggacttcatctgggaggacagtgcgcccgccgtgatcaacgatccacgttggttggcgctcgtggcctccaccgacgaaagcctcggactcaccgtgaccggaccgaacgccacactcggcggcgaggacttctcctattatctggacagggcgccgggcgcgttcttccgcattggcgtgggcaacaagggccgtgccatgcacggccccaccttctatgtcaaactcgatgcgctcgccgacggcgccgatctgctcgccacctccgttgtgaacacattggccgcattggggagcgactgatctggctatcagcctggttataagccaggttgatagaaaacctcttcgctataagctggccatatatcgccctatcggatatccagaaccccaaaacgttgaaatctcgcggttcctgagactcgggggtctacgatgaaagtacttccgcgcagggcgtgaatcggttgggtatgagacatgacgatggcgggaacgggagcggttcgctcccaagcgttaccacacagagagccatttcggggggagttctgtaccccggcgtgagacggggtggctcagagaggggaatggcgaaatgcttaccgagcatcgtcttaccatgaaagccactgccatcttcggcatactgcttaccaccttgacgttcggaggctgtggcatcagcaccggtagcagcagcaatgctgcgtccaccaccacggacaactccaactccaagaccgccgactacaagtacggcaccgtggaattcccgaagtccagctcgctgtgcagctcgccgatcgccatcgccctggagaagggattcttcaaggatgagggcatcaacgccaagctggtcacggccgatgccgaaacccgcaaggtgggcctcgacacgggccgcttcccagtgaccaacggtgacttccaattcttcccgtccatcgagcagggcgtgaagaccagcgtggtgggcgccctgcacaagggctgcatcaagatcgccgtcaagaagggctcgccgatcaagactgccgaggacctgaagggcaagaccatcggcgtcgatgagatcggcggcaccccgtacatggccgccaacctgtggctcggcgacgcgggcctgaacgtggaccagaagaacggcgatgtgaagtacctgccgttcgatgacgccaacctcgaattcgaggcactgcagaacggccagatcgacgcggccgccctgtgggacccgctgcccaccatccaggaggccaagggcaccgtcgacatcatcttcgaccttggcaagaacccgaagtttgccaagcgcttctgctgcttcctctacggctccaacaaggtcatcaaggagaagcctgacgagatgagcgccatcctgcgcgccctcaacaaggcccgcgactacatcgcccagcatcctgaagagtccgccgacatcatcatggcgaagaagtactccaccatcaacgacaaggacctgatcgtcaagctcttcaaggactacgactacgccgtgcagcccgacgaggccaagcagatcgaaagcgacgtggactacttctccgaaggactgaagaagatcggcttcctggagaccaacgacccgtccgcctttgccaagcaggcctaccagaagattgatcagtgagcgcggccagcggccatccgattgcatcaatggtatgacggtaggacctgaacagggccggacggcattgaccgtccggtcctgttcaggtccgtccgccctgttgttgcagggaccgcattgatttcgatttctcattcaccatcattcgttcgttcatcgttcgtcatcggaaggaacaccacccatgagcagtatcaccgccaaccttgtggagccgcgttcggccgcaaggctcgaaacgcgggacccggcacgtccgcaatcagcgcgggcggcatccgtctccgccgccgatcccgtagcggagcattcggaggcgacggcacaggccgtaagccggccggccgccgaccagcgcgccgcgcggagcctgccgtatccgttcgtggtggcgctcactgcggccggggtcgtcatcgccgtcatcgtcaacgtgatcttcccgcagagcgcccccgtcgagttcaagcaagggcagatctggatcttcctgctcaacggccaggaactgtatctgacgctgctggccgtgttgacactggtgtacgtggtcatcggcatcgtcgacgcccgtaatcccaaggatgcggctcgattccgctaccgcgcccaattccggttcgcagccggactggcactcgctctgtgggacgtcaccggcaccaaactgcaggtcctgccgcagccgttcttccccggcccctcccaggtgctggagccgttcctgaccgacggcagctacatcgccctcaacacgttctattcggtgcgcctgttcgcggccggattcgtgaccggtgtggtgctgggcgtggtgaccggcgtgctcatcggctggttcgcccgcgcctactactgggtgttcccggtgctcaagatcacgggcgtgattccggcggtcgcttggatgccgttcgccctgacccttatgcccacgccgttcattgccgccatgttcctgctggtcatctgctcgtggttcccggtggccttcctgaccgcgcagggcatccagagcacgccgaagatgcttgtcgaagcttcgcgcacgttgggcgcggacacgcgctacatcctgttccatgtggccattccgcactcgatgcccagcatcttcaccggcatcggcatggccaacagcctctcgttcctgaccctcgtgatttccgaaatgatgggccagcctggcggcctcggctactacatcgatcaggcgaaggcatggtccgcctacaacgaaatccttgcggcgatcgtcatcatggccgtgctgttctccctgattatgaaactcatcgaactggtgcgcggccgtgtgctgcgctggcaggagggactggtcaaatgagcgctgcaatcgcagaaacgacggcgacggcgggcaatgccgtggacaccgaaaacgccacgaacccgattatcagcatcagccatatcgaacgcgacttcgtggactccgacggctcggtcacccaggctctgtccgacgtaaatctggacatccgaccgggcgagctgatctccatcatcggcccttccggctgtggcaagaccacgttgctgcgcctgatttccggactcgaccggccgcagcgcggcgaggtgacgttcaagggccgcccgattgaggggccgaacccggaacgcggctacgtgttccagcagggcagcctgttcccgtggctcacggtcgaggagaacatcgccttcggactgaaggcccagggcaagtacaaggaacgtaaggacgaggtcggcgagtatctggagaaggtggggctgaccgggttcggcaacgcctacccgcaccagatttccggcggcatggcccagcgcgtggccattgcccgcgcgctcatcgaccaccccggagtgctgctgctcgatgagccgatgggtgccttggactcgttcacccgcgccgatctgcaggaccgactgctcgacttgtgggagaagtaccacatgactatgattctggtcacgcatgatgtggacgaggcgatctacctgggcaatcgcgtggtcatcatgacgccgcgtccgggccgcatcaaggagatcgtgccgatcgacctggcccagcgcgaccgcgtatccgacgacttcgccgcctaccgcaaactgctgctgaccaaactgcactttgatgtgcacagggaaggtgaggaataaataataagtgagttggctcccctcaggaggggagccaagaacggcacaagaagagggcgactgccatgtggcagccgccctcttcttgtgccgtatgtgattactccccatacacggcatcaaacgcctgggacagatcggcgatgaggtcgtccgggttttccagtccgatcgacaggcggatggtcgtgggactcacgcctacgatggcacgcgcctccttggtgaactcgcggtgcgtggtgttcaccgggtccacgatcagggaacgggcgtcgccgatattcgccagataacggaacagcttcacctggttgatgaacgcggcggtctgttcggggccgccctccagctcgaaggacagcacggagccgatgccgttcggatagttcgtggccaccagttccgactgcgcgccgccgggcagaccggcatagttgacggccgtcacatgcctttgtccggcaagatacgcggccaccttgccggcggacgcggtctccttggacacgcgctcggtcaaggtctccagaccgatgagctgcagatacgcctcaaacgggcccagcacggcaccggtcaggcgcagatacttcagacgcagacggcggatgaacgccagcggacctgcggcctcgacgaagctgcgcggctcacggcccgtggcctcgcccagaatgtactccggcgcggtgaactgcgggtagcggccattggcccaatcgaacgaatcgccggaagtgaccacgccgccgatggcgttgccatggccgctcagcgccttggtagtcgaatacacgacgatgtcggcgccatgttcgagcggacgatacagatacggcgtgggcagcgtgttgtcgatgaccagcggaatgccgtggcgatgcgccagttcggccagcgcctcgacatccgtgaccacggtggtcgggttggagaccgactccgcgaaaatcgccttgacgtccgtgccgccctcgccgtccgagccctgctcgatcagcgactcgatatgatccagatcgttgatgttctccacaaacgaggtggtcacgccgaactgcggcagcagcgtgcgcagcgagtcgaaggtgccaccgtacacgtcatagggggcgataatacggccgccgccctcagccgtgttgagcagcgcataggtgatggccgccatgccggaggcgaccgccacggcttctttggcgccatccagttcggcgatgcgcttctccaggaacgagaccgtgggattggatacgcgcgaatacaggaagcccggcacatcgccattggccacgtcatggcctcgctgcgaattctccagccagaacgccgcgttcgagtaaatgaccggcgtcaccgaatcggcgttggcggccgggtcgaaaccggcatgcacctgcgccgtgtcgaattgatgatcagacatgaattcccctttttatgtggtcgataacggtgggaaccgtgatggtccctattcccggcatccccggccggtccatgtggctcacaatctatcaggttcgcagcgaagccgttccgtgcaacccatcggtaaaacttatgatggcatcaatgaaatgattatgggccgtcggcatccggaatcggccgtatacccgttgcttatacccggcccaccggtgagcttatagcgcggtgggcgggcggccgcaaacgtgaacgctggggccgcaatggcacccattcatgattttgcttataccccaaaacggcggaaacgcgagggttttgccgtttgacgaggctgccggcatcccatacgattcgagtcaattcaacacatcgcctgccgcccgaccaggggagagcggccggcgaacatcatcgggaaatcacacagggggatcgctttgaccatcagcgtagtagatgtggacgtgctcgggaacgagactgcggtaaaagtcgagagcgtcgagaacgtcgaaagtgttgccggacaggccgtcgccgacgccatcgatgccggcgacgaaaccgtcgcgttcctccagcggctgatccgattcgacacccgcaacgatggcagcggcaccaccaacgagcgcccggccgccgaatgggccgccgagcgactggccgaggccggcatcgactccatcatcatcgaaagcaagcccggccgcgccaacctcatcgcggacatcgccggcgaggaccccacgctgccgtccctgcttgtgcacggccatctcgacaccgtgccggccaacgccgacgactggagcgtcgacccgctgggtggcgtcatccgcgactacaacggcacggcgtgcgtctgggggcgcggtgccgtggatatgaagaacatggtggcgatgacgctcgctgccgtccgttccctggcccgggccggcatccgcccccgccgcaacatcaagctggtgctgttcgcggacgaagaggccggcggcttccaaggctccgaatggctggccgcgaaccgtccggaggtcttcgacggcgtgggctacatcatcagcgaaaccggcggattctccggcagcgtgaacggccgtcgcgtctactacgtgcagacgggggagaagggcacccaatggttctccctgacctcgcgcggcacgcagtcgcatggctcgcagatcaacccggacaacgccgtggtgcatatcgcccgcgcggcggtgcgcatcgccgaccatcagtggccggtggcgctcaactccgtaacccggctgctgcttgaccggctcgccgaacttaccggcattcccgccgactcgcccgaacacgtggcccagctcatcgaggccaccggattcgccaaagcctgggtcggctcctcggtgcgcaacaccttcaacgtcacttccatcgacgcgggcagcaccgtgaacatcgtgcccggcaaggccagcgccctggtggacggccgtgcgctgtccgggcaggaggacgacgtgctcgacgcgctgaagaccctggccggcgaccgcgtggacgtggccaagatccaccgcagcaaaggctacctgtccgcgccggacggggagctgttcaccggcatcgaacgggtgctcggcgaactcgaccccgaggcgcaggtgctgccgttcctctcgtccggcggcaccgacagcaaggcggtgctctccgtgaacccgaacgttcaggtggctggattcatcccgctcaaggtgcccgagggattcgactacatcgccaacttccacggcatcgacgagcgcgtgcccatcgaggcgctgcgcttcggcgaacaagcgctggaacgcttcatcgccacgttctgaccgggttctggacgatcggccggccggacttcgggggaggcccggtgggcggccgccggcaatcatccgtcaatcaaacgaacgccaataaccaaccaatagcaaccaccaatcaaaccagaaggggaaccaccaatgaccagactgctgacctccgagtccgtgaccgaaggacatcccgacaaggtgtgcgacatcatctccgactcgattctcgacgcttaccttgaggtcgacccggactcgcgcgtggccgtcgagacgtccgccaaggacgggctcgtggtcgtcgaaggcgaggtgtcggcacccaggacgctcgaccatgtggccatcgtgcgcaaggccatcgccgatatcggctacaccgacgccgccagcggccttgacccggaaggcgccggcgtgatcaacaacatctgtccgcgcgaattcgacagcaacgacggcggcgcctggggcaactacggcgacgacacgaaggtgagccgcgaggaggcgtacaacacgttcggtggcgaccagggactcatggtcggctatgcgtccgacgacaccaaggtgctgctgccgctgccgatctacgcggccagccgtctcgccgaacgcctggcctacgtgcgcaagaacggcatcatcccgctgctgcgcccggacggcaagacgctcgtctcggtcgaatacgcgaacgacaacatcaccgatccgcgcgcgattcgccacgtgctcatctccactcagcattccgacaagctcgcgctggacgacgtgcgtgcgcaggtgcgcgaatacgtgctcgaaccggtgctcgccacgctgggcgtggacgcgtccgaagccgaagtggtcatcaaccgttcaccgttcatcaacggcggccccaaggcggacgccggcctgaccggtcgcaagatcatcgtcgacacatacggtggcatcgccggccacggcggcggcgcgttctccggcaaggatccacgcaagcccgaccgttccgccgcctacgccgcacgttgggccgccaagaacatcgtggccgccggcctcgcccgccgcgcgcaggtgcagctcggctacttcaaccgcgtggccacgccgatcaccatcgacgtggagaccttcggcaccgaaaccgtggcccgcgagaagatccagcgcgccgtggccgccacattcgacttccgccagctcgccatcatcgaccagctcgacctgcgccgcccgatctaccgcaagaccgccgcatacggccacttcggccgcgacgacgccgacttcacgtgggagcgcaccgacaaggtcgacgaactgctgaggaacgtcaaatgagcgataccggcgacccgttcaagcacgaatacttcgacgacttcgaacgcgaccatcccaacattttcgcctcgaaactcgcgctgctggaagtcgccatcacggcggacggcacgcgcgacatcggatacacggtgtccgtgggcgccggcaccggctcatacgaggcggcgctgcggcgcgacgggcttgacgtggaccgcatcatcgagccgtcggcgaatctggcggccgaagcgcgcgggcgcggcttcgacgtgaccgaggcgctcgcccaggacgtgccgttcgaggacgcctcgattgacacgatcttctacaacggcagcgccttcgggttcatcgacgaagccacgctgcgcgacctgttccgggcgcattaccggcagctcaagccgggcggcgtgctcgccctactcgacgtgccgccggccagcgccttgggacttgcggtgcaggcgtcgttcgtcatacccggcgaatcgtatatcgcggaagtgctgcgggccagctggtacggggctgaaaccccgcacaaggaatactggcgcactaccgacgactatcgcgcgctgcttgaggacggaggcttcgaacgattctccacctggcaggcgctgcgccggcacctgatctaccagaacgacgcccgcgagccggtggccgaaggctatcaggagggaagttacgtggctttggtggcgcgtaagtagcgtgtcttgagctcgttaacggatgaacaaggaaagggtatgactacatcgactacattacagacaactcgttggggcaaggtggctatcggatcgttctgtgcgatcctgctgacggtgggcctgtccgcctgcggcagcgcggcgggcacctccgcgccgcaacagtccggaaccagcagcaaggtgagcgatgataatgccgcgcaccatcatcaggcggcgtcggccgaaaagaccgaacagtcggatggtcagctgaaggacacgacggcgggggagtcgggagattcgaccggcacgaccgggcagtccacggatcaatcgaccgcgggcaatccggccgattctggttccggcgccggcgccggtgccaagacggccggcggctccggctgctgccacgacgagtgatgggaaaggaacacccatgggagaaccatttttcgaccggtacaaggacaacggccagattctcgacaacacctggcgcgcgcgaccgaatatctacgagtcgcgtctgcgactgctgcaccgggcgctgaccacccgcgaaccgggcaagatcctgtccatcggcatcggctcgggcatcttcgagaccctgctgcgcgaacgatacggcatcgaggtggccgaggctgtcgaaccgtccgcaagcctaggcgccacggcccgcgagaaagggttgaatgtggtggaaagcaccgcgcaggactgcgactacgcgggagcgccgtacgacaccatcgtctacaacggagcgagcttcggcttcattcccgatgacgaaatcgagtcgaccttcgcccacaaccgcgaagtccttgccgacaacggccgactgatcctcaccgatgtgccggcggaaagcacgcttggcatcatcctgaagctcgcgcagcgctacgacattgcacgcgaggacatcgacgacctgctggtcggtacctcgttcttcaatctcgacacgcacgcctacaaaccgaactggcatccgattccctggtacgccgacctgctgatccgcatcggctaccgcgatctccagttcttccagaccgtgctcgccaatccgccctaccaaaacgatcaggtcgaagaccccatcaagggctacactcaaggcaactacgtggccatcgttgcctcgaagtagtggcgggtgttgggtgcttgattgctgcgctcaggtttctctgtgttggaggaggaacttgagcgttttttctttaacaacgaaggtttcgctcgaatcgtgataggttcgagctcgctgtgtgtcctggtgccgatggcgtggttgccaccgttgttgtgtcaatcgtttgatggtgaaatggtgcgcagtatggtgtcgtcgcgagattatgaaaatggcggaattccaatggtccagcgaaatggggtgcgggatgccggctgtgtgtatcgtttgacgtgcgtgtcgtcccgcacggctgcgggacgacagccccaaatcggccgaaaatcgcgcggcatcccgcatttctccgatatgtgggaggaatgcgtccgccatatggtgattgaggcagaggcccgatgagatacgactatgtgacaccgtcacaggcagtgttgccacgagtgatattgcaacgggcggtattgcacgggtgccgtcgcgggttgtgccaacacccataggatacgccggcgcaccactcactggaagtggagctgcttgccgctttcttccgcgtcgacgttgccggtggcgagatccatgagctgttggaacagcgggaacatgagcagggtggagagaatgccccagatgttggtgaacgtggcgggcagtggcatgaacagcaggacgagctgcgccgtaaacatgacgttgagcagcggcatatcgtcgtcgtcacgctgggctgcgggggccataggcgtcgtaataatcaggagtactcatgccttacggtatacgagcttccccgccggttttccaattggttccagtgtttgttttcctgaccgatatcggccgcttccacttgccggccccgcatggccaaattcacagcggcaagagtacttccggcacgcaaataaggggatgcagcctcgcctcatatctcatatgaagcgaggccgcatcccctatcagcagcgaatcatcggccggccaagaccacacacagactcataatcaatccatgccggcccgccaacaccaacgatcaccaggttggaatctcggtgcccttggactcgttctccatgatctgtcggacgttcttctggtggtaggccttgatgacctccttgtagatatccttgtccttatctccggtgcgggccacgatcacgttgatccacggcttgttgacgtccttggtggggtccgggtcgatcttgaagattgcgtccttcttggggctcttgccgtaatcgaccacggcgttcgcgttggcgatgccggccgccgcgtcatcgagcgagctcatgatcatgttgcggtcggtgggcaccagctcgatgttcttcggattgctggtgatgtcttcctgggcggggtagatgcccttggccgggtcgttcttggacgggtcaaccttgagcacgccggcctcctgcagcacgatgatcgcacggccgccgttggtgacgtcgttcgggatgaggaccttgtcgcccttcttcagttcggagatcttcttgattttgttggagtagatgttcagcgggctgatgtacgcctcgccgatcaccgtgaacttgtagcccttctccttgatctcgccgttcaggaacgcgtaatgctgctgcgcgctcagatccacgtcgccggcggacagcgcctggttgcccagcacggcgctcttcatggccacggtcttgacgcgcaccttggcgttctccgcttccaggttcttgttcacctggtcccacagcgggtcgtcggtcgaggtggtcagcgccaccttcagcgtggtgacgccgtcggacgccgaagccgagccgcaggccgccgccgtgaacagcacgccgagcgcggacacgatggccaggcccgcgcggatgcgtttgccgactcgcgaccggccggtccagatgttcgtctcagtgttcattcttcctcccgataatggttccgatggtttggatgatggtgatgaaaatcagcagtgcgatcacggccgccacagtgacgtcgagctggttgcgctcgaagccgtaccggttcgcgtagtcgccgaggccgcccgcgccgatggcgccgatgacggcgatctccgagttgaagctgatgcaggtgatggtggtcacgcgtgccagtccggagatgctttcacgcaggtagacgtgccagatgatcgagagcgggccgaatcccatggcttgggccgattcgatcaacgtggggttgagcccgttgaacacggattccacctggcgtgagaagaacggggtgatgcccacgatcagcgggaagatcgcgccttccacgccgatggccgtgccggcgatcagtcgggtcagcgggaacagcaacgcgatcatgatgacgaacggaatcgaacggcacaggttgatgagcttgtcgaagaactcgaagaccggccggttctgcagcaggccacccttcttcgtgaccgtgagcagtatgccgaagaacaggccgagcacgaaccagaacggcaccgccgtgaagaacatgcgtaacgtgtcgatcagcgattcgacgaacacgtcggggttctccatcacgtgcgggaagagcttgtccaggatggtcatcgtgcgttctccttgtcggtgttttcgaccgtcgtggtctcgacggcatcgatgtcggccttcgccgcacccggttcgatgaccgtggtgcggatgcccttgcccttgaggaattcaagcgcctggtcgatctgcgcgtcggagcccttgtatttggcgacgatgctgcccagcgggtagccgtcgacgatgtcgagcgaggcgaacaggatgttgaccgtcagtccgaaccgcgtcgagatgatcgacaccaggccctcggacacggtcttgtccacgtactgcatgtggatcaaccgctcgtccggcccggtttcgagaatcggcgaatcggaatcgatgagttcgtagatgcggctcaggccggtggaattgctcacgaagcgccgggtcaggtcggccttcgggtcggagaacacggtgaacgaatcgccctgctccacaatcgtgcccttgtcgatgaccgccacttcggtgcagatctgcttgaccacgttcatctcgtgcgtgaccacgatgatggtcagatgcagctgccggttgagccgttcgaccagttcgagaatggttttggtggtgtccgggtcgagcgcgctcgtcgcttcgtccaacagcaggatctgcgggtgattggccagcgcgcgggcgatggccacgcgctgctgctggccgccggacagttgtgatggataggatttggcgtggctttccagccctaccagctgcaacagctcggtgacgcgcgccttcttctgctcccggttcagcgaggacctcttcagcggcagtgccacgttgttctccaccgtgcgcgagggcatgaggttgtactgctggaacaccatgccgattgacttacgcagttcacgcagctcgccgggcttgaggtcgggaatcgacttgcccagcacggtgagtgtgccctcggtggtggattcgagcccgttgaggcaccggaccagcgtggacttgcccgcaccgctcaaaccgatgatgccgaagatggaaccctcgggaatggtcaggctgacatcctgcaaagcggtgtacgggccgtccggggtggcgtatgtcttattgagattggatatttcgatgatgctgttcgtcattcggcaatgtcccttccttgtctacccgggcaacactcgtgaagcctacaggggaacaagaggggactcggcggtgtctttatcggcgttgcttatggcctgttacaaggcataagcaacgccgtgccgcacatcacaggttgtggtcgaagtagatgacgtcggggcgcgtgttccagccctgcttcttccagaattcctggccttcgatgttgtccgccaccacgaggatgccgatcttgacgatgccgatggccttgaacacgtcgtagatgcggttgatgagcgtggtgccgatgcccttgccgcgccactgctcgtcgaccgccacatggtagaggtagcctttgcggccgtccgtggcgccgagcgccgtggccacgaccttgcctgcgccgtccacggccacgaagcagctgtccgggttcttggacagcagcagcgcgatgccgccgtacgtgttgttgagcgactgcagatgcatgccgggcgtgcgctcccacagggcatacgcctcctcgtaatcctcggggagcatgcggcggatgcggatttgggaatcggtgattggcttggccatggggttatgccgtccttcctttacagactttacagattgtcgtacggggtgatttcgtgcgggctggtgccgccggtgatgatggccagcgcgtcgtccagggactgctgggccatgtttttgaccgccacgtcggtgaagaacgcgatatgcggcgtgatcaccacgttcggcaaggcgtggagtgcgttgtagtactggttgtcgattggctggtcggagggcagttcgttgccgaacagcttggcctcgccttcaagcacgtcgagcgcggcgccggcgatcacatggttgttcagggcgtcgatgagcgcgggcgtatcgaccacgccgccgcgcgaattgttgaccagataggtggtcggcttcatctgtgagagacggtgtgcgtcgatgagatggcgggtggtggcgtcgagatacgtgtgcatcgtcaccacgtcggattgcgcgatcagctcgtccttgctcacccaggtgagcagcgggtcgagttcgtggttctcgttgatgtcgttgccgagcacgcgcgcgccgagcgcatggaagatgcgtgccacggtcgagccgatgcggcccacgccgatgatgccgatcgtcagttcgctgatctcccgcgagatgagcccgtgcacggagaaatcgttgtgggaggcgcgctcgtcgaactgcggcacgtgccggatcaggcgcatgatgtggctgagcgtgagctcggcgaccgcgggcggcgagtaggacggcacgttggtgatacggatgttgttgcgatgggcggcggccaggtcgatggtgtcgtagccggccgaacgcagggagatctgccggatgccgtactcgctgaggcgacggtagaagtcggggttcgggctcggcgcgctgcgctgcttgtaggagatgccgtcgaaacccttgacggtgtgcagtgtgtcctcatgcagctcgaacgggaagcattcgacgtggacgccgtgttcggcggcccacgcctcggcgaacggccgctcctcgtcgatggtgtggtagaaggcgatggaggtcatgatggtggcctttctgaagattgatgggattggaatacgtcgaaaagatcagtggcgggggagcgcttgaaccagaacacaggcgggcgcgtggcgtcggagcccgataagtcctattgttcccggaaccgtcggatccggttcaccgcctcgtgcagcgcgtccagtgaggccgcgtaactgaaccgtacgtaccgggacggtccgctgacgaacgcctcgcccggaatgccggcgactttcgcgcgccgggccagaagccgcgcatagtcgtagctgctgccatcgaagatgggcggcacctcgacgtacgcgtagaacgcgccggacggtcgggccatcgtgtagccgagcccggtgagcgcgtccaccagatagtcgcgacggttctggtattcggccaccatgcggtcgatggattcgtcgccgcgttcgtaggccacttgcgcggcgtccatggtgaacatggcggccgtggacacgtgaatctgatgtactttgagcagctgcgcactcagggcgtgcggggcggcgaagaagccgaggcgccagccggtcatcgcgtagttcttcgacgtgctgtccaccacgatggtgcgttcgggcgcgaacagcgcgatggacggcgccgggcgcgcctcgtagctgatctccgcatacacctcgtcgctcagcaccgtcacgtcatggcgttcgacgacttcggccaacgcgcgcaactggtcggcggtcagggtcacgccggtgggattgttcggcgagttgatcaccagcaccgcatcccggccttcgaccgaacgcagcgcacgctccagtgcgtccggggtcagtacgaaatcggtgtccgtggtgtcgatttcgattgcctcggtgtcggtcagggcggccatgcttcggtacaggccgaacccgggcgtggcgtacagcagggtcgcgcccggatgcagcagggcggtcagcgcgctgctgatcgcctcgctcgcgccctcggtcacgacgatgtcctcggccgggtaatgcaggtcgcgtctgcgggccagatagtcggagatcgcctgccgcagtccgggggtgcccgcgttcggcgcgtaatgcgtgcgattgcgggccaggctttcgaccgcggcctgtttgatgaagtcgggggtcgcgaaatccggttcgccgagcgtgagcttgaggatgtcgggaatcgacgacacctcgccgtcgaacgagcggatgacggacgcggtgaggttgcccagttgcggaatcaccgcatcggccggctcgaaatggtgaggtttcggttgcggcgattccacaggctgatggtatgcgtcaggtgtttggctcattgcgtatctccggtgttggctgggtggtccttgtacgtgtgatgtgtgcgattggttgtcgcctattggcgggcggcggtttcggattcgaggccggaagtcttcggcagggccgccggcggcgtgaccccgacgcgcttgccaataaccgcaagctgatcgaacgtcgccctgtcgatgggcagggaagcgcggttgcgcgctgcggcaagccgttccttgtctcccggcaccagcacgtcgtggccgtccaccgagtccatggcgcgcaggcgagcggacagcgaggcgacgcgctcgccgaccgtggccgcgccgccgaacgcctccagatcgatggcggcgaagcagtggcagatatgctggcctttcatgtccagggacagcaggccgccggacagcacgccggtgagaatctccaccaccgtggccaggccgtagcccttgtatccggcgttgagctcgccggaaccgccgagcggcgtcaatccgccgatacgcggcgtggcgcgaatgttgtccatcacgtcggcggagtcatggttgacgcggccggagccgtccacggcccaatcgccctcgatggattcgccgagtttgacgagcacctcgatcttgccgagcgagacagtgctggtggccgcgtcgtagacgaactggtcgtcgccgcgtcccacggcgaaggcgatgggattgctgcccaaagccgggtggccggcgtgcgtgggcacggtgagcggattgctgttggtgctggccacgccgatcagcccctggtcggccgccagtcgcgcatacaggccggcggtgccgaaatgattggaatcgcgcacggtcaccagtccgatgccatgttcgcgggccttggcgattgcgagacgcatcgcgtcgcgggagatgagctggcccatgccgctgtgcccgtccagcaccgcgcaggctttggcatcgctgaccacggtggcgcgcgcggacggatcgatcatgccgtggcgtagcttgtgatcgtacatggccatgcgctgcatgccatgggaggcgatgccgtgccggtccgcatcgagcagcgttaaggcgatgaacgcggcgtcatcatgggcgaaaccccgacgttcgaacactgcggtcgcaaagtcctgcagttcctgtgcggcgacccgaacgtaatcggacatgaccctctcctgatgtatcgcgaatccccatgaccagtcgttgacgatgatcggcgcgacggttcggccgcgcctttcccgaacctagcacggcgcaaccggcgcggttggggcgtggcaatcgcgaaaaccgatagcgtgctacaagctgaatctgtaccatgcggcgtgccgcatggcgtaccttatatacatgctgcgcatatagcgctttataggcaacgcatataaccacgccgacctgccacctgtggccttgcactagggttggcgggtggcaatgcaatcggcgagaccacaacgcggaccgcagacaggaggaaagcccggatgatccagatcagatcggtgagcaagagcttcaacggcaccaaggtgctggacgggctcgacctcgacatcccgcgtcagaacgtggtcacggtgatcgggccgtccggctccggcaagtccacgctgctgcgcattctggacttccatgagcaggccgattccggcaccgtcgacttcggcgacggtccggtggacctgaccaccaccaacaccgccgacatccgcaaggtgcgttcgaagatcgggttcgtgttccagaactacaacctgttcctcaacaaaaacgccctgcagaacgtggccgagggactgatctactcgcgcggcgtcaagccggaacaggcgcgcaagatcgccctcgaacagcttgaccgggtcgggctggcggacttcgccgaccggtacccgagcacgctgtccggcggccagcagcagcgcgtgggcatcgcccgcgccgtggcgctcaacccggagctgctggtgctcgacgagccgacctccgccctggacccggaaatggtcaccggcgtgcttgaggtcatcaagcagctgggccaggacggcatgaccatgctcatggtcacccacgagatgcgcttcgcctacgaggcgtcgagcagcgtggtgttcatcgaaggcgggcacgtggtcgagcagggagatcccaagcagatcttcgagcaccccacgcagcaacgcacggcggagttcctgtcgtccaccaacaacgtgctgatgattccggcggccgcctgacggtccgatgaggcggcaggcgtgcccaacggcattgccatcgccgtcagcacagcattcaagattttctctaatagatcaaccaatgagagaccaaccaagagaggggttcgtcatcatgtccaatacccatggagtgttccgcaaggccgtggccctgctgtccggcgtcgccgtgctgttctcgctggccgcgtgtggttcgtcgtccgccggagagtccgactcgtccgattccggcaagacctcgaccagcgcacttgagcaggtcaagtccgccggcaagatcgtgttcgccaccgaaggcacctacgcgccgttcagctaccacgattccaagaccaacgagctgaccggctacgacgtggaagtggccaccgccatcgccaaggagatcggcgtcaaggccgagttcgccgaaggcagcttcgactcactgctcgccggcgtggatgccaagaagtacgacacggtcgccgaccagatcagcgccaccgacgagcgcaaggccaagtacgacttcaccgaaccgtacacctactcgtacggcgtggtcgtgaccaccaaggacaacccgaagaacgtctcctccttcgataacgtcaagggcctgaaggccgccgaaaccggcaccagcaactggaacaagaccgcccaggagaagggcgccgaaatcgtgcaggtcaacgacttcggccaagccgtcgaggccctgcagtccggccgtgccgacgtgaccctcaacgacggtctcgccgtgctcgactacctcaagcagaagccggacgcgaacatcaagatcgccgccaagtccgagaagacgccggccgctcagctgccgttccgcaagggcagcgacgacctggtcaaggccgtgaacgacgccatcgccaagctgcaaaaggacggcaccctgaccaagatttccgagaaatacttcggcgaggacttctcccaggagtgacggccgccgtatcaggtaccgtaacaacgcaataaccgcatcacacaggcaaaggacaaggcaatggacgcacgggtatggtcgatagtggtggattccttcggcaagctccttattccgggacttaccgtgaccatcccgctcaccctgatctcattcgccctcggcctgctgctggcaatcatcgtcgcgctgatccgcgtggccaaagtgccggtcgcggcgcagatcgcctgggtgtacgtgtgggtgttccgaggcacgcctctgctggtgcagctgttcgtgatcttcttcggtctgccctccatcggcatcacgattcccgcgctgccgtccgccgtgatcgcgttctcactcaacgtgggtgcgtacgcctcggaaacgttgcgcggcgcgattctggccgtgccgaagggccagcttgaggccggatacgcggtcaacatgccgtacgtgacgatcatgcggcgcattgtgctgccgcaggcgttccgttcggccttccccgcactgttcaatacgttcatcggactggtcaaggacacgtcgctggccgccaacatcaccgtggtggagatgttcatggccgcccagcgcgtggtggccgtctactacgagccgctggcgctgtacatcgaggtgggcctgatctacctgctgttcagcacggtgctcacctggctgcagcagtactgcgagaagaaactcaacgcgcacttctgacgggtatcatcactcacgacgaagttcgcgacgacaacgaaccataacgagcaattacgatcaaaggagcaaacatggccattgacgtgtacggagccagctggtgtggcgactgccaccgtgccaaggccgcgctgaacgatctcggtgccgcgttcaactggcacgacatcgaaaccgaggaaggcgcggcggatcgcgcggtcgccatcagcggccagaagcacatccccgtcgtcctgtactcggacggcgccttccaggtcgagccttctgcgctcgacatcaagaacaagcttgaggcattgggcgaactgaagtagtttcgcctcagccctctttctgaggtttccgccattcatatctaagggtcggtgacataagccattggctcttttcgtatatgttccgaacgaatacagattacagaagcaaaacggccatgcctaccattcggccgtcgccattccgccaaaccttggccggttggcgacgctcatggatgcttagcgtcgccaaccggccaaaagctggcaagacggcggcgctcaaaccgcttagcggcgctaccttgccagcgtttggccggataacgacgctgaaaggcgtcttagcgtcgccgagtcgccatggactggcctcttgactacgctgacgtgtcgtgagcgtcgctgtcctgccaaaccttggccggttggcgacactgggccccgcaatcgctgccgacctgccagtccgtggcggcttgacaacgcggggatgctgttcttcggacttggaccccacaaaacgactgaaaaacgtgaagccatagcttcgtataaatgattgatataacaacgccggtcagactgcaatcattttgcgttaaggtcgggaaacggaacgcgagaggaacggatgcgcgacatcagacttccgcgtcatcttgactggcaatcagtcatcggacgaatcggtgtgattccgcaatgatcagttccggtgagacatgattgcgttcacgcaacaagaggggaaacatagcaatatcaaccaagccgcagcttattgcccgcggcattaaagcattggcggtggcactcgtcgccgccaccgcgctcgcaggatgcggtgcggccggcaattccaagaacaacagtgccactcaatcttcgggtaacgtgcaggccatcaagaacgagacgataaaggctacggacccgtccaagagcccggccaacgccaacaagcgtaccgacacgttcgttgccaccatcaagaacccaggtggcgtgttcctgccgtacttctaccgcaacgcatgggatgagaacattaatcagccgattttcgccgcattggtcgtctatgacaaggacggcaaccccgcgggcgatctggccaaatcgtgggaagtgtctaaagacaacctcacctacacctaccatcttcgcgacagcgcgaagttctctgatggaactccagtgaccgccgatgatgtggctttcacgctgacccttgaaaatgacccggcctacaactttggcctcgccgactttaccgacatcggcatcaagggcgttgcggattaccaatccggcaaggccgattcgatttccggcatcaaggtcgtggatgacaagaccgtttccgtcaccaccgaaaaagtcaaccctgtggcactgaccaccatcggcagctacgtgcggtccaagaagtactacggcaaggactaccggcgcggcaagctcgattacctgcagcagttctacgacaagccactgggtgccggcccctacgagctcgacaagtacgtgcccggccaggaagtgcggtacaaggcggatccgaactattatggcagcaagccaaagatcgaacacctaatcttcaaggtcgtcaccgatgacacggcgctccagtcctaccagaatggcgataccgataccgacgtgtttattccggattccgatgtgctgtcccagctcaaggacttcggttggtcggatgtgaacatccgtaccaatccgtactactcctattccgagttcaacaccaagaagccatacctaaccaaggaagtgtgtcaggcgctgtactacggcctcgatcgcaagcagattgtcgccgcttggtacaagggctacggcgaagtggccaatgtatacgctccgccgagcaactgggcatactccaccaagggcgtgaacacctacgaatgcaatcccgacaaggccaacgagcttctggacaaggatggttggaagaagggccccgacggcattcgtgagaaggacggcaagaagctcagcctggtctacgtgaccaaggaccagaccgacccgatcatcagcatcggcaaggagcagtggaagaagatcggcgtcgacctgcaggccacggtcaccgatcagaacacggagaccacgcggttgaagtccggtgactacgatttgattaccttccgtacctcggtcatcaacgatccgtatgaagcggtcaagccgttcggtaccactgacccgcaggtcaatgataacggctacgacaatgccacggttcgtaagctggtcaaggaaagcatcgccaagtccgaccgcgccagccgtgagccgatttatcagaagatctatcaggaactcagcaacgatccgccgtatctgctcattggatacatcaagggcttcaatgcctggaacgatcgtattcagaatggtgacaagttcttccgcggaaccggtgactcggcgattcagctggcaaagctgtccatcaagaaccagtgacggcattccacacgagatgacgcctcgcggcatggacccaataggtctgtgtcacgaggcgtctcgccgtgcagagtgacatcctgccttccatccaaacccccactaggcataaggctcattaatccatgctacgttacacgctccaacgttttctgctgatgatacccaccctcatcggcgtatccatactggtcttcgcgctgttcgcgatgatgccaggtgatttcttctccggagacaccaaactcacccaggtgcgactcgaccaattgcgtgaggcctatggcctcaacaagccggttctggaacgttacttcttgtgggtaagtcaactgctgcatggtgactggggtttctccatgcaatacaaccagccggtatccaaggtcatcggcacctatatctggaactcgttcctcgtgtcgttcggggcattcatcatcgcgtgggccttggccatcgcggtgagcatctattccgcccgccacaagtattcgctgtttgaccgcataatcactttcgtcgtgtttgcggtgatgtcgctgccatcgttcttcgtgggcctggtgcttatcaagactctctccatcaatctcggcatcatgccggtcggcggactgatcaccaccggatccaactacacgggagcacagtattggttcgatgtactgcaccatgccatcctgccgatgctggtgatcgtatgcgtgaacttcggcccgttgacccgttacttccgcaccagcatgctggataccctgagtatggacttcattcgtactgccagagcaaaaggattgcccgaatcacaggtcatctacaagcacgcgttgaaaaacgcgatgctgccggcgattaccctgctgggattccgtttgccggccctgttctcgggcgcgatcatcaccgagcaggtgttcagctggccgggtatcggacgcatccaattcgaatcggtgaccacccgtgactatgcgttgctgatgtccattaccatgctgctggccattctgacggttgtgggcaatttcatcgccgacgttttgtacacgatggccgattctcgtgtacgtatcacgcgagcaaaggggagtgccaagtgagcgttcgactgccattcgcatcccgcaaaaccaatgccgaacgggatgaaaaactcgctcgggatacgacttgcaccggtggctcgctgtggcgtgacgcgatgcgttcgttcctgcacaaccggtccgcgatcatcgcattgaccatcttggcgattatcgtgctgatcagctatgtcggtcctccgctctctcactacgggttcgaggattacgacgtgatgaacatcaagcaggggccgagtctggctcatctgcttggcaccgacaattatggtcgagacgtattcacccgtgtgatgtacgccggccgaatctccattgccatcggtctgatttcgatgattgtctcagtggtgttcggcgcggtattgggtgtcatatccagctacttcggcggctggatggacggcattatcatgcgcattgctgatatcgtgctgtccattccgagcatgccgcttatgttcatcatcgcggccctgctcagcgccttcaaagtgcccaatgacgccaaggtgtatttcgtggtcatcatgctgagctttgtcggatggccgagcattgctcgtatgattcgaggacaggtgctttccatccgtgagcggatgtatgtgcgggccacagatgtgctcggtctgggcctgggctccaaattgttccgacacatactgccgaacacgtatccgattcttatcgttgaagccacgctggccaccgccaacggcatcatgaacgaatccgcattgagcttccttggtctcggtgtcatgcagccgacgccttcctggggcaacatgatttcggcggccaacaacctcatcgatttccagatgcatccttggctatggatctcgcctggtatcgcggtgttcgccacggtcatcgccatcaataccattggcgacaggttgcgcgacgctttcgaccccaaacagtattcgtgacatgtgatcgaataatccgaatcatgcggtcatgcaccacggtgcaggtaacacgagggaacatttatgagcatcatagtatcgaacaaaacagcacataaagaggacaaagtcgatgattccgatgacatcgtacttggtgtgcgccacttgaaaacatacttttatccggatgacggctccgtacgcaaagccgtggatgacatcagctttgacgttcgccgaggacgcgtgtgctgtttgatcggcgaatccggttccgggaaaagcgccacggccatgtctttgatcaatctgatcgatcggcccggccgcatcgaatccggcgaagtgctgttcgaagggcgtgatctgctgaccttggatgtcaagcagatgcgcgaggtgcgaggtgccgatatcgggctcatcttccaagaaccgatgcattcccttgacccggtgttcaccgttggcgaccagcttgttgaaaccattctggcccatgccgatgttccccgtccggaagccgagacacaggcgattgcatggctcaaacgtgtcgaactgccgaaccccgaactcatcatgacggcctacccgcatgagttgagcggtggcatgctgcaacgagcgatgattgccatcgccttgtgctgcgagccccgcctgcttatcgccgatgaaccgaccacggcattggacgttaccgtgcaggctcagattctgcgtctgttggtccgactcaagaacgaaatcggattgtcggtgctgttcattacccacgatttgggcgtggtggccgaaatcgcggatgacgtactggtcatgtatgacggtcatatcgtggaacgcaacacggtggagaacatcttcgaccatcccaagcatccatataccaaggccttgttgttgacccgacccatcatcgggcaaaaacttaagcggttgcccactttgcatgaggtcatgcgggaagtggatgacggtgaaatcacccagccacaggactggagcaccttggccgccaccgtggaagacgattcgattgccgaggtgggtgaacgctcccggcccggcactgacgattcatgccagactaaggagcatcagggccagcctattcttcacgtaagccatctgaagaaatactacgaacgggtgcgtggtttcggctcgcgtggcaacaatgtgaaaaaggccgtggacgatgtcagcttcgacgtgtatcgcggcgaaacggtcggcctggtgggggagtcaggcagcggcaaaacccctatcggacagacggtgctgcgtctcaatgccaaaaccgatggtgaggtgctgttcggcggcgaggatatcttctcgctcagcaatgccaaactggcccgaatgcgcacccgcatgcagtacgtgttccaagacccatacagtgcgcttaacccaaggctgaagatcggctcggccatcggagaggcgttgctgcatcacaagctggccacgaaacgtgacgtcaccgataaggtggtggaaacgctggaactgtgcggcatggactcctcctgcctcaatcggtacccgcacgagttttcgggcggtcagcgacagcgcatcgtcattgcccgtgccatggccttgcagccggagtttgtggtggctgacgaaccggtgtccgccttggacgtatccatccaggcagagatcatcaacctgttcagcgagctgcaacatactcgtgatgtatcgttcctgttcatctcccatgacctaagtgtggtggagcatatctgctcgtcgattctggtcgtgcataatgggcggattgtggaatccggttcggtgcatgacgtattcgaccatccccaggatgagtacaccaagagtctgttggattcgattcccacaagccaccccaaataccgcacgatcgcctgaattggcgggtggtatagatttttcgtatgtgggtgggggcgtggcctgtgccggaacgtggtggtatgggtgcagggcatccatgctgaacatcaaagatgggggaaaacaatatgacgaacactgaactgcagcgtcagctggaaacgtactacacgtggttccatcagcatcccgagccggcgtatcaggagaccgaaaccacggcgcacatcaaggagatcttggatgaacatggcatcaggattctggacagcgggctgaagaccgggctcatcgccattatccggggcgagggcgagtccgcgagtgtcggccatgtggtggcggtgcgtggggacatcgatgcgctgcccatcctggaacagaccggcgtgccgtacgagtcgctgaacaagggctatctgcacggctgcgggcatgactacaacctgaccgtcgcgctaggcgctgcactactgctgaacgagcgcaaggcggacttcgccggcgaggtcaaggtgatcttccagccggccgaggaggtggccgccaccaaggaggtgcccaccggcgcggtcaccgtaatcaacacgggagccctggacgatgtcgaggcgtttttcggcacgcatgacaccaaccagggcgagcccggcaccgcgttcatctccgccgggccggacagcggcgcggtcgacaaataccgcatcaccgtgcatgggcgaggcagccatgccgctcatcccaacggcggggccaacccgattcgcgtggccgccgcactcatcgaaggcatccagtcgattgccgggcaggacgtggacccggtgcatccccgcgtcgtcaccgtcacccacgtggaagcgggcagcacctggaacgtgattccggcaacggctttcctcgaaggcactgtgcgcacagcattccccgaagaccgcatcatgattcacgaccggctgcgcgcaatcgtggaaggcatcgcatccgcgtacgatgtcaccacggacttcgaatgggagtacggatcgccctcggtcatcaatgacgcggattggtcggcgctgttcgcgtcaaccgccactgagctgggccttaaggtcgagccgtcgcagccctcgctcggcggcgaggacttctcctactatctaggcaaggcaccgggcgcattcgcccatctcggcgtcggcaacggcgaccggccgatgcacggacctacgttctacgccaagctcgatgccatcgccgcgggtgcggacttgctggccaccgtggcgcaacgtgcgctcctgcggctgggcgagcagcggtagtcgccgcgcggcaatagattgtcgccgagtacgttgccggtcgctggctgtacaccaatgcgtacaattcccgggcgatttgtccgtcggctgatacgatgggagtcaccagccggaaccgaaggtggtcccgacgcatagtgaaaggaaagtcatgtccgtattttttgggggagcgatgatcacctttctggtcatcctcgtcattatcatcgtgctgctgggcgccgcattgttcatcgttccgcagcagcaggcgtacatcatcgaacgcttcggcaagttcctgaaggttcagttcgccggcattcacatccgtatcccgttcgtcgaccgcatcgccatgaagacc

SEQ ID NO: 884 - DNA, 7316 bp, Unknown
  R14_18m  MAG No. k141_19687
catcatcttcttcgccctgttctggttcctgatgagccgcatgggtggtgccggcggcatgctcggcatgggtggcaagaagaacagcggcaagctactcgatggccagacccccaccaccaagttcgccgatgtggccggtgaagacgaggccgtggccgaagtcgaggagatcaaggacttcctcaaggatccgtccaagtacaaggcgctgggtgcgcgcatcccgcgcggtgtgctgctgtacggccctcccggcaccggtaagacgttgctggcccgagccatcgcaggcgaggccggcgtgccgttctactcgatggccggctccgacttcgtcgaaatgttcgtgggtctcggtgcctcccgtgtgcgtgacctgttcgatgaggccaagaagaacgcccccgccatcatcttcatcgatgaaatcgatgctgtgggccgcaagcgtggctccggcatgggcggtggccacgacgagcgcgagcagacgctgaaccagctgctcgtcgagatggatggtttcgacaacgacaccaacctcatcatcatcgccgccaccaaccgccctgacgtgcttgaccccgctctgctgcgtccgggtcgattcgaccgtcaggtgggcgtggccgcccctgatctggaaggccgtgaggcaattctgagggtgcatgccaagggcaagccgttcgtaccggacgtcgacctgcacatggtcgccgtgcgcacgccgggcttcaccggtgccgatctggccaacgtgctcaacgaagccgcgttgctgtgcgcccgtgccggtgcccagttgatcgacaaccgcgccatcgacgaggccatcgaccgcgttcaggccggaccgaagcgcaagtccaagggcatggctctggaagagctgcgcaacaccgcataccacgagggtggccatgcgctggtagccgccgccctgaacaacaccgacccggtgaccaaggtgacgattctgccgcgaggccgcgccctcggctacaccgccgtcatgccgacctccgaccgctactcgcagtcgcgcaaccagctgctcgaccagatggcctacgcgatgggcggtcgcaccgccgaggaaatcgtcttccacgacccgaccaccggtgcctcgaacgatatcgagaaggctacgagcatcgcccgtacgatggtgatcgaatacggcttctccgacaagctcggcgccatcaagtggggttccgacgacgatcagaccaccgtgatggacggtctgcagccgcgcaaatactccgaccgcaccgccgaagtgattgatgacgaggtgctgaagctggtggaaaccgcccacaccgaggcgtggaccatcatcaacgacaaccgcgatatactcgatgagttggtccgccagctgctggtcaaggaaactctgaacgagaaggagcttgcggagatcttcgcgccgatcaagaaggcgccggtccgcccggtgtggctgtccaacgaccgtcgccccgactcggacaagccgccggtggagattcccgaaagcctcaagcgctcggtcggcatgaagccggaagagtagacacgatgacgattctgcccgacctgttcatgtggtttctcacgtacgcaggccgggccgacgtcgttgtggacaatgacaagggagagatgagatgaacgaatatatagagtcttgccagcgggagaaacgcacatacgacgaggaaggcgtgcgcgaggccgtacgcctgttcctgaagtcgattggcgaggatcccgagcgcgagggactggtggaaacgcctgaccgtatcgcccgcgcgtgccgcgagctgttcgccggtctgcaggcttccccggccgatgtgctggagaagcacttcgacgtggataccgacgagctggtgctggtcaaggacatcgaactgtattcggtgtgcgagcatcacctgctgccgttccacggcgtggcccatgtgggctatattcccgccaaggacggggtgatggggctgagcaagctcgcccgactggtcgaggtgtatgctcgccggccgcaggtgcaggagcgtttgacccagcagatcgccgacgcgctggtcgagtatgcgggcgcacgtggtgtgattgtggtgaccgaatgcgagcacctgtgcatgtctatgcgcggcatcaagaagtcttccgcccgcacggtgacctctgcggtgcgcggcatgctgcgcaatccggccacccgagccgaagccatgagcctcattttggataaatagtgtctactaagctccctcatcatagggagctcacttgggacctacatagaaggggaaacataatgactgatttgcaggcgttgcatgacactacgcacaccatggtgatgggtgtgctcaacatcaccgaggattcgtcctcggacggcggcctgtggctggacccggccaaggcggcacagcacgggcgcgacatgatggccgccggcgcggacatcatcgacatcggcgccgaatccacgcgccccggcgccaagcgcgtgtccgaggctgacgaattggtccgcatcaccggtgccgtcaagacattgattccggccggtgccatattgtccatcgacaccacgcgcgcatccgtggccgccgctgcgctgagcgagggcgcccagatcatcaacgacgtctccggtggcacgctggatgccgaactgccgcacgtggtcgccgaccacgactgcctgtacatcgtgcagcattggcgcggttggctcgccggctccaagggcgcgaaccccgatcaagacacctccgtctacgagcacggtgtattgaccgacgtacacgacgaactcatgcgccaagtcgacggtgtactggccgccggcgtaaagcctgagcgcattatcatcgacccgggcctgggcttctccaagcccggcatcgagcacaacctgccgctgctgaccggactcgagaccttccgcgccaccggatatccggtgctgatcggccagtcccgcaaacgcttcatctcggcgatgcttaccgaggcgggcgctgccggtgctgatgggccgatcatggcccagcgcgatgacgtgaccgcagccttgtccgccctgtccgccgaacatggcgcatgggccgtgcgcgtacacgacgtggccaaaagccgcgccgccgtcatcgccggcaacacctggcgcgaatacgcatgattcccctggctccctgttttggttgcttctaggccttggctcccctcgggcgaggggagctggcgccgaaggcgactgaggggagcatttgagcagaaagccttaccaatggacaccatcacacttaccggcgtacatgccaacggcacccacggtgtgctcgccttcgaacacgaacggccacaaaccttcgtcgtggatgtcaccctgcaccttgatctggccgcagccggtcaatccgacgatctcaacgacaccatcgattacggccgtgtggccaaggacatcacggctgtcatcgaaggccctcatgtggacctgatcgagcgtctggcccaacgtatcgcggataagatccttgccgatgcgccggccgtcgcctccatcgacgtcaccgtgcacaagcctcatgcgcccatcgtcgtggcttttgcagatgtatcggtctccatctcgcgcgtgcgtgccaccgataatggacgcactgctgaagagcatgccatccataacgcggtggtggccttgggcggcaatgtgggcgaggtggaatccaccttgcgagccgccgttcgggagattgacgcgctgctcggcacacaggtgactggtatttcgccgctttaccgcacggccgcgtggggcatggctgacggtacgccggatttcctgaacgccgtggtggagcttgaaaccacaatgggcagccacgaattgctcgccgcgttgcaaagcatcgaggcgaaccatgggcgaattcgtgagaatcattgggattccaggccgttggacttggacattatcgactttgatggcatcaccagcgcggatccggatctggcattgccccatccgcgtgcttggcagcgcgcgtttgtgctggctccctgggcggcgctgaatccgaacgccaaacttgccggagcccatgaggggcctgtagccgatttgctggccgccgcaccggaccgtaacgccgtgcagctcgagagcgaagactggatgctcggcgggcatgcagccaagcaaaaatcagcgtcggagtcggcacccgtctcacgcaaggcgattatttcgctggattccacctcgcaggatgccgaacggctgttccgcgaaaccatcgtttccatcgacagtgttcctggcaatcaggtacagggcatctcgccgctctaccatgtcagccatttcgacggcccggacgcgatgagcgcggtcatccaaatcgaaaccaagttgccgcccgccgacctgattgccgtattgggcagcatcgaaagcgttcatgatctggcagtcgaccttgaccttgtcgacatggaaggcgtgacttccgacgagcccaactgcagcattccttggccgtcggcccgtaaccatgcgtcggtattggcaccttggctggatatggacccgaatgcttctctgggcggcgacccggtggccttccttttggccatggcaccggatgccggacaggtcggattgctatcggacaactggatactgtcgaacagttgagctgatggcagaaccagttacgaacggtaggctagaaaccagacggtgacggaccagtctccggcctcgaacagccgggcacggcagtgacgaaaaccaaatcaagatgaacagcccaagcgcgagggccgttcgcaaacagcaaacagcaacgcaacgataaggagaccggacatgaaaacacggcgaacaccatggtggcagtatgtgatcggtgccgtgctgggcctgttggcgggtatcggtctggcctcctacggcgaaagctcgggactgtcgctgattggtgcgccttggattgtgaccggattgctggccgtgctgggcgttatcgtgctgatcttggccctgcaagtgcataaatacgcgaataccgaccccaagaagcgtccgcatagcttcatcaatcccactatcgcggtgtatacgctggtgctggcaaaggcactgggattggcgggcgcaacgctcgccggctggtatggcggtcagattgtgatgagcctgagccatatcgaggcggatttctatgcacacgccgtcaccgagtgcgcaatcgtggccgtggtgtgcatcgccgacatgatcatcggcattatcggcgaatggttgtgccagctaccgccgaacgaaggccccgaaaacccgaaaatcaaggaagccaagcgccgtagcgacatagcccaggcctacaaaagataatccgtgataagccccctctgacgagggggccgtaggcgtagccgactgggggagagaagaagaaaaaaccacaccatcggccacgccgatgcccgctattcctgcggcacgcgaaccatagcttcctgagcgatggccgccaccaagtcgccattctgcgcatacactttggcgatgccgagtccgcgcccgtgcgcggcgataggcgtatcctgcacatacaaatgccattcgttgatatcgatatcctgataccaccacatcgaatggtcgatggacgcataggaaatgcccggtgtggaaatcgacagtccggcgcggcgcagcaccggctccatcatcacctgatcgcagccgagtgccagcatcgcacgatgcatgacctgcggcacatcgacgtggccatcggccttcatccacaccatctgcttgccggaatcatgctcggcggaatccttgtccgcgcgcagcatcacggtcggcgtcacgtggcggatatcgaatggcgatttctcgacatagaaattggcgaacggcgacttttcggcgaacggctgcatgagttccttggcggaagtcaacgtttcgggatcgggcaggttttccggcatcggatcggcaaattccacaccctcctgaccggtctcctggaaggaggcgatggccgtgagaatcgacccctcggcttgggtgacgttgacccgacgagcggagaacgagcggccgtcgcgaaggttctcgacgtcaaacagcaggtcttgacgaatatcgccggcggcaatgaaatagccatgcaccgaatgcggcaggcgtgaagggcccacggttttggacgcggcgatcaccgactgggcgatgacctggccaccgtagacgcggccagtggggaagtacatactctcgccattgatgtatgtgtgattgcggtaagcggaaggctcgcccaacttcagcaccttcaccagatggtccaatggagttacggtggttgcctgagccatggcgttcctcgattcctgttctgctgtgttcgatattcggttatcgtattccaacctatggttggcagtctatccggtgggggttaagagttccgggagcgaaatgtaacgagactgtttggaaggtaaacggttggttatgcggtgcgttgccgctacgttgctgctgcactgccggtgtgttgccggtgcgttgccgtaggtgactgtgggattttatgggatgcggggcggggcagtcatgggggcaattatgggaaagccgcccctgagggacggctttcgacgtataaagcgcgttgtggcactaatgccggcgtatctcagccgcgcacgagcttcttgtgcaggcggtgcgggcgggccgcatcctcaccgagtcgggccaccttgttctcctggtaggcctggaagttgccttcgaaccagtaccacttggccggattgtcgtcgtcgccttcccatgcgaggatatgcgtggcgacgcggtcgaggaaccaacggtcgtgggagatcaccacagcgcagcccgggaactcgagcagcgcgttttcgagggattccagggtctcgacgtccagatcgttggtgggctcgtcgagcagcagcaggttgccgccctgcttcagggtcagggccaggttcagacggttgcgctcaccaccggacagcacgccggtcagcttctgctggtcggcgcccttgaagccgaagctggccacgtaggcgcgggtcggcacttccatgccggccacctcgatgaagtcgaggccgccggacacggcttcccacaggttcttgttcgggtccaggccttcacggttctggtccacgtagctgattttgacggtgtcgccgatcttcagctcgccgctggtcagcggttc

SEQ ID NO: 885 - DNA, 28506 bp, Unknown
  R14_18m  MAG No. k141_20373
ctacgccgtgggcgcggacggctcgcgttcgctcgccaccgaagcgccgctgaacgaagcggcggccgtctccgacgtgaaagtcgaaccaggcaaggacggcaacgtcaaggtctcttggaccaatccgcaggtatccggcgagaaaaccgtgaccgtcaaatccgacaccggttcgtggcgttacgccgcgaagccgtattcccagaccgtcaaggtcgccgccgacaagagcaaagtgacgattgccaatgcgccggttgacagctcccgctatgtggtgaacgtcgataatgcaggtggcactaccgctacggcaacaggtgcatttgccgatgccgccattgagccgtatccggcttgctcggtgatctggaatggcgataatgtgacgctggcccgtcctgagacttaagactggcgctacctgtacatgaccgagaagtggatcggcgagaatggcaagcagcagcaggagaaccagctgggtgctagctacacctactcgcagaacactccgccaatcactggtattatccgtggtcgtaccacacctgcctcatacaccaggtccatcccccgccagtcatgaactgcgggtgcaggtcgaggattacagcggcaacaagaccgatccggtgaagattccgaccgccgacgaactggccaagtgcacggtcgccgaccccacccagccggatgccaagaagtccacgctgaccgcggtcgacggttcggccgtggccgacggcaaggccatccgcacggtgcaggcaacggtcaaggattcgttcggcaatccgctggccaatgccgaggtggcgtttgaactgcccgaaggcgtctcggccattggcggaaacaccaccgtcaagaccgatgccgccggcgtggcttcgctgaacgtcgtgtccacgaaggtcggcaagtacacggtgaaggccgtgctgaacggcaatgccatcggcaagggcgtcaccgtcgaattcaccaaggtcgcggtgacgccgaacaagcccggcgaccagaacaagcctggcgataccaagccgaacaagcccagccagaacgacaacaagaacaatgacaagaatggcgcttcgttgagtgccacgggttcgtcggtcattgcgattgtggcggccatggtggtgctgcttggcgcgggtgcggtggtacttcgcgctcgtagcaagacggagtagttcgtcgcaatacgggtgttgatactcgtgccataagcgggatttaggggttgcccaatgggtgcccccctaaatcccgtttgttttgtcgcaggacatatgccgagaccagtgactaaaatgctttagttatttgactaaaattattgatatcataagagttagcgcacggttgatgcatatggcccaatgcgggggtgccgtcaaccgtatcgcaatagtcgcaatgcggtcgtaaaaaggagtgttcatgagatctgctcgcgaggcatcgtcatcgtctgacggcacgcagcgtgtgagcctgaaagacatcgcagatgaattaggcatctcgcagaccgcggtatccttcgccatcaatgatcggcccggcgtttccgcggaaaccaaacgtcgggtcaaagaggctgcagccaggctcggctggacgccggtctacgccgcacaagcactgggatcctcgaagaccatgaccataggctttgcccccgcacgatccacgcaggggctcacggatgaaagcttcatgctgcacttcatggcgggtgtgcacgcctcgctcagccccaaaggctatggtttgctgtaccgcccatgccgattcctgaacgaggagatgagcgtatacaaggattgggcgtcgcgcaagcgcgtggatggcgttatcctcgtcgatttgcgagccgatgatccacgcccggaattgttgaagaatctgggtgtgcgcgcagtgcttgccggaggacccgacccgaacaattatgtgccgtcactgtccatcgatgattcacgcacgatgggaaccgtgctcgaacatttgtcgtcattgggacaccgccgaatcgcctatctttccggcgatccgaacctggattattcacaggggcgtgtcgcggcgttccgcgcatttgccaaacggcgaaagctggaattcatcaacatcgaattcaccgattttgttgcggaacaggccgcgatgctcacgttggagatgctgcattcaccgaagccgcctaccgcgttcatctatgaaacggagatcctcgccgcggccagtcttcacgccatggccgaagattattccgctcggcagatggaggcgggggagggccatgcggaagtctatccgaatgggctgcccgccattgtcagttttgaagacagtttcatttgtgaggcggcgtatccgtcaattaccgccgcgcatcgtgatgccagcgaatacggtgccaaagtggccaaactgctgctcaaagtgcttgccggagagcaggtgagcggcaaccggcgaatcctcaccccgaaactggtgattcgggacagcaccgccaagcccatggataccatggcgtagaacggtcattgcatcggcttgcagacaatgacatgcgaccagtacggcgttggcccccgtattccacgggggccaacgccgttgagaaagaggaagaaaaaaggatatagaggcttagatgctgtcgattattcagcgttcttcacggccgtcgcaatggacacggccgggtccaagaacggaatcagcgtggactggaaggcgtggtacagatcggacttgcccggccagaccgtgccgatcacgtggttgtttttgtcaagctgatggaaccaggaaccgccctcgtggtcgatgacatgctcatcgacatactgggcgaatgtggcgtaccagttggcgtacatctcctcgccggtggccgcatacagcgtggcggaagtgttcaacgattcggccagcgtccaatgcatgcgatcggtgaccacgggcttgccgttccagtcggtcgtgtaggcgagtcccacggtgccgtcggcgttccatgcgtcggccacggcacgcgcgaacagatgctcggcggcgtcgacgtacggctgtgcgccgtcaaggttggcgaaggagcttaacgcccactgcgtgatcaagcgggcccattcgatgccgtgacccggcgtggcgccgtacggcttgaactgatcatccttcttgtcgacgttgcattcgaggtccagcgaccaatcggacttgaaatgttcggggatgcgccactcgttgtgcttcgcccagccgatcacatggtcgatgatgcggccggcgcggacgcgataggtgttgttcccggtggcgtcggccacggccaagaacgcctcggtggtatgcatgttggcgttgagaccacggtacgggtcgagctcggtgaattcggtgttccaggtatcgacggccaaaccgatttcgtcatcccagaaatgcttgtcatatgtggcaagcgcctcgtcaagcagttccttggcacccggacgtccggccagcagggcggaggacgcggcgagaatcacgaaggcatgcgcatagcagaccttgcccggcgcatgggtgccgtccgcgaacacctgcggataccagccgccgtgctcgtcgtcatgcagaatgccggtcaatcccttgagcgccgcgtcggccagctcgcccgcacccgggtatccgagcatggcaccaatcgaatacacatgggccatacggctggtgatccacgtctcgacgccgtgggaggggtcgagggtgccgtcggcgttcagccagccggaaccgccatccggcgctgggaagcccttgccgaacttcagcagctcgtaggtttcggaagccatgaaaatgcggttggcttcggtgccgagtgcataccgtgggttattggtcataatgattgttcctttccttaacgagaacatgcggtgggtgcgcaatgagcattcagcgggcacgtcttagtgcttcacacgaatgtcgaaatagtccatgaccagttcacaaaacatcatattcgaccagctgaaccattcgcgcgtgtacttggtcggatcatccacgtcgatgccttcgtgcatgagatgtgtaccggcgtcggtggttacaagacggtcgaggatatgcgccttgaagtccttgctgtcgctggtcatcgcctcgatagacagggcgatgggccacacatagcgcggcggggtgtgcggtgagccgatgcccttgagatactcgccctcgtagtagtacgggttttcgtcgctgagcagcgtgcgtcgggtcgccagatacgtcggatcgtccggtgcgcagtaccccaagtaaggggccgccatcaaggagggcacattgctgtcgtccatgatattgacgtgacccaggccgtcggtctcgaacgcgtaaatcgtctcgccattgcggttcgtcgtcttggcgtggttttcgatgccttcggtgatggtgcggcgcagctcgccggcacgggcggcgatatcggcgtcatccagaatctcaccgccgaagatgcgttccagatagcccatcaccacggcggcgaacatgttcgagggcaccagatagtggtaggtgcaggcgtcgtcgctggggcggaagccggaccaggtcatgccggtgtacgccactggcgaccccttgccgtcattgctcagcgattcggtggggatgtccgtgtcgcggatgaagaaatacggggagcgttcatgatgctgctcggtctcgaagacgtcaagaatcttcttgacgccggcaatgaattcggcgtcgaagtgatcggcgttgccggtgttcgcatacagcatccaagccaactggatggggtagcacagcgaatccacctcgtacttgcgctcccaaagccaagggctggagaaatcggaccggtcgtccttgtcccaggaggcgccgttcggttcctcgttgaaggcattcgcatacgggtcgatgatgatgtagcggaactgttgccgtatcagaccggcgatcaggttcgcaatatcgctgtcttcggcggcaagggccagatacgggcgcaattgcgcggtcgaatcacgcagccacatggccgggatatcgccggtaagcaggaatgtggtgccgtcgtcatgccgtttgaccgtggtggtcagggtgtcggcaaagcaggcattgaagttctcggcccaggcggtgtgttcggtgccacacaggtccgtgatgtgctgcatgaaatccgagaccgacttcggtatcgcggtggtcgtcataaattcaacttctttgtttgagggatatacatatcaagggaacagcattattctaaaccgctttagttcatgacacgcgaaaggatgtgaagagcatgagtgtgagcgcaccatatgaaaaaccggtgagatttcctgttcggagaatctcaccggttgcgatcagtcgattcgtgaagtcgcacgaatggcggataaggggatgggtggattacttgccgatttcagccagatagtcgggcatctcggccgggtactgcggccaggcaccggcctgggtgcagacgtaggcggcggtgttgacggccttgcggtgggcttctgccagcgtgtcgcccagcaggatgcgggcggtgaaggtgccggagaaggagtcacccgcacccacggtgtcgttcacctcgacgtgcggagtgtccagcgtggagacctcgcccttgcgggagatgatggtggagtaggcggagccggcggtcagaatcacgtagtcaaggccgaattcctcgatgaaccagcgggaggcgtcttcgccggaggtgccgcggatgtcgaacatgtcgcgcagcagcaggagttcctcgtcgttgatcttgaagacggtggccgccttgaggagttcctcgatgaggtccttggagtagtggtcgccacgcaggttgatgtcgaagaacttcatcgcgcccggcttggtgtgcttgagcagctccgtgatggtggcgtgcgattcgggggagcgcagggccagggtgccgaagcagacggcgtcagccttggagaccacgtcgatgagctggcgggtgtacaggatgtggtcccaagccacgcccttgacgatggtgtactccgggatgccgttcttcagcgcgacctcgacggtggaggtcggccaggcgttgcgctggatgacggtgttgatgccggcctcgttggccttggcaatcagttcgtcgccgagctcatcctcgccgaccgcgctgatagcccagccttcggtgccgttcttcatcgcgtggtaggcgaagttgacgggggcgccgccggctcgcttgccgctcggcagcatatcccacagcagttcaccgaggctcagaacgatcggggtagtcatggttggtttcctttcctttgtttcttttaccgggtgtttcgtatggaacatcttgtgatgtcggcgcttggtttaggagacgtcgaagaacaccgaggggtgttcgaggaattgggtcaccgccactgctgcggcaccggagaccgccgcgtcggcggacagggtggataggctgatggaagtggaggcattgatttcggggatggcccgttcggccaccgtggcgcgcacctcatcgagcagtatcgggccggcttcggacacgatgtcgccgatgatgatgtgctcaggattgtatccattgaagatggtgacgcatccgtagccgacgtatcgggcgacttcgcggacaatggcgattgacgcttcgtcgccgtcgccggctttggcgaacagggcgcgggcggcttcggtgtgggtcatatcggccgcgccgggaaccacggtgccatcggcgatgagcatgtcgtgaatggcgggggtggagcagtagcgttcaaggcagccgacgttgccgcaatcgcaggggcggccgttgacgtcgatggagatgtgtccgatttcggtggcggcaccgaggaagccgttgatgagacgaccgttgtcgatgacgccgaggcccacgccttcgccgaccagataataggcgaggttgccgtcggcgtgcaccgacgggtcgaagagataatgtgcgagggctccggcgcgggcgtcctgttcgatgaacacaggcacgcggaaagcggtggcgaattcgtcgatgaagttgattttgcgccagccctgcatgctggacaccacggcggtgcggcctacgttacgcaggtaggggccgggcaccgccatgccgatggccacaatggacgggtcgttgtcaagcagttgttcgacgcgctggtggatggtgacgatggtgtcgttgatggtgttgtcgtacaccgtgggcaggttttcaaagctcagggtgttgccacacaggtcgaacacgccgatctgcaccagcgagcgggcgaatttgatgccgatgatgcggaaccgcgtggtgtcgagtttgagaccgatggaacggcggttcttggaaccttccaaatcgccggtctcttcaatcatgccggcctcgataaggcgtgcggtgattttggtgatggccgcgggggtgagttccagtgccttggcgatttgcgcgcgggagctgatgccgttgtgatacaggtgcttgacgatgcgggagcggttggattcggagacactggcttgggaagtggcatgggtggtgtttgttgccatcggtcttaagtcctccttgtctgcaccgttgcgagttgttccgctcgtctttgaatctgaacttgattaagatattaacgctgttaattgattgacgcaatcaatatgtcattcggtgtgtcgtgcatgtgagtgtcgtcttgggggaatttgttaagatggttgtcaatagtcggatgcacactgatatcaagcgaaacgttcgatgaagaacaggggaggactgatgtctgaaaacactatgaacaatctcaaaatcggtgttgacgtgggcggaacaaaaatcgaagctgtgctggttgacgcaatgggcacggtattgggttccgcccgtattcccgccaggcatggcaacgatgccgtgatcgaagacatcgtcgctgtagcacatcaggcagcgggtgagcgttttgacgaggtgagggccatcggtgtcggtaccccgggcacggtggattcggccagcgggcatgtgggcaatatcgtgaatctcgacgtggtctcgctggatatggggccgttggtctcgcagcgttcgggcgtgccggcccatgtggaaaacgacgtcaatgccgccgccgtcggcgcggccaccgtattgggcggtgcggacggcatggccggtaccattgcgttcctgaacttcggcaccggactggctgcgggcatcgtcgaaaacggcgtgctgatgcatggctatagcggcgcggccggcgaaatcggccatatcccagtcgaacctcatcgcctcaagtgcccttgcgggcaatacggatgcttggaaacagtctgctcgggcgcatccgtggggcgtctgtggcccaatgccgacccgccgatgcccgacctgattcgtcgcgcgaaaaagcgggaggccaaggccgtcgatgtgctggacatggtagtgcgcgccatcggcgacaccatacaaatcctggctcagtccgttgatccgcgactcatcatcttgggcggtggcatggccaaaaccggcgaaccattggtcgaggtgatcacggctgagctgcgccggcgcgaatcgcaatgccgattcctcgaaacgctggacctgccggcccggctgcgtctggcacctgtcggccaaccagtcggagccatcggtgccgccatggcggcgtagtctggcatagtgccggggcatgggagatgaggcctcagatttgtctccgaggccccatctcccacgcagtcctatatcgctttatgtcgtgctgtgccgcgcttggtcttgcgcgtttcgttgccggggtgaccggcttttatttggccaagtgttggaagaccacggcgatggcctcgccctgtacggtgatgtcaggtccgcattcgcagcgccgaatcaccgtgtgtttgtggaaggacgaggacgtggcggcatccagatattgctgggccgcgccgatgaacgtcgcgttgatgatgttcggctggccatagacgcatacgtctgccatatccaaaaggcccacaggcatggccagggcttggccaagatagcggcccgcccgagcaaggataccctgatgctgctccatgtctgccgcgctgagttgcttcttcaatgcggttccggaaatcatcgtctccaagcaaccgtgcttgccgcaagggcacagcggcccgtcaagatcgatggaaatatggccgagctcgccagccgcgtgcagttcgccgattaccggcgtgtccgagagcagaatcgccgaaccgatgcctctttcgatgcgcacgaaaagcatattcggcccgccttggccaaagaaacgttcggtgagcatggctgcggtggcgtcgttgctgacgtttacttcaagtccgaaatgttcggcgattggcgtggacaggtcgagattgttccagccgcgcatcgtggaggagcggaccacgccgttgtctaccacgccgggggaggcgactccgatgccgatgacctcgccatcggacatgcccagcatcttctcaatgagctcgatgatcacatccacggaaacgaatgagccggtgttcagggtgacttcggcgtgacgcagcggctggccgagcagattggtgactgcgccgtgcagcaggtgctcctgcgtcaggtcgatgctgatgatgcgcagtcgatcgatatcgatgctcagcagtgtgcctcgtttgcctttgccgccgctgggtgcctgaccggtctcgcgcagcaatccttcctccagcatccgaccgaccacatcggaaacggccacgcggctcaatccggtgcgtcggccgagctcggcgcgcgaatactggttggtggggaacaacaacctgaagataagttggcggttcttgcggcgcacatcggcgggggaagccttggccgcatggtcgtcggtcgttgtgttgagaccgagatatgacatgtttcctcctacctgatggtgagcgagtggacggcgattgttgttccatacacagcttagacggtgaagcgcaatttcgtcgttgaaactgttatgaaacttcactaataaattccagtgtacctgtgtgaagcgtcaggaaacaccgtgagtgttcatgaggtccaaaattgttactatcattaacaaatagcgaatcaccaatcggcgctacgccgaacggtggttggaacgccgcgcggcacccggacgtgacaaggatgttgccattatccgcaagacgggcggcggtacagcgactcgcatcgggcgggccgcacggaactggaggaaaccgatgccggaaatcatcattgtcaagaacgaagccgaggccggcgagatctacggccgttgcgtggcggacctgatcaaagcaaagccggacgccgtgctgggcctggccactggctccagcccgctggccgcctatcaggcgctcgccaagatcgtcaaggacgaggccattgacgtttcgggcgtgcgtggtttcgcgcttgacgaatacatcgggctgccgctgacccatcccgagtcctatcatgcgaccatccatcgcaccgtggtcgaaccgcttggcctggacccggccaaggtccatgtgcccggcgacgtactcaacggcactccgctcgaagacggcgacaaagtcgcgctggccggcccggcctatgatcgtgccatcgaagccgctggcggcatcgacgtgcagatcctcggcatcggcaccgacggccacgtcggcttcaacgagcccggttcctcgttggcctccggcactcgcgtcaagaccttggccgaacagacccgcgtcgacaacgcgcgcttcttcgacaacgacatcaaccaggtgcccacccactgcatcacgcagggtattggcacgatcatgaaggcccgtcacctcgtgctgctggcgttcggtgccggcaaggccgaagccatcgaggagacggtggaaggcggcttgtccgcgttctgcccggcttccgcgctgcagatgcacccgcacgccacgattatcgtggatgaggaggccgcctctcgtctgcgccacaaggactactatcgctacgcctacacccacaagccggcctggcagggcatctgagttatcgtgtgctggcttccctctttgtgtgaggggagctgtcgaatgtaatgagactgagggtggttatcggcggcggcatatgtgtattgcttcccgattggaccaccctcagtctcgtttcgcgagccagctcccgttggcgggagcgcatgagcggtaaggagaacaacatgtctgataggaacgagatagtctcgcgcgtgaccgcggcactggagggcaagccggctccggtggcgattcgcaacgcgcgcaaggtggatgcgtgcggcgaacggcgcggatattgggtcgtctccgatgccgccggcgtcatcgtggcggccggcacgggggaggaggccttcgagcactactgccgcacggtggggctcgacccggccgatcgcaacgtggtcatcgacgccgaaggccgtattctgacccccggctacgtggacatccacgcgcacggcgcatgggtgaagagcttcgacgacgggtcggatggcatcgatgtggcgcgggccggccacgccgtgcacggcaccacgcgccaggtgctctcgctgatcaccaatcccgtggacgtgatctgccggaacatccgcaccgtccgcgccaagatggagtccggccgccccgacatcctaggctgtcatctggaaggtccgttcctggctctggcccgcaagggcgcacatgacccggaatgtctcaaggatccggtacccgacatcgtcgacgacatgcttgaggcttcaggcgcggcgaacggcaagattggctgcatccgccagatcaccatcgcccccgaactaccccacggcatctccgccatccgccagttcgccgctgccggcgtggtgccggccgtgggccactgcgacgccgactacgagaccgccaaagccggcttcgacgcgggcgcgggcatcatgacccacatgttcaacgcgatgaacggcctgcaccaccgcgagcccggtccgattccggccgcggtggaggatccgcgcgtcaccatcgagctcatcaacgacggatttcacgtgcaggatccgatggtgagcctctccttccggttcgcgcctcatcgtacggccttcgtaaccgatgcaatggccgcgaccgactgcccggacggtgcctacaagttgggtgcactggacgtgaacgtggtcgacgggcatgcgcgtttggtttccaacggcgccatcgccggctccactctgctgctggaggtcgccgtgcgccgtgcggtgtgcgaactgggcttgagcccggtggacgcggtcgaggccgccacattgacgccggccaaggcgttcggcttcgaccggccgaacccggtcaccggggtgcctatcggcctcatcgcccccggcttcgccgccgatttcaaccttgccgatccgaccgattggacggtcgaacaggtgtggtgcgcgggccgcaagctcaagtagcagtaggccgaccggttgacgaatggaaagcattcgtctacaagcatgttcaaatggtgacatgatagcatgttcatctcaccatttgaacgttattcacgtcgtaatacaagaatccgtaatactgctcgataccgcataaaaccggccatggtcgccacaagcgaaacataagtcgatggctgtggaaacgcaggagtaacacatcctcaccatagtcaggcggtaatccacgcccgcagtgatggcgtggaaacaagttatgagagaggattcctgttgaattccaagaagattctggccgccgccgtctccgtggccgccatcgcatccctgaccgcctgcggcggtgtgaaggatgacaccaccgcaggcgccgattccggcaacgccatcaccatcggcaccaccgataagatcaccagcctggaccccgccggctcctacgacaacggctcctacgccgtacagatccaggtgttcccgttcctgtacgcccaggactacaacacctccgagctgagcccggacatcgccgccgatgacggtacctggaacgatgacggtaccgaattcaccgtcaagctcaaggacggcctgaagtttgccaacggcaacgacctgaccgcttccgacgtcaagttctcctacgaccgcatcaagaagatcaacgacccgaacggcccgagctccctgctcgccaacgtcgaatccgtgaccgctaaggacgacaccaccgtggtgttcaaggattccgtgcctttcgacgtgactttgaagcaggtcatgtccagccccgccggcccgatcgtcgatgaggataccttcgacgccgacaagctcaccgacgccgacaccatcgtctccaagaaggccttcgccggcccgtacacgctgaccgccttcaagatcaacgagtccgccgcctacgctaagaacgactcctacaagggcctgaccccggccaagaactccgccgtgcaggtcaagtacttcgccgacgcctccaacctgaagatggccgtccagcagggccaggtcgacgtggcctaccgctccctgagcccgaccgacatcgaggacctctccaaggactccaaggtcaaggtcgtcaagggcccgggcggtgaggagcgcttcatcgccttcaacttcaagattcagccctacggtgaatcccagcccgacgccgacgctaacaaggccaaggccgtgcgccaggccgtcgccaacctcatcgaccgcgaagagctctccaccaaggtctacaagggcacctacaccccgatgtactccttcatcccggacggcctggccggtcacgatgacacgctgaagtccgcctacggcgacggcaacggcaagccgagcaccgagaaggccaagaaggtcctcgccgatgccggcgtcaccaccccggtcgacctcaagctccagtacaacagcgaccactatggctccgcctccgccgacgagtacgcggccttgaagtcccagcttgaggaaggcggcctgttcaaggtcgacctgcagtccaccgaatggacccagtactccaaggaccgcgtggtcaccgacgattccgacggtgtgtacccggtctaccagctcggctggttcccggactactccgacccggacaactacctgtccccgttcttccgcgacggcaacttcgtgaacaacggctactccaacaaggaagtcaacgacctgatcgtcaagcaggccggcgagaaggatgcctccgcccgtgaggacatcctcaagcaggtccagaaactcgagaccgaagacctctccaccatcccgctgctgcagggtgcccaggtcgccgtcaccggcacctccgtgaagggtgtcaccctcgacgcttccttccgcttccgctacgcctccgtcaccaagggctgatccagcatgagctcccctctttgaggggggggagctgtctggcgacggcagactgaggggagcccaactcgtatgactcccctcagtcggcttcgccgccagctcccctcggagaggggagcctttattgctttatataccgattaccaacaccaaggagcatcgcgtgtcagacagcgccacagcgacctccagcaccactccggcgaaagccaagacgaagaagaaccgactgtcaggtagtttcttccgcttcgtgctgacgaggttcctcctcattatccccaccgttttcattctggtcaccatcgtgttcttcgtgatgcgcgccaccggcgacccgatttccgccgccctgggcggccgcctgacacccgccgaactccagcagcgcatccacgcggccggctatgaccgcccgctgatcgtgcaatacgtcgactatcttggcggcctgctgcacggcgacctcggcacgacgctgaccgataaccagccggtgatcagcatccttacgcactacggcgccgccacattcgaactggccttcctcgccctgatcgtggcgctgatcgtcggcatcggcctgggccgactcgccgcccgcaaacgcgaccgtgccgccgacgccggcatccgcatcttcgccatcctgtgctacgccaccccggtgttcttcctcggcctcgtgctgaagctcatcttcgccgtctggctcaacatcctgccagcctccggccgctccgacctgaactccgaaatgcagttcacccgtctggtatcgccgaccggcttctacatcatcgacgccatccagctcggcgacatgaacgtgctcgtcgacgtgctgcgccacgccgtgctgccggccgtcgccctaggcctgctgaccgccggcgtgttcatccgtctggtgcgcaccaacgtcatctccacctacaattccggctacgtcgaggccgcccgctcgcgcggcgtctccgaaaagcgcctgctcaacaagcacgcctggcggccggccctgatcccgatcatcaccgtcatgggcatgcagatcgccctgatgctcgccggtgcggtcctgaccgaaaccaccttcgaatggaagggcctgggcttcatgctgtcccagtacctgaaggcccgtgacttcgtggccgtgcagggcatcgtgatccttatcgccatcatcgtggccgtcgtcaacttcctcgtcgacgtcatcgccgcgcttatcgacccgagagtgaggtactgagatgaccaccgcatcctccgacaagatcaccgtccccggtgacgaccgcctcaccaagctcaacgtcagcaccaagacgccgttctggaccaagattccaatcatcaaggaactgcgcgtggcggtcggctggcagaagggcatgctgatcaccggtctcgcgatcaccgcgttcttcctgctcgtggccctcttcgccccgctgatcgccccctacggccacgcccagatcaaggccgccgacggcacgtccttcccggcgcaggccgcgccctccgccgaacacatctggggcaccaccgccgccggattcgatgtgttctcccgtgtggtgtggggtgcccgcaccgccgtcatcgccatcgtcgtggccgtgctgctctccatcttcgccggcgtgctgcttggtctggtgtccggctactacggtggctgggtggaccgcatcctggtgatgatcgccgacgccgtctactccttcccctcgctgctgctcgccattctgatggccatcatgatctcccacggccagtccggcctgtggagcggcatcctggcctccggcatctccatcaccgtggtgtacatcccgcagtatttccgcacaattcgcgccgaagtgatccgcatcaaggaatccgcgtatgtcgagtccgcgcgcgtggtcggcgcctccacctggcgcatcatgaccaagcacctgttcaagaactccacccgcacgctgccggtgatcctgacgctgaactcgtccgaagccatcctgaccctcgccggcctgggcttcctcggcttcggcatcgagccgaccgccgccgccgaatggggctacgacctgaaccgttcggtttccgacgtgaccgccggcatctggtggaccgccgtgttcccgggcatcgccatcgtgcttatcgtgctcggcatcacgctcgtgggcgaatcactcaacgatctggccgacccgcgtctgcgcgcccgcaagtccgccggcgaagtggtcggatcgatcgaagacacgtccgtcgacccaaacgagaagccgtccgcacgcaacgaggtgatcgccgaactcgacgcgaacgtcgacccgccggccaccgtcaccgaccatgacccgaccatcgtcgcctccgaatggaccggcgaaggcaagccggaaggcaaggagtgagagatgagcgaagacaacaagaatctcgccgatatcaaggacctgtccgtctccttcatgaccgacgccggttccatcaaggccgtcgaggacgtgaacttcaccattccgcgcaagaccgtggtcggcgtggtcggcgaatccggttccggcaagtccgtgaccgcgcgctccatcatcaagctgctgccggagacggccaccacctccggtgccgtctacctgtccaagcgtgatggctccgattcgctggacgtgctctccctgagcggcgaacagctgcgcgaagtgcgtggttccgaggccgcgatggtgttccaggagcccaattcggtgctgaacccggtgtacaccatcggctggcagattgaagagggcctgcgcgcccacggcatgaaggacaagaaggaactgcgcgccaaggccatcgacatcctgaagaaggtcggcatcccggatgccgaaacccgcgtggactactacccgcaccagttctccggcggccagaagcagcgcatcgtcatcgccatggcgttggtgctgaaccccggcctgattctggccgacgagcccaccaccgccctcgacgtgaccgtgcaggccgaaattctcgacctgctgcgcctcgcccgtgacgagttcgacgcctccgtgctcatcatcacccacaacatgggcgtgatcgcggacatcgccgaccaggtggtcgtcatgtaccgcggccacgtggtcgagcagggcgacgtggagcagatcttctaccatccgaaggacgactacaccaagcgactgctgggtgccgtgccgcgcatcggtcagaagctggtcgtgcgcgaccgcgagggcaagccgatcgagcgcaaggccgattggcgcgaacagccgatcgccgttgaggccaagaacctgaccatcacgtacccgggccatctcatgcagcccgacttcaaggccgtggacggcgcgaacttcaccatccaccgctccgaagtgctgggcctggtgggcgagtccggttccggcaagtccaccaccggccgtgccatcgccggcctgcagaaggtgtccggcggctccctgaacgtgcttggcatcgagatgaacggcgtcaaggagcgtgacttcaagcccaagcgcgcggacattggtttcgtgttccaggatccgggctcctcgttcaacccgctgatgaccatcgcggagaatgtggccgagccgctgctcgtgcaccacaagtacggttccgtggccgaggccaagaactatgtgggcgacctgctggagatggtccagctgccgcgcgcctacatgaaccgtttcccgcatgagctgtccggcggccagcgccagagggcgtctttggcgcgtggtttggcgttgaagccgtcgctgctgatcgccgatgagccgacttctgcattggacgtgtcggtgcaggccaaggtgttggagctgttcaagcgactgcaggcggaaatcggcttcgcgtgcctgttcatcacccatgatttggcggtggtcgatatgctcgccgaccgcatcatggtgatgcataagggccagatcgtggagcacggcgatgccgaccagattatgcagcacccggagaacccgtacaccaagaagctgctggcctccctgcccgtgcccgacccgcgcgaacagcagcagcaccgcgcccacctccacgagctcctagcccaagaggcgtaatcgcatagcattggagctccctcgtcagagggagctaactttatatccgctagtactgctgcccatcgaactggaacagggcgtgggcgtcgccgtgctttttgttctcgatgtaagtatggaacagctccagccgctcgctcgtgctggccgccaggggagtgggcaggtcatccagatcgaaccagccgacgctgaggctttcctcgtcgcccacgaacggctcggcattgccgccgggcttcagggcgcacaggaacgaatgatccatgtacatggtgttgtcgccattggcgtaggtcagcaccttgtttgacgaggtgacggccaccaaatcggtgacgatggcatcgatgcccgtctcctccttgatttcgcgcaccaccgtgtccgccggctgttcgcccggctcgttgatgccgtagaccatcgcccattcgcccgtgtccgaacgacggcccaacagcagttgaccatgttcgttcagtacacaaccggtcacgccattgagccatagcagatcatggccgatcttcttacgcaattccaacacaaattccggagtaggcacattgcctccttagtagaaaaaggagctccctctgatgagggagcttaagggttacttggcttgggcagcctgcttaatatggtgcgcttcgcgcatgatttcattttcctcgcgcttgtcagcgttcggcgtcgcctacaatcagtccaccggactgattgctttacggctccgcatccacgcttcgacgtcgtcgatctgcttcgggatgccggcggaaatccattcggggccgttctcggtcatgagcacgtcgtcctcgatacggatgccgatgccgcggtattccggcggaatcagcagatcatcctcgcggaagtacagaccgggctcgatggtgaagatcatgccgggcgtgatcttcgcgccctgataggactcatagcgggcctgcgcgcaatcatgcacatcaagacctaggtggtgggccacgccgcaggcgagccaacggcggtgctgctggccttgcggggacagtgactcctcgacgctcaccggcagcagaccccaatcgtgcagacgctcggcgatcacacgcatgcaggcgtggtggatgtcggaataggtggcacccggcttggcggcttcgaaaccggcctgctgcgagtccagcacggcctggtacagacgcttctggaagtcggtgaacttgccgttggtcgggaaggtgcgggtgatgtcggccgtgtacagggaatcgacctcaacgccggcatccaccagcagcatgtcgccggtcttcaccacaccggtattgcgcatccagtgcagaatcggggcgtgggggccggaggccacgatggagtcgtaaccgatggcgttgcccagctcacgggacacggcgttgaacgcgccttcgaggatacgctcggaacgcggcttgtcgagcgcggccggcagtgcggagagcagacggtcgaagccgtgcttggtggcgtccacggccttgcgcatctcgttgatttcgtagccgtctttgaccatgcgtgcctcggcggcgaactcgtgcagcttgtcgtcggatgcggagttcttgtccggatcggcgaaaccgttggcctcgcggatggactcgaccatcgaggtgatttcgggatcggtctcgctgaccacgcgcacacgcacggcgccggcctcggcacccacgtccttggacagggcgtcggccagctgggcgatgtcgtgggtctcgatgccggtcatcgcctgcatctccttgaggccagcacgcgggccaacccagtattcgccgtagtgggcggacatgaagaagtcctcggtggagttgtcggcgcgaggtgccacgaacagttccggagtgtgcgtcttgccggcggcggcttcgggggagtcggggtcgaccgggttcaggaccagcacggcgccggcctcgtaatcggaacccagaccggtgtagtaggcgaacgtggtgtccgggcggaacatgtaatcgcaatcattgttgcgcaccttcggctggccggccggaatgaccagacgctcgcccgggaaggctttgcccagcgcctcaaggcgggctggcgtgaacttggaggattcgagaggcttgatctccggatcatcgtcggcccagccggacttcataaactccttgaatgcagccgactgcgggcgcagcgagcggttgttcacacggtcgctcatcgactggttcgcgcccggcgccgtagcgcgctcctcggcctcatattccttgtccttggcggtgatcacttcacccattgccactctcctgtatgtagttgttgtcgaatcatcgattcccacctcatactagtcggctttatgcgatgtgccacgattgacggctgacggtaaaaccaagtacggaatttggacggtcttccggacatgcccatatggcgagtgcatcgggctggaatgcgggcccgtttattgttctcggtagggaaggaggggcatgggctggagcttgccgattgatattggcatattttgcgggctgaatccatgtgaacccatgcgatgaaggttcatcgcatcacgggacccgctgctctgcggatgcctccatctggggcactctggctttgagcagttttacccgcagcggagtgcgttcgatgacgtcggcgtatgtgaaatggacgatttcggtggcaccggctcgtttcagtccctcgtcgcgtgctcgttccttggccaccacctcctgaatgctgcggttatcggtcatggctgggtccacgtatttttgtgtgccgtcgtattcggccactatcacgcgcccgtcatcgagcttccatacgaaatcaacgcggtgctcggtattcgtctgcgggtcggtcaccgttacctgaatacgcggcgtgaggaagcgatcctcgatgatggtgcctcgcgcgagggattctccaccattctcgctcctttcgtttgcatagcgcagcaggcggaatactcgggcataatcgattctccattgaacgcagtcggcggctatctcttccttggttattcccttggcaagggccgagtcaaagatcggcaacgcaaaccgaaaatcaaggtctatagcggcctcgaccaaggttctagccggtgatatcagggataggccggaggcctcgtaatgtgtcttcggattgttcatatcgggcatatagacatgtcgtaagcgctgatggcattgacgagatccatgatcggaagtcacgatggttatgcagccatcatgcaaatgccattgatgttcgaatccataagcacttactgccaccaagccgccaaaaacccactgaggatgctcttgcgcaagagcgcgggccatatgcaacgttcgctccggcggcgtcaaaccatcccagtatgcggtatttgcataaagactgggaatgccgtcatacactttcaacaactcgccactctgggcacggcggcgtagagcggtctgttccgcttcatttcttgaatagacgcatctcagctcattctgcgcggctgatatgagcgaggccactgctttgtgtgtcttcatgacgtcgagcgtagccggaacgaagcagcgtaagtatgaatttcagccattgtggttctagcctcggagcttggctgtcttggagtgagatattcccgataatttcaaggtattaggccgctaattcggaatagtggataacatacaaaacttatccaccatcagtaatgtcattcgaacaacgtgctttggggattcgaacaagatatcatcggcgaagacggatgtagctggtagagggcggcgaattgacggttaacggtgcttatgctttgtacgccgtcggtgctggttcagatattggctggcttctgtctgagtgtggaatctagcgtcggcgtgagtccaatggttgtatcgtggccgacgatttgctgcgatttattggcggcatagatccagggcttggacggctgccgacggtgagagcagtcataacagtgaatgagcctctgcgagttcaaaagatgatgtagaggacgtttgtgagagtcgtttccggggcaagacatggtcgattgacaatgttgaaatttctcagcgacggcagaatggcatgccttggcgaggaggcgacactgagaggcgatggagtcgggattaatccaggttttggccagctaccgactcgcaagagcatcatagcgtcggtgtaccgccagaagctggcactgtaccgacgctgaatagcatcagcgtcgccggacatacaagttttggattgcagccgactaagaatgggatgccgacggcaagagccgcattgcaactatatgagatggcttcactgtgcgcgctgcaggaaaaggccgcccgcgcggcggcgacatatgagacggtttcactgtgcgcgcacgataaaccaccccggcggctaggatagagggaattgagggagtgcggctccacgcgtgaaggcaagaatcccgaaccatgcagggcaaacctgtgcgaggggagcttcctgcgcatgcggaagcggaatatacgcgggcatgcgtagacatgacgagaatggcacgaacacgtaagtggcatacgcactccgaacggttcaacagcaacacgagcagaggtcagaagaggatatgtcattcgagcatccgaatcggaacaacgagagcatgcgggacgtcgaactggacatcatgagccgcccgccggagcataacaccaccaatctggatctcgaccggatgaccctgatgctcgacatcctgggccacccggagcagtcgttccgcgtgattcatatcaccggtaccaacggcaaaggctccaccgcacgcatggccgaggccatctgccgcgcctacggcatgcgcaccggcctgtacacgtcgccgcatctggagaagatcaacgagcgtatcgccatcgacggccagcagctgtccgacgacgatttcatcgacatctgggaccagaccaaggatctcgtggccctggtggacgccaagatggaggagcaaggcaagccgaagatgagcttcttcgaggtgctcaccgccatggccatctggaagttcgccgacacgcccgtggacgtggccatcgtcgaggtcggcatgggaggcctgtgggacgccaccaacgtgctcaacgcggatgcggccatcatcggcccggtggacatggaccacatgcagtggctgggcgacaccgtcgaacagatcgccaccgagaaggccggcatcatcaagccgaactgcaccgccatcatcgggcctcagccgcatgaggaagccgtcatgccgattctcaccgaagccgccgaacgcaaccacgccatgctcgtgcgcgacggctacgaaatgaccgtgtccgaccgtatggccgcagtcggcggccaggtcgccaccctgaccacgcccaacggcacttacgagggcgtgccgatcgccaagttcggcgagcatcaggcccacaacgcgcttgccgcgcttgccgcctctgaagtggtgattccggtcaatggcccgctggacggcgacttggtgggcgaggcgttgagctcggtcaagattcccggccgcatcgaacagatccgcacctcaccgaccatcattctggatggcggacacaacgtgaatgccgccgaagccctacgcaaggccatagaggaaagctacgacttcaagcagctggtcggcgtggtcgccatgatgcgcgacaagcaggtcgaggaatatctgggtgttctggagccgatcctgagctccgtggtggtcaccgagaactcgtggcgcgagcgtgtgatgccggccgatgagctcgagaagattgccgtggacgtgttcggccgtgaccgtgtgatcaaggaagcgaacctgcccgacgcgattcaggctgccgtcaacatggtcgatgccgaggacgagctgggcgtgggctacggccacggcgtgcttatctgcggcagcttcgtcaccgccggcgacgcacgcctgatgcttgaggagcatgccagccccacgatgaggcaggccatggccgtccatcagccggcggtcgacctggacgattcggatcggccggcagacaaggccgaggatgaggccgccgacaacctcgaggattcggtgagcccggacgacttcgacgtgttcgacgtcctcggcctcggcaaggaacaggccagtgacgccggtaacgccggcaccggcacggccagcgccgacacaggcgccgtcaccgacgattccgccgacgcccggtaacccgaatccaaggcatatcggatacccggacacacggaaaacagtctcacgccatgtatctcaaggaactcaccctccgcggattcaaatccttcgcctccgccaccacgctgcgcttcgagcccggcatcacggcggtcgtcggccccaacggttcgggcaagtcgaacatcgtcgacgccctgacctgggtgatgggtgagcagggcgccaaaaacctgcgcggcacttcgatggaggacgtgattttcgcgggcacgtcctcccgcccgccattgggccgtgcacaggtgagcctgaccatcgataattccgaccacacgctcgatatcgattacacggaagtcaccatatcccgcaccatcttccgcaacggaggctccgaatacgcgatcaacggctcgcaatgccgtctgctcgacattcaggaactcctctccgataccggtcttggccagcagatgcacgtgattgtgggtcagggacgattggatgcgattctgaaggccgacccgtccggccaccgcgcgttcatcgaagaggccgccggcatcctgaagcaccgcaagcgcaaggaacgcgcgttgcgcaagttggccaataccgaaacgaacctgagtcgacttgacgatttgctgggggagattcaccgccagctcggccccctcggacgccaggcacgcatctcccggcgcgccgacgcgattcagatatccgtacgcgacgcccaagcacgcctgtatgccgaagacgcccaacgctcgatgaaccgccgcgacacggtacgtcaagagcttggcgatgtgcgcaaccagctggccgtcgcccaacgtgaactcgcccacgtcaaagtacgcatcgaacaggtcgaggcgttgagctctgaatccagtccgaccatcgccaaggccaaccaatactggcatgaattctcacagacccgtgaacgactgaacgcgctcgcccagttggccgaagagcgcagccggtcactcaccggccagatcgtcaccaacttcggtgaggatcccggcatgctcgtcaaacgagccgaggaactggagtctcaggccgcggcacaaaccaaggccgtggccgatgcacgcatcgcactcgacaaggccaccgaggaacgcgccgacgacgagaagaagctcgcctcagtccgccagaccttgacggaactgcgcaaaaccgcacaggagcgcgatgcgcagatcgcccgactgcgcgaactcatcgcccgcgaggaatccgccgtgcaactggcgaccagccgcgccaaggattatgcctcccaacgcgacttgctgacttcccagcgcgacgatgcccagcaacagctggacgcattgcgcagcgaagcagactccattgccgacgatgacggtaccgcattggacgccgcgcgtgcaacgctcgccgaatgccgcgaacgactgaacgaactcgccgataagcagcgcgagatacagtccaagatcatctcgctcaaatccaaggccgatgcgcttgccgacacgctaggcagccgcaatgcctccggatcattggaacgcgacacggacgtggcctcgcttggccgactcaccgacttcatccatgtggccgaaggctgggaagaagccgtggcccacgcgctcgaccagtatgccagcgccatcgtggtacccgaggcaggcaacatgttgcacgccctcgaacgcgctcgggaagataagctcggcaaagccgtggtgctgaccgcgagcattgccggcgatcccgccacagagccaggcacggagtcggaggagagtagcgccgagaacacggcggccgccccgcaatcgggcaacgcgctggcagcactcgtcaccgcgaacccggatgcagagaacccggcacaggccgaagctgtcgtgcacaccgtgcgtctcctgctggctgatgtagccatggccggcaccgccgacgaagcacagcacatcgtggcatccggcgaagccatgcgggccgtcaccaagaacggcgagaccttcacacacggcgtggcggcggtcggcggctcttccatctctcaatcggacctgtctctggccgcccgtcgagacaaggcattggcacaggtcaaacagttgaccgcccaagacggcggaatggctgagcaagtggccgaggccaaagccaaacgcgatgaagcggcccgactcgtcgaccaggaatccgccaaacgcaccgaagcccggctcaaagcccaacaggcggagaaatctctgaaatccgtcacagaccgcgtcgcatcgttcacccgtcagctcgagcagctggataggaaaatcaccgagacccaagagaatcgcaacgagcatcagcgcaagctcgacgatctcaatcgcgctttggcatcggcccggcaatccacagcggaacatgccgatttcgacgaacttgatgaacgtgaacgcacgctggagcgcgaactgaacctgactcgcgagcatgaggtcgccgcgaaaatcgcgtggaccgaagcaagccgcaaaggggagtcactgagccgacaggccgggctgctgcgggacaacgccagagaagccaccgaacgccgcgcccgcatcgaggcgttgaacgatcgcagacgcgagcaggccgcacacctgcaaggcgtggccgatgacgcgcgagcagtggccgccatggtagaacatacgctgcatgacgtggccgccaaacgagacgagctgcaggccgccgcttccagccatgacgaggaactcaaggccctgcgcgcgcagcgcaaccagatcgagcccaaggtcaccgatctgaccgggcgcgaacatgccttggatgtaaaccgcgaacggttggccgccgaatccgggcagctcatgcagaaagtgtccgacgaactcggtctcactttggaggaattggttagtggttacggccccgaacagccggtgcccgtgctggatgatgagggcaaccctgtgccgttggatgagacggaagctgaggctgggaccgaagagggagaaaccgggggagagaccggcaccaacggcgattccgccctctttaagaccgtgccgtataaccgtcaggagcagaagaagcgtctcgataaggctcgccgcgatctggccgcactcggtaagatcaaccctttggccaccgaggaattcgaagcgcttgaggagcggaacaagtatctcaatgatcagcgcaacgatgtggtcaaatcacgtgacgatttgatgcagctcatcaaggatctcgattccacgatggtccaggtgttcaaatccgcgttcgacgataccgccgaggcattcgagcagatgttcgccacgctgttcccaggcggcaccggacgactgcgcctggaaaacccggaagacatgctcaccaccggcgtactggtcgaggccagcccggccggcaagcgcgtcaaacagctgag

SEQ ID NO: 886 - DNA, 13112 bp, Unknown
  R14_18m  MAG No. k141_20377
ccagtatgtcgacatgttgcgtcggcacatgatggacggcatcgtcatgtgtgcgcacacttcgcatcccggcgattattggacgtcgattcatcgcccgatcgtcgcgttcgaccgtgtgcttggagacggtatttcgtcgattggatccgaccacgagcagggtgggcgattgattgcgcagatgctgatccgcaatggtgccaaacatgtggtgatgattggcggtccgcgagatcaattcttcgatttggctgtgcgcggagaagtcgaggaaggatcgttcgatttgggaaagaccacgttcccgacggtgcgctactacctcacgttggaacaggaattgacctccgcaggcgtgaaatacgagtatgttgaagctggcgaagtgatggattttgccggctgtcatcgtgcggtcagcaatgcgctcgacaaggtggcgaccgacggcgtcgatgccgtggtcagttccgacattggtgcgtcgttctgcgtgcgcgaagcgttgagccgcggaatttccattcctgacgagctgcagatcgttgcctacgatggcacgtatttaaccgatttggccggcatgaagctgaccgcggtcgcgcaggatttctcggcgatcgcacagtcggcagccgaccatatcgtgcaggctattgccaatgaggaagtggccgcagctaacgcttcacgcaagaatattcccaagccgttcgagccgaacgtgcttattcccatgacgctggtgccaggcgataccacgcgttgatgctgcgcgtcttcatgcgtgtgcccggtgtggatcgcatcgatttcagcggcgtccacaaccagcggacgcccgtcgatggtcgtgctcatcatccgacttgtgcacatgtgtccgattctgccgaatcggacgtctgagttccgaaaaatgtgttctgtgtgtccgattctggagaatcggtcatgtgtgatgtgaattgggatgtttggatgtccgtttctgcagaatcatctttgctctgtactcgttgattcgcaaatacggcgcatggctcgtcataccggccatgctcggcggcgcggccttcctggcggactcggtgctgacgccggccgtgtcgatctcgtccgccgtcgaaggcctgaagacgctgccggcgttggagcatctgttcaccgagaacaaggatctgacgatgatgatcaccgcggtgatcatcgtgatcctgttcgccgtgcagtcgcgcggcaccgaatcgatcggcaaggtcttcggctcggtggtgatggtctggttcgcgttcctggcgatcgtcggcgtggtagccatcggcaacgactggtccgtgctcgccgcactcaacccgtactacggcatcaagttcctgttcagtccgaataacgccaccggtctggcgctgatgggcaccgtgttcctttcgaccaccggcgccgaggcgctgtactcggatatgggccacgtgggccgcggcaacatctacttcacctggccgttcatcaaggtggcgctggtgctcaactacttcggccagggcgcgtggatgctgcgcaaccagaacaaccccgaactggccgacgccgaggggatcaacccgttcttccagatgatggatccgaacgtgcgctatgtggccgtcgtgctgtcggtcaccgccggcatcatcgcctcccaggcgctgattacgggcgcgttcaccatggtctccgaggccaccggcctcaactggatgccgcatctgcaggtccgttaccctgcccgtacccgcggccagctgtacattccggtcgtcaacgtggtgctgtgcgtggccacgctggccgtgctgctgctgttccgcgattcggaacatatctcggcggcctacggcttggcactgaccatcacgatgatcaccaccacgatcctgctgggcatctacctgtggcaccgcagcaacaagttcggcgccgttgtgttcaccgtcgtgttcctggcgatccaggtcctgttcttcgccgcctcgatggccaagttcctgcacggcggctggttcacgctgctgctcacgctggcgatcctcatgatcatgtacacgtggaacgagggcaccaaactggagcgctcgcagcgtcggcacatgatgccgaaggacttcctccccgcgctggacaagctgcacggcgatagccgcatccaccggttcgcggacaacatcgtctacctgaccagcgatccggacctgaagcgtctcgatacggacatcttcttctcgatcttcgccgaccaccccaagcgcgcccgcgcatggtgggcggtggccgtcgagaccaccgacgagccgttcacccgtgagtattcggtcgagagcttcggtaccgactacctgttccgtgtgcgcatccgcctcggcttcaaggtctcgcagtccatcccggcctacctgcatcagatcatgcacgatctggagaagaccggcgagctgccgaaccagcagtcgatctacccgaagcttgacgccgatcccggcatcggcaccatccgctacgtggtgatccacaaggcgctgatgcccgagtcgaaggtctccggccgtggcgccctctcgctgcagatcaagtacgcgatccgccgcgtggccggttccccggtcaagtggttcggcctggcgccgtacaacccgctggtcgaggtgcagccgctgttcgtgtccacgcgccgcccgccgcgcctgacccgcgtggccagccaggcgcccaagcgcgagggctgagccggcaggccgaacagccggtgcgagccgggtggcctaatggcatgtcagggggccgcgaaccgtcatcgtacggttcgcggcctttgcatatgcgaatgatgcagagtgggcggtactgcttgtgaatgtagcgggtggacgggtgacgtggttgatgccttttgccgtatgttcacggtggctatgcgtcggatgggactgtaattcgacttcttgggatcttttttgctgcagtggtgcgccaaaaggtctcagccgtctctgcgacgcgccttccggcagtcagtacaaggttgtactacactggtggctgccacacggatgtccccggtcgcccgcgcctccgcggtacatcgttgtatggatacgtgtcacgtatgcagagtgcatgcagatatgtagaaaggaatcccatgccccagcaggaccatctgaccgcacgtctcgtcgtcgatgacgattttgaggtcgctccggtcaacaatcgtctgttcggttcgttcgtcgagcaccttggccgttgcgtgtacaccggcatctacgagcccgaccacccgaccgccgacgagcacggcttccgcaaggacgtcatcgacctggtcaaggaactcggcgccaccaccatccgctacccgggcggcaacttcgtgtccggctaccgctgggaggacggcatcggccccaagcaggaacgtccccgtcgactcgatctggcctggcattccaccgaaaccaacgaattcggcctgcacgagatggccgaatggcttgaggccaccggcggcaacgagctgatggaggccgtcaacctgggcacgcgcggcctgcaggaggccctggacctgctggagtacgcgaacgtgcccggcggcaccgagctgtcggaacgtcgccgcgccaacggcgccgacaagccgttcgatatccgcatgtggtgcctgggcaacgagatggacggcccgtggcagctcggccacaagtccgccgaggactacggcatgctcgccgcctccgtggccgccggcatgcgccagatcgatccggatgtggaactggtggtgtgcggctcctccgcccatggcatgccgaccttcggcaagtgggagcagaccgttcttgagaagacctacgagaacgtgaacttcgtctcctgccacgcctactaccagccgttcttcaaggaggacggcacgcgcgacatggccagcttcctggcctccggcgtggatatggacggcttcatcaaggacgtggccgccaccatcgacgccaccaaggcccatctgaagagcgcgcacgacgtgtacatctcgttcgatgaatggaatgtctggtaccagggtgaggagccgagcaagacccccgagggcatcggcaactggccggtggccccgcgtctgctggaggacatctacaccgccgccgacgccgtggtgttcggcgatctgatgatcacgctgctcaagaacgccgaccgcgtgcgcgccgccagcctggcgcagctggtcaatgtcatcgccccgatcatgacggagccgggcggcccggcctggcgccagaccacgttccacccgttctccgtgaccgcgcgcctggccaagggcggcaccgtgctggagccgaagctgtccgccggcaccgtggatacgccgcgctatggcgaggtcgacggcgtgaacgccgtggccgtgcgctgcgccgacggctcgctcgccgtgtttgcggtgaaccgttcgctcgaggcgaccgccgagttcgagatcaggctgcaggacggcgcgcagccggcatccgtcgaggcgcagacgctgcacgacgacgatctgttcgccgcgaatacgctctacgaccagaaccgtgtgaccccgcacgccaatgggtcggccatgtacgatgccgagtccggcgtggtccgcgtctccctgccgccggtgagttggaccgccctgcacatcaagtgacgcgatgggccgcgcggtccgttccggagaaggacggatcgcacggcccttgcttcccgggccgggcggaggggaccggaccggccggggaaaacgcgttatgctggaatcagacgggcgttccgcctgaaccgtgcggaacatgcccgatggtgcgacgagaggggtgctgtggcgaaacgggtgaccatcaccgacgtggcgcgcgagacgggcgtctccatcaaaacggtgtcgaatgtgctgaacaacaccggcagtatgcgcccggagacgcgccagcgtgtccaggatgccatcgaacgcctcggataccgcgttaacgtgtccgcccgcgccatgaaaaccggcggcacgaagctcatcggactggccatcaccgatttctgccagccgttcatgccctatctcgccgacagcatcgtggcggcggcacgttcccgcgggtacgcggtgatcaccgatacctacaacagcgccggcggcttggcgcaggcgatcccggagacgaagaagctggccgcggacggctggattttcttcatgggctcgccgatcacggatcgcacgatactgcaccagccgtatccgttggtgattgtgggcgattacgatacgcagggactggccgattgggtcacgatgccgaacgtggaggccgtacgcaccgcggtgggggcgctgctggattcgggatgccgtaggatcgcgttgatcggcggcaccgcggagaacgcatgcccggatgccgaccgcgagtcgcggcccgaaaccaccagcacgatgcgtacccgcggctatgtgttggcccatgaggagcgtggcctgcaggtcgattggcggctggtccgtaacgcggattgggtgcagtccggcggccgcgatgcggtggcggggctgttggacgatccggatgcgccgcgtccggatgcggtcatgtgcctgaacgacgcgctcgccatcggggtgattcatgagctgcagcggcgcggcgtgcgcgtgccgcaggatatgcaggtcattgggttcgacaacgtgccggatgccgagtactgcatgcccggattgacgacgatcgacccgcatgtggatgattacgcgcgacatgccgtggatatgctgatcgcgcgcatcgaggggtcggcggatccgttccgcacgtatgtgacctcctacgatctggtgcgtcgtgcctcgacgtgttgacggcccggcgttcgcctggacatgggtctgtgacgggctgctgtcgcctctcccgtggcgtattccgggagaggcgacatgcgggctaggatcggagcagcacctccgtcagcgcttgacggacggcgctcggcatatgcgaatcggagcaatcttccatgtccggcccgctgacgtgctcgagtgaatccatcgtggccaatgcgtcgatgccgttctccgctatggcggcataagcctgttccttggtcagatatcgcatttcggcatgccgaaggatgtcgaagacgtcttccatgcggggatcgggggccatcgtcgtgtcgccgatggtgacacgtatctcgctgcgggtggatacgtcggcgaccgttacctgcaatgtgagggtttcggcatcataccggcgatccgaatcgacggatgcgccgtcggcctgtacggatatgtcgctgtcggtaatgcctcggaacaggaaatcccatgttctccgggccggcagagcgtgaacgtctccctgggctggcgataccgtgagtgcggatgtggcgccgtccttgcgccatcgataggtgatcgcggtggtcgccggggtgatctgccgagagtaatgtcccgaatcctccatcagcgtgaagtcgccgtccgctccggggaagacgatgatctccagatgctgcgggttgtcgacggagttgatggaatccccctcggacaggggctgcatcggcacgatgccgccggccttcgcgaacacgggaattccgtcgagcggacgccagacggtcatgcgccgtccgttgggcgaagacgcgctataccggcgcccggtgaagaagtcgaaccagtcgccctgcggcagccatacgtcggccttgccccgtcgggaggatttatccatcggttccgtgatgggcgcggccagcagttcggtgccgaacatgtattcgttgggaacgtggtatgcggcgtcgatgtcgggcgatccccaatacatgggctccaccaggggaaggcctgtccgggatgcgcgccagttcatggtgtggaggtacggaatcatgcgatggcgcaggcggagcgcatcgtccatgatcgcacggatctccgggcggaagttccatggttccttgccggagaacggcgagcagctggaatgcaggcggttgatcgggctgaacacgcccagctggtaccagcgggcttccagctcctcgtcgcggtagccgaacatgtggccgccgatgtcatggctccaccagccgtaaccgatgttcgacgcggtggccgtgaaatacggctggaatctcaacgactcccaggtcacgatcgtgtcgccggagaagccgaccggataccgctgcgagccggggccggcgaaccgggagaggatcagcggccagcggccgtcgcgcgcggaatcgcagtagtgcatgtggttgagcacccacagcgggtccaggccgggctggcgggtcacgccgccctgctgccagtcgatccaccagaagtcgatgccgtcggcctccaggtcgtggtgtatgtcgaagtaggccctgacgaagcgcgggtcggtcaggtcgaactcgaccggctcgccgctgtccgggggaatccccatcgttttcgccgctgaaggatagcagtcctcgaacgcgcggatgccgtcgcgcggatgcacgttcagggagacgtggcagccgcgctcgtgcagatcccccagaaaacgttgcggatcggggatcagcttgcggttccaggtgtagccggtccagccggagccgtacttggggtcgacgtcgtccaccagatgccagtccatgtcgatcaccgaggtggtgaacgggatgccctcggacttgaaccgatccatcaatgctacatactcttcgcttgtgtagcggtggaaacgactccaccagttgcccaaggcgtatcgggggagtagcggcgaccttcccgaaagacggcagaaatcggccaccgcatcggcataacggtggccgtgcccgaagaagtacaggtcaatcccggcgttcttccggggcttgatgtcaccattgtcggcgaataggcaggtgttcgaatcgtcgagaaccgaccagccgtcgcgggagaccacgccatcgttcaggggaatggcgccgtcggcccaatcgagcgtgcgggccgtgcctttcatgttgccctcctgcgcatcgccgaaatgccaggtattggttttggtgtctttcacgcctttgaccacgatgctgagtccctccttgctgaagggccgcatgtcgtaggtcagacgtagcgcggtcgtttccacggtcagcagaccgtcggcgatcgaggtggaatattccgggggtgtgccgaaatcgcggttgacggccatgagcgtcgcatcatcgttgaactcgccggtgtctgaccattccagtcgtagcagcgaatcggagaggactccgattctccagcagttccctgaaatgacgcctttgctgttcgtgaaaggttgggtattcatacggatgtactcctgtgttttcagtgattctgtgctaataacatagcatttttcaaagagagtttgcaaccgtgtgcaaaatatgctattttcaagacaagaagattttggtcttcgttgcaatatgacgctgcgcatggattcaagaatgaatcttctgcagatatcgatctcggagaggagatgcagacaatgaccactgtcggaaaagtggtgcgcagagggtgggcgctcttcgcactacctacagtgttgtgtttcgcggtgttcttcgtcgtgccgcttgccatgggtatctacctgagctttacctcgttcaggacggtgaccgatgccaagtgggtggggctgaagaattatgtggatgcgctttcggatcccgaattcggagccgcgctgtggcggtcggtgctgttcaccatcgcgacgaccatcgtcgtcaatgtcgtctcgttcctgctggcctatatgttcaccaaggcgatgcgcggggcgaatctgttccgctcggtgttcttcatgccgaacctcatcggcggcatcgtgctgggctatatctggcagctgctgttgaacggcgtcctcgcgctgtgggaccgttccctgaccacgtcggcggtctatggcttctggggcatggtcattctgatgtgctggcagcagattggctatatgatggtcatctacgttgcaggcttccaaagcctgccgactgatctgatcgaggccgcgcaggtcgatggcgcatcgaacggtcagattatgcgcaggatcatcatcccgctgatgatgccgtcggtgacggtgtgcagcttcctgacggtggccaacggattcaagatgttcgaccagaacttggccctgaccaacggcgcgccgtcaaacgcatccgaaatgctcgcgttcaacatctaccgcaccatgtacggccgcaccggattcgagggcgtcgcgcaggcgaaggccgtcatcttcttcatcatcgtggctgtggtcgcattcatccagaaccgcattacgaccagcaaggaggtcgaggcatgaccgacaaactcaggcacgggccgctgtggacgaccattttcgccatcatctcgctgatatggatctatccgatcgcgctggtcttcatcaactccttcaaaaagcgcgtctacatctccaaggacgtgttcagcctgccgaccggcgacacattcgtcgggttggagaattacgagcgcggcatagaaaagacggatatccttccgagcttcggatggacgatcatacttacgcttgggtccgtggcgctgatcctgctgtgctgctccatgtgcgcatggtggatcgtcagggtcaacaactgggtcgccaagcttatgtatctcgcgtttatcgcaagcgtggtggtgcccttccagatggtcatgttccccctcagcaagctcaccgacacattggacctcaacacgccgtggggcatgtggctggtgtatctgggattcggcgcgggattgccggtgttcatcttcaccggcgtgattaagtcgattccctcggagatcgaggaggcggccatgatcgatggcgccggctccatccgcacgttcttcaccatcgtcctgccgatgatgcgtccggctcttatctccgtggcgatcctggagacgatgtgggtgtggaacgacttcctgatggcctatctgtgcctggatcttcaacggttcaagacgctgtccatcgccatccagtacctgaagggcggatacggatccgtggacatgggcgcgatgatgggcgctctggtactggcgctgctgcccatcctggtgttctacctgtgcggacagaagtacatcatcaagggcgtcaccgctggggcggtcaagggctgagccccaatcatttcaagaaccaatcggttcatcaaggaaaggaaagaaccatgaaaaccaagaaaatgatggcgatcgtcgccgcggccgtcatggcgatgggcgcgatggcggggtgcggatcctcgtcggcggccgatccggacaaaggcaaggtctacttcgtgaacaacaagaaggagatcgtcgaccagttggaggatctcgccgatcagtacaccaaggagacgggcgtgcaggtcaaggtgctcacggccgccgacggctacgacaatacgctggcctccgagttggccaagaccgaagccccgacgatgtggagcatcaccggctaccccaatttcatcaagtggaaggactacatggagccggtccaggactccgccgccttcaagctgctgaccgacgagggcaaggccaactcgtatcaaaccgacggcaaccactacacgttgccgtacgccgcggaatggtacggcatcatctataacaagaagatcgtcaacgactacgcctcgaaggactatgcggtcatcgactccgccgacgatatcaaggactgggatacgttcaaggccgtggtggaggacatgcaggcccataaggacgatctcggcatcgaaggcgccatggcgacccccggactcgaatcttcggacctgtaccggttcgcatcccatatgacgcgtattccgctgttctacgaatataaggacaacaacaccacgttcatgcctgagatcaagggcacgtacgtggacaactacaaggccctgttcgacttggagatgaacaactgtccgacctcgcgcacgctgttgacctccaagacgtatgaggacgtgaccgcggagttctcgctgggagaggtggccttctacccgaacggcgtatgggcctacacgcaggtcaaggacaacgaggtcgccgatgaggatctgggcatgctgccgtatttcatgggtatccccggcgaggaggagtacggccccgctggcatctacgacgcgtcctgggccgtgaacaagaacgccagcgagaaggacaagcaggcgaccttcgacttcatcgagtggctgttcagcagcgacgaaggcaagaaggtcatgtctcaggatatgggcttcgccgtgccgagcaccgcgtacggagatgaggatcagcccgacaacccgctgaccgccgccgcccgtaagtacgagacgaatggcgttccgatggtgaggagcttctccacgcttgacgcctggggtgcagacgtgcaggacgctcttgtggagtacgccaaccaaaccgggaagtgggacgccgtcgccgacgcatacaccaatggctgggccaaggagtggaagaccttcgaggacaccaacggtgtgctgccggaggccaccacgttgaatggcgacgagcagtaaatcgttcctcctccccatccccgaagcggggccgtatcctctctacggccccgcttcccctattcggcgcctattcgtcgacgtcccgcggagtcgcggtggtggatcggatgatcagctcggccggataggttcggtacggttcggaaatcgtcttatgattgataagatcgagcagtttttccgcgacgtcgtgccccatcaatcgcggctgctggcgtatggtggtcagtcccaattcctgcgagtaggttccgtcatcgaaaccggtgatcgagatgtcgccgggaatcttcaacccgaattcccgtaaacggcacatcaatggtatggcgatgccgtcctcttggcagcagatcgcggtgggcatgggctgcatattgatcaatgtgttgaaggtcgactgcaacgaatcgtctccgtccggaataaccagaacgtcgtctttgatatgggcctgcgcgcaggcctccttgaatcccctgatgcgctgagccgcactgagtgtcagcaacgattgcgggtccctgcacacgtatgtgatgcggcgatgcctcagggacaccagatgccggacgataagccgcagtccatgcgcatcgtcgatggccgcccataccgacatgttttcgttggagacggtgttgatgcccgcaatgggcacattcatcgttttcaggcgcgcgacctctctggaatccacgttgaacgaggggactatcactgcgtccgcattgcgtcgcgccggcagaacgtcaaagaaatccgccctgctttttacattgttgatggggtagatggagatatcatagccggcgggatgaaagaccatgtcgagcccttcgaagatgttgcctccgaaccatgtcgtgaccggggtgctcagcagtagcgcgatacggaagctctgcccggacttgagcgccatcgatgatctggaaatggagaaattgagctcggaggcggcttgcaacactctgtttcgagttttttcggagacaagctccggccgtgtgaaggcgcgcgaaaccgtggacgcggagacattcgcacgaatcgcgacgtcgtgaacagaaggtgtggaggtcataatgctcaattatagaaggttgtgcccgaatcggacacattggagtcggacaggctaagctgcatagaacaccgcatcaaaccggttcgacacgcgcattttgcggtattactggacatcaacgtccctttcgaggtaatatcaaaccggttcgatacgtataagtatgtaaaagcacgcatacactgcgtacacattgcacctgcatccatgaaccaagggaggtcccatgaaaaacaaagtgcagctcatcgcttacgccgatcgtctcggcgatggc

SEQ ID NO: 887 - DNA, 3626 bp, Unknown
  R14_18m  MAG No. k141_20827
aaaaaggcagaacttggttcaccggcgatgtctcagcacgtttgcgcgcgtcggatccttctggagcagcaggaaaacgagcgccgcgacgagcaggacggcgatggagagcacgccgagcgaggcgttgccggtcagggaggtggtggccaccaggaaagtgccgatgattgaggcggtcttagggaagaaacaatagtgagaccggggaccccttgaaatcattggggaatcatggtggcgatgcatgcgattaacacatgttgttaacacagatgtggaatgagggggggcgtgaggctcgtggtctgcgacgcatgagtgtgaccgtgagctccccagctgatgagcgcaaaggcagagattggtgtcacgcgggacttgtctgccgaagagcggcgattgatgcagggtctgtgcgatgctctgcagcagttgctgaacaagcagtaccagcggcacatgtgggactgttcgatagcctgaaaaattttgccgcagacaatctaggcaatgtgctggcggggatttcaatctcggttcgattggtgatttgccggcggtaatcggtgagcatttcaatgccgatcagttgggtgaaatcaacaggtcgttggcgaccatttgaacgccgaccgacttgacgagctgcaggcgctggcggaggaaaacatctccgccgaccagatcagtcaggtcgctggtgcaattcaggagcagggtgccaatctggacctcggatccattgccgaacaagcaggactgcccgctgacatcatcagccagatttccggactattgggcaagtagtcgccttaagctttaacgctgacggtgttgtctcggctattgcgtgttttgcggtcgctcagcaaatcatatgggtcgtaggtaaccgattgcgagcgctgctgtacacagatgtgtacgtgggtcgaagcggattcgtggtggcaggtgagacaagctgccctcgcatggctggaaaagcttcggtctcgtggagtgcgatgttaaagctgctcaggtcaacggaatggcggaattccgccgatgcaacttgtggttgcgctcgaataaccggcgattgcaacccaaagatggtggcgggcgacatggacggcatgccatagtgagcccatcggccgaacatgacatgataaagattacgtatgaagggacattccaatgagttttcgcgctaacctgcagtacctacgtgcgcaacgcaacctgacccaggaacgattggccatgttgcttggcgtctcgcgtcaggccatttcgaaatgggaatccgaaaaggcctatcccgagatggacaagctgcttatgatctgcgacctgttcggctgcacgcttgatgatctggtacttggcgatgtgagtcggcctgccgcgtcggcttctgcggccggttcgtcgaatgttgactcctcggctgagacggcatcgcctttagccgcttcttccaaaacggcgggcataatcgctcctatcgcggagcttgcgcaggatatcactggctacgatgaacatcgccgccgattcgcgctgctgattgccggcggtgttgctgcgattgtcgccggggttggcatcggcaacctgttcgattccagcaattccattctcggagcgacgccgctcaacgattttctgacgtttctgtgcgtctgtgtgggtgtgattgcggggctggcgatgctgattccaggaggtctgtcgcgtattgacttcaaacggcgtcacccatacgtagaagatttctacaccggggaggaccgcagccgagaattgcggctgctggtaatcggcatcgtcggtggcatctcggctattctgattggcattgcggtgacggtgtatgccgatgacatgctcggcgtctccgatggctggcccaacgcaatttttctgctgctctgtgcgcccggtgttttcgggtttgtctactgcggcatgagatacagtctgctcaatatcaacgcatacaacaaagcggccgaggacgaccgcaaggagcatgcgggcgagcaggatttctacgccaaactgaccggcgcggtgtgcggcatcattatgctgatagccacggcgactggcttgtgcctgctgtttttgaaccctgcggcattgcgcggcgattggtcggccgtcgggtcgagcgccgcggacggggcgatgttctggctgccgtggccgattggcggtgtgctgtgcggcgttgcggccgttgccattcagctgatcaaggattatcgcgagcgtaagtgatcaagtggcgatggtccattgctattagggcccgttgcaggggttgcgagatgtcgcccgcggcgcagagttgccgagggccggcaaatcactcccgcgtcgggtccttttgcaggagcaggaagacgagcgccacgacgagcaggacggcgatggagagcacgccgaacgaggcgttgccggtcagggacgtggtggtggccaccaggaaggtgccgatgattgaggcggtcttgccgaagatatcgtagaagccgtagtactcgttggcgtggtccttggggatgattttgccgtagtatgagcgggagagcgcctgaatgccgccttggaacatgccgaccagaatcgccagaatccagaactccacggccgatttcatgaagaacgcggcgaagaacacgatgcacatgtatgccacgaccgccgccgtgatcatcgccttgcagccgaatcgcgccgccagacggccgtagagaatcgcgcaggggaaggccacgaactgcgtgacgagcagtgccaccaccagctgggtggagtcgatgccaagctcggcaccgtaggaggtactcatcgaaatcaccgtgttcacggcgtcgatgtagaagaagaacgcgatcatgaacatccacaacggcttgttcttcacgattttgccgaacgtgcccgccagttcgctgaacgtgccgcgcatggccgagcccagctggtcacgggtggcgcgatagtgcacttggcggtagctggtaagcagcgggatggtgaacgccacccaccagatggcggtgatgatgaatgaggcgcgcgtgcaagccaccgtggaccagtcgaagagcgacgggccgccgaagatcagcgcgatgcagaagatgaacggcacggtggagccgatgtagccccagccgtagccgtgcgaggagactttgtccatgcgctcgttcgaggtggtgtcgatgagcatcgaatcatagaacgtcagcgagccgttaaggccgatggtcgccagaatgtagacgaccaggaacggcagccaggtcaggggcagggccattgcgcagcaggtgaccacgccggtgccgaagaagccaaggaagaacttgattttcatgccttgcacgtcggcgatggagccgagcaacggcatgagcagcgcgatgaccaaggaggcaatggtttgcgcgtagccccaggcggacacgatgttgccgtccgccggcatcagcgatttggcgtaaatggggatgacggcggtggacagcagcacgaatgccgagttgccgacgtcgtagatgatccacttcttctcgcgggcggtcagtttggcgctttgcggcaccggttcgtggaca

SEQ ID NO: 888 - DNA, 7539 bp, Unknown
  R14_18m  MAG No. k141_21565
cagcgggcgcgtcagctcggattctcatattccagaaacgggtgcggcgcatgtaacgggcggtaggtagtctgaaggactgtaatgcaaagccgaacaggggagtgaagcatgtcgttggcggtacgagtcatcccgtgcctggacgttgacgccggtcgcgtggtgaagggtgtgcatttcgaaaacctcaaggatgcgggcgacccggtggagctggcggccgaatactatcgtcagggcgccgacgagatcaccttcctggatgtgaccgcatccagctcccaccgcaacacgatgattgacgtggtctcccgcaccgccgaacaggtgttcattccgatgaccgtgggcggcggcgtacgcacgcccgaggacgtcgactcgctgctgcgctgcggtgcagacaaggtcggtgtcaacacggcggccatcaatgacccgtcgcttatcagccgcgtggccgaccgtttcggcaaccaggtgctggtgctctccgtggacgcccgccgcgaaaagggcgagcaacacacgcaatccggcttcgaggtcaccacgatgggcggccgcaaatccaccggcattgatgccatctggtgggtcaagcgcgccgagcagcttggcgccggcgagattctgcttaactcgatggacgccgacggtaccaaggaaggctttgatctcgagatgattcgcgccgtgcgcaaggaagtcaagattccgatcatcgcctccggcggtgccggcaaggtcgaggacttcccgcccgccatcgaagcaggtgccgacgcggtgctggccgcatccgtattccattacggcatcctgaccatcgccgatgtcaaggcggaactcaagaagcacggctacaccgttcgctaaacgaatacaccttgctcccgctggacgaacaatccagtggattgttcgtagcagtgcgctatgcacatgtcgcacataatccgggagctgtcagcgaagctgactgagggtggtccacataaggaagataggtatgacagacactacatacgacaattccactgaactcgatccccgtattgccgcacgcctgaagcgtgacgccaagggcctggtcgctgccgtcatccagcagtacgacacacacgaggtgctgatggtcggctacatgaacgacgaggcattacgccgcacgctgaccaccggccgcgtgaccttctggtcccggtcccgtcaggaatactggcgcaagggtgatacctccggccatgtgcaatacgtcaagggcgtgtccctggattgcgacggagacgcactgctcgtcgaagtagaccaagtcggtgccgcctgccacaccggcaagcgcagctgcttcctcgaaggcggccccctgtccgtggtcgaaggccatcgcccggccgagcagtagaacgggcttccctgactgggggaagccgaacgaccgcgtactacgaaacaagacatcgagttgtaagtaaaggagcgaatatgagcgaatgcagcgtcaaacacctgaagtggggcgccacctggcccagtcgcggccagttccacgaactggccgacgccggctaccgtgtgattccgatcgtgcgccgtctactcgccgactcgctcaccccggtcggcttctacgagcgtctcgccggcggccgatccggcaccttcatcctcgaatcggcggaatacggcggcacgtggagccgttacagcttcatcggcgtcaactcgatggcccagctgcgctccaacaacggtcaggccgactggctgggcaaggtcccggttggtgtgccagtcaccggtgacgtggtcgaagtcgctcacgccacgttgaagactctgaaggccccgcatgtggaaggcctgccgaacctgaccagcggtctggtcggcacggtcggctgggatgccatccgccactgggaaccgaccctgcgcgccgaagctccggacgagaccggccagcctgagaccgtgctcgccctggccaccgatatcgccgtggtcgaccacgtatccggttcggtgtggctcatcgccaacgcggtgaacgtggatgataaatccacccgcgccgacgtcgcctacaacgaggccgtcgctcgactcgaccagatgcagcacgatgccgccaccccggctccgggcgagtcccgcgtcaacatcttggacgaaacggtcgcccagcctgagctgcgcttccgcaccgagaaaagccactacgagcaggccgtcgaacgcgccaagcagcacatcgtcgacggcgacgtgttccaggtggtcatctcccagcgtctcgacatcgattcgcctgccgacccgttcgacgtgtaccgtgtgttgcgcacgctgaacccgagcccgtacatgtatttcatggcgttgaccgatgctcagggccgcgacttcaacgtgatcggctccagcccggaaaccctcatcaaggtggacaacggccacgcgatgaccttcccgattgccggatcccgccctcgcggcgccacccctgaggaagacgagaaattcgccaaggaattgcttgccgatccgaaggaacgcagcgagcacatcatgctcgtcgacctgtcccgcaacgacctgagcaaggtgtgcgtgccgcagtctgtggaagtcgtgcagctcatggacatcaagcgtttcagccacatcatgcacatctgctcgacggtcaccggcaaggtcgacccctcgctgaccgcattcgatgtgttcaagtccgcgttcccggccggcacgctttccggcgcgccaaagccgcgcgcagtcgaaatcatcgacgagttggaaccggccgaccgcggcatctacggcggcaccgtcggctacttcgatctctctggcaacatggacatggccatcgccatccgcaccgcgttcctgcgcgaccatgaggcgagcgtgcaggccggtgccggcattgtgctcgactccgtgcccgctaccgaatggcaggagacgcgcaacaaggccgaggccagcgtcgaatccatccagatcgccgcccagctgcgcgaactgtaacgttcaacgcataacgatgcccctgctgacaactgctgtcagcaggggcatcgttatgcgtatcagtgggtttcgcccatgatgtcggtggcgtcggttccggtgcccacagcggcctcgatggcggcttcgatgccgcgcgccatggtcgcgatttccatggtcggcgtgccgttcggcttgcccacgccctgcgcggtcgcatacggcacatgaatgaagccgcccttgacgccggggaatttgcggtcaatcagatacaacacgttatacatgatgctgttgcacacatacgtgcctgccgtatacgacatgaatgcgggaatcccgtggtcattgatgttcctgaccatggccttgaccggcaacgtggcgaaatacgcggtgtcgccgtcctcacgcaacggcgtatcgaacggctgctcgccatcattatcgggaatacgcgcctcggccaaattaatggccactttctccacggtcagagccgaacggccaccagcctgaccaatgcacagcacatagtcaggctgctcgcgcaccatggcttcctcaaccacggtcgcactgcgcgtgaacaccgtcggaatctccagtttcaccactgtcgcaccggcgatttcatccggcaacagcttgactgcctcgaatgcggggttaaccggctcgccgccgaacggatcgaatccggtcaccagaatcttgctcatcattagctccttatttcacggattgttgtggtatttggacaacgaggttattgcgcgatcagcatatagacgatctgcaccacaatcatcaccaatgcgggcagcacctgcttcttaatcacgcccatgcggtccttcatatcgagcatcgcgacgggcacgatgttgaagttggcggccatcggcgtgcacagcgtgccgcagtagccacaggtcagcgccagaatgccaatcaccgccgggtccgcaccgaaggcgagcacgaatggcgcgccaatgcccacggtcattacggtaatcgcggcgaaggcattgcccatgatcatcgtgaacagcatcatgcccacaccgaatacgatgatgcccagcgtgacgttgcccttcggaataatgccgccgaccagcgtggcgatcacgtcgccgacacctgcggctgtgaaaatcgcgccgagactggccagcagcatcggcagcatgcagagcgcacccatggcagacaacaggcgttccgaatcgttgaggaatacgaccggcttgttgtcatgcgagaacgcgaacagaatcacggcggcaatcatcacaccgatgcagcagccggtcagggcgctgacgctgggaatcagggcgccgataatggcgaacacgcccagacacagggcgggaatgaagatgcgcatgccgatgcgctggaagttcgcggccacttcggcggtgctgggagcgctcgaatcggatgccgagcccttacgcacttggcggaagatggcgggaatgaccatgatgataatgagcacgccgtccgcaatggccggaatccaacggccgaacgcgatgacgataccgagcgccgtccagaacacgaaagtgccgtagcgggccttgttggttttatcgagtaggttgcgtacgcccgcatacacggacatgaaacccatgaaaatatagaagaactcgaggattttcgtgccaacggtcacgctggggtccatgaagaacgacatatcaggcctccttgccggtggtggtagcggtggcggcctgagcggcggcttcggcaccgtagtacttcttgcgcagtcgtgtgtccttgatgatgtaatagacggcggtgaccgccacggcaatcaccgcgacaggaatctcgataatggccatgcgcaacagttcgacgtcataacccagcggcttcaacgtggactgtacgagcagcgcaccggccgtacccacgaacagcacctggccaaagaaccatgcgacgttctccatgccggaagccatgcccttgagctcttccacatactcgtcgttcggctcgtgaccggacgctgcaatcgcacccaccgccatcggcatgatgaccggacgcacgaacccggccacgccaccaaaactcacgttgaacgcggcgaacacgagacgcatcacaccatacagggcgatcaccataccgggcgtcgcattcttcactttgccgatcagctgcgcagctgcggttttcagaccgttgcgctccaatgtgccggtgaccagcaacacgatgatgaaaaccgccatgctgcggttcgagacgaacgacgtacccaacgtggtcaggaagccgtcgacgccaatgccgccgaccagcgcagtcaccacagccgccacgataatgatcagaatcgcatcaagtttgagggcgaaacccacaatcacgatcacgattcccaataacacgagataatttggttccatgtgggaaatccttcctatactgcacacgcattgcgccgcaagcgtgcccggatatggatagtgtacgacggaaatcacgattcaactgtcttatcgcgcacattgcaggtattacatgagcctacgggcatataagcgtatggacgcatgagcgtcggctgagcccggtcggcatagtgttcgctatgatggacagtcggactttggtaagagacagtattcgtaacagacaagtaggttattcatggctattgaggtgcagggacttgaaattcagatcggcgcgcgcacgctgcttcaccccaccaacttccatgtggccaagggagacaagatcggtctggtgggccgcaacggtgccggcaagaccacgctgacccgcgtgatcaccggcgacatgttgcccaccgccggcaaggtgcgcgtctccggcaagctcggctacctgccgcaggacacgcacgcctctgatcccacgcagaccgctctcgaccgcatgatgagcgcgcgtgacatcgccaccatcatcagccgcattcgcaaggccgaaaaggatatgaccgacccggatccggacgtgatgagcaaggccatgacccggtacgacaaggccatgcaggacttcgacaaggctggcggctacgcggcccagtccgaggcgatttccatggccgcctcgctcggcctgccgcaggaggtcatggagcagcagctcggcacgctctccggtggccagcgccgccgcatcgagctggcgcgcatcctgttctccaacgccgacacccttattctcgacgagccgaccaaccacttggatgccgattccatcgaatggctgcgcggctacttgaagaagtacgagggtggcttcctggtcatctcccactccaccgaactgctggacgaagtggtgaacaaggtctggcatctggatgcgcagctcggccagatcgacatgtattcgctcggctggaaggcctacctgcaccagcgcgtggtggacgaggagcgccgccgccgcgaacgcgaagtggccgagaagaaggccgaccgtctcatgaagcaaggcattcggctgcacgccaaggccaccaaggccgtggcagcgcagaacatgatgcgccgtgccgaaaagctgctggaaaacacctccgaggcgcagaaggccgagaaggtggcggacatccgtttccccgagcccgcgccctgcggccgcacgccgatcatggccaaggacatctccaaggcctacggttccaacatcgtgttcgccggcgtgaacctggccatcgacaagggctcgcgtgtggtgatcctcggctacaacggtgccggcaagaccaccacgctgcgcctgctggcccacatcgaggagccggacaccggttccgtggaatacggtcacggctgcaagatcggctacttcgcgcaggagcacgacaccttggatctgaacgccaccgtgttggagaacctgcagcatgtggcgcccgagctcgacaacacgcaggcccgttcgattctcggctcgttcctgttctccggcgatgacgcgatgaaaccggcccatgtgctttccggcggtgagaagacccgtctggccttggccacgctggtcacctcgcgagccaatgtgctgctgctcgacgagcccaccaacaacctcgatcccgcctcccgtgaggagattctgaaggccattgccaagtatgagggcgccatcgtgctcgtcacccacgatgagggcgccgtcgaggcgctcaaccccgagcgcgtgctcctcatgcccgacggcgacgaagacctctggaatgattcgtacctcgaactcgtagccgaagaatagtcctactgtggccccctaccgggagctgtcagcaaagaacgggttaaccctaggctcccctcgctgaggggagtctcgcaagcatgcaaaggaatcaaccatgccaaccacaacaggccagaagatcgccatcgtcaccggcagcgcgctgggtttgggctacgagctcgccagccaactcatcgccaagggctggctggtggc

SEQ ID NO: 889 - DNA, 13237 bp, Unknown
  R14_18m  MAG No. k141_21570
agagggtcagaagggcaaggccgagcgtatcaagcatctgctggaggtcggttaccccggctattcaaccgctcccggttggctcggctactcggatgagaagatggtggccctcgccaaggaggagacccaggtcaagggattcaagcagatcaagctcaaggtcggccagaacatcgacgacgatctgcgtcgcctggccaaggcccgcgaagccatcggccccgacgtgcgtcttgccgtggacgccaaccaggtgtgggatgttcccaccgccatcgactggatcaacaagttccacgacttcgatctggcgtgggtcgaggagccgaccagcccggatgacgtgattggccacgccacgattgcgcgcgccattaaccccatcaaggtcgccaccggcgaacagatgcagagccgcatcctgtacaagcagtacctgcaggccaacgccttcggcatcatgcagattgacgccacccgagtggccggtccgcaggagatcgtgctcgaatacctgctggcaaagaagttcaacaagcccgtctgcccgcacgccggcggcgtgggtctgtgcgaggccgtgtgtcacttcgcgatgttcgattacgtggccgtgtccggcacgatggacggccgcatgatcgaatacgtcgataaccagcatgaacatttcgtccacccgaccgagatcaaggacggcaactacgtcgctccgaccgctccgggcaacggtaccgaaatgacgctggagacggccgagaagtacctgtatcgcggctgaccgcaactggaaattcataaccgaacaacacaacttaacacaacaacacacaaccactccggctggggtgccgaagccccggccgggcgtgacatggaacacccatgaaacgcagaataaggatggacgaaggagttcccatggatctgcatctcgaaggcaaagtcatcatcatcaccggcggtttcaaaggcatcggcaaaggcatcacgctgcaactggcccaggagggggccatcccggtggtgattaatcgacccgacagcgctctcgacgagttcaagaaggatatcgagcagtacaccaccacctatgatgtgcacttgcttgacctcaacgacaccgacaagatcgccggcgtcgtcgaagcaacatacaagaagtacggccatatcgatggcattgtgaataacgccggaaagaacgacaacaaggatctcgagaccactacttggcgtgagttcgaggaatcgcttcacggcaacctgactcactattacgagctggtccacgcggccgtgccgtatctcaaggaaagccgcggatccatcgtgaacatctcgtccaagaccgcgcttaccggccaaggcaagaccagcgcctatgcggccgccaagggcgcgatcctgggcctgacccgtgaatgggccgccgcattggtgcacgatagcgtgcgtgtcaacgccatagtcgtctccgagtgctggaccccgctctatgccgattggatcaagacctttggcgatgaagcggcccagcaggcgcgcctgtcggtgatcaccgacaagattccgctggaacatcgtatgaccaccaccgaagagatcggtaatgaagcggcattcctgctctccgaccgctccagccacaccaccggtcagtgggtgtacgtcgatggcggctatgtccaccttgaccgtgcgctgagctgacaagcagccctttcccgaatattcgcgcggcaattccggagctttgatcattgctccgtccgtacgccgtatccgcgtatgccgcccgtatcacccgcgccctgggtcatccgtttaccaacatggcccagggtggtccacttctcgctaggcaatatcggggaaactcgtatcactaaggagtcaatgatgacatccaaaaacacaaccggttccaaggcgaccatcgccattgtactggtgacctcactgttctttatctggggtttgaccatgaacctcgtgaacgcgttgaactcgccgttcgcaaactacatagaactcagcagcgccgaagcgtcattactgcaggtggcctattacggcgcatacttcgtcatggccattccggccggcttgatcgccaagcgtttcggttataagggcggcgtcatctccggtctgttcctgttcgctctgggcgcgttcatggtgatccctgccaccaacatggccagctacggcctgttcctgttcgccatgttcgttatcgcgctcggcgcggcatcgctggagaccaactgcaatccgtatatcaccaagctgggtgatgaaaagggcgaatcgttccgtatcaacatggcgcagagtttcaacggcgtcggcaacatcgttggcccgctgattcttggccagattctcggcaccaccgtcgcatcaggcgagtccggcttcgacgccgctaagacgcagttcctgaatgatacccgcacgatatacattgtgatcggcattgtgctggtcgtggtgctcgccgtgttcgcgctgttcaagctgcccacgcctccgggagacgaagaggaggccgcgggcggcgcctcctccgagaacagctccttcttcggcctgctcaagcgcccgcacttcgcattgggcgtgcttgccgagttcattttcatcggcctgcaagtggccggcatggcggtcttctccgcctacgcgctcaagcactggggcgcgggcatcacagccggcaccgcggcgatgatgctttccgtgctttccctgctgttcaccatcggacgcttcgccaccaccccattgatggccaaattcgatccctcgaagattcttggcgtatacatgaccatttcagccgtgctgatgttcgtggtattccttggcctgggcaaggtctccgtcatcgcgttcatggtggcgtatctgttcatttccatcggatacccgaccatattctccctgacgctgaaaggtatcaagggttccgcggcgaagaccggttcctcggctttggtgatgagcattgtgggcgccgcgttgattccgctgctgctcggtgtgattcaggatgcggcaggcatcgagatcgccatcctggtgatggtcccgggcttcctgttcgtggcatggtacgcattctggggttccaagatcggtctgaaggaggcctgacatgacactcaacgtaatcgattcccacttccatatctgggatccggatgcgcaggatctgccatggctggcaggattgccctcgctgcaacacaagtacacgattgaagacctagccgcggaatacgccaaatttggcgtgaatttcctcggcggcgtatacgtggaggttgacgcggccgaccatgagcttgaggaccggctgctgtacgagaatgcaagtcctctgatcttgaagcgcatgttgcaaggacgggtaagcccttggatgcgtgtcccgatcaacgccgatggcatcagggaaccgctgcatgtggattccgagccgcggggccgtgcgctcgaacccgaattcatcgccggtctacgcgcgatggccgccaagggattgccattcgagctgtgcaaccggggcccggagttgggcgacatggccaaggcgttctcgcaggttcccgaagtgacggtcatcatcgatcatctcggcaacgtgcccgggcttgatgaggaatcgtgcgccgcgctcgcagcgttggccgaactgccgaattcgtatatcaaggtttccggcgacaacccggtggacccggacatcgtgaaatacgtgcgggacacattcggcccgaagaaggtgctgtacagctccaactggccggtcgtggaactcaactcgacctttgccacgcacttccaactcatgctggacacgttcggcgaggacgaggacttcttcgaaaacaacgcccgccgcgcttacaacatcgactaaacccaagccccctctgatgagggggctatcgtccgcaggacgactgggggagaggccgcaaactcggtgccgcttgtgcggcacccctattccgtaacgaaaggaacaatcatgacgagcagcgccgaattctcaggcatcatctgcccatccatcaccatcaccaaggacgacggtgacatcgactatgaacgctgggggcagcatctcgatcatctgatcgaggccggtatcaacggcgtgctggtgtttggcagcatcggcgagttctatgccttccctctggacgtcaagaagcaggcggtcgacttcgtggccaagcatgtcgccgggcgcatcaaggtgttcgcgggcgtgggcgataccaacttgaacaatgtgatcgacttcgcgcgggcagtcgaagcaagtggagtggatgcgctcgtggtcgtttcgccgtattacttcggccctactgcgggaggcgcgaaggcgtacttcggcgcggtcgctgaagcgacgaatcttccggtgatcctctataatttcccaccgcgcaccggcagcgacttgaccccggagctcgtggccgagcttgccgccgcgcacccgaacatcgtcggcatcaaggacacggtcgacacaatcagccacacccgcaaggtgattcgcgcggtcaaggccgtgaatccacggtttgcggtgttctccggtttcgacgagtactatctcgtcaaccgcgtctccggcggtgatggcgtgatctgcggcatgaccaatgtggagccggagaccttcgttacgctgcaccgtgcatatgaggccggcgactatggcaccgcaattgaggccgccgaacgcatcagccacctgatggcgctgtacgatcagaccgacctgttcatctccgccatcaagggtgcggtcaaggccaagggactgaacatttccaccctgatccgtgagccagcggtgcaactcactgctcagcagtatgaggcgattaaggcgattctcaagtagcgtatatctcaggcttccgcggaatcctacggtggatttcgcggaagtttttttacggtgattacagttgccggctcagctcagcagcgccgcgatgatcgcgataaacaccgggctggtcatggtgctcatcagaatgccgtcgcgcgcgaaggtgaggcccacgttgtagcgggccgcgtagttgtacacgttctggccggtgggcagagcggcgagtaccacgcaggcgtacagctcggagccgcggaagcccatcacgaaataggcgagcaggaacgcgatgattggcatgatgatgttcttgaggaccgcgaccgtgaagatggccgggcgatcgcccttctgctgcagcggcttggtgccgtgtagggacatgccgaacgccatcaggatcattggcaccgctgaatcgccgatcatgtcgatcgggtcgaaaatgaatttcggcactgggaaccagccgcttttagcggaaatcgcagagaccacaatgcccagcagcgaaccgataagcagcggttgatgcagtggctgcttggcgatttccttgatggagaccttgcccttggtggtcacgtccagcactgtcaggcccaccggtgtgaagatggcctgctgcatgaccagaatcggtgccaccagagccggattgcccagaatgtaggtggcgattggcaggccgatgttattggaattgaggtacagcgaattcagggcgccgatggtggcgtccggggcgttcaggtggaagaacatgcggttgagcaccaggaacaccacgcctaccagcacggcggagaagaacgccacgataatcgagggatggaagatgtcgaagatcggttccttggagaggatggcgaacatcaggcacgggctcgatacgaagaaggagaaccggttgagcaccatctgagcggacggcccgccgattcgcattcgtgcggcgacatatcccaccgcaatcacgatgccgataacgcagaagccttgcatggcgctgattagacctgacataatcctccctttcgccaccccagtgtggcacataaaaatgtattcggccgcaaaatctcatgtagtgggtgtgctgggcccgccgcccacgcggtacgctgttcacatgacgcttgaattgaaccgcaccgcatccactgccgagcagctgaacagcctgctcacccagatcatggagaacttctccgtgtccgaccacgagggccccctcaccgacgaggtcgaggccttccttaacgagcaagagcacctgaccgtccgccgtcacggcgacacagtggtggccagcaccgacttcggcgagccgaaccgtgtgatcttggccgggcacctcgatactgtgccggtcatcgacaatttcccaccgaagtggctggagcccggcgattcgctgattcgcgaagaaatcgcccacgctcatcccgaagaccgcgtgctgtggggccgcggtgccaccgatatgaaggcctccgacgcggtgatgctctacctcgccgccacgctcgacggccgcacgccggaaaccaccccgaaagtcgacctcacctacgtcttctacgaccatgaggaagtcgtcgccgaaaagaacggccttcgcaaagtcgtcgaggcccatcccgattggatcaccggcgatttcgccatcatcggcgagcccaccaacagcggcatcgagggcggctgcaacggtacgattcgcttcgacgtcgtgacccacggcgtggcagcgcactccgcccgcgcgtggatgggggagaacgccatccacaaggcggccgacatcctgagccgactcaacgcttacgagccggccaccgtgaacgtggacgggctcgactatcgcgagggcctcaacgccacgctgatttccggcggcaaaggcacgaacgtcattccggatgaatgccgcgtacacgtcaactaccgcttcgccccggacaagtcgctggccgaggccaaggctctgatgatgggcgcggatgccggtgccgaactcggcaatggcgagcatgtggccactggcggcgtgttcgagggctacggcatcgaaatgaaggacgaaagcccctccgcgcgcccgggcctgaacgccccgctcgcccaagatctggtccgactggtcaaggagcgcaccggccgcgacccgttggccaagctcggctggaccgacgtggcacgcttctcccagctcggcatcccggccgtcaacctcggtgccggcgacccgctgctggcgcacaagcacgacgagcaggtgcccgaatccgacctggccgccatgaccgcaattcttaccgactggctggtctgacacctctccagctcccctctctgaggggagctgtcaccgcagggaggggagccgagagaacgtcagcctcgccgggccacacccgcacaaaatatgtggcatactaaaggatggtggttctgcataaccatcagcgtgcgagatggcgtcgatccccttgcggctctcgagaatgagacaacgcaagcgccggtgtccgccacccgcaggacagacttgagacgaagttgcctttacgcggcgcgttttcgcgcggccacggtgagagcgtggtgtgagtcaagcgtataggcctggaaataggcgtcgtgatgcagcgcgccgcgaggagcattgtgcccactgacaaccgtgaaggtttcgtcaacgacggaaccgataattcaaccgtatccaatgccgattcggctgcagccgtgaacgctgcgcctgccgccgcctcccagcccgtcgaacctgttcgccgtcgtcgtggcggccgccgcgtggtccgcggcaccggtgctgccggcgcctccctggaactgcaagtgcaggaacgcaccccgctgttcgaagcccccgcgcttcccaatgccagcaccgcggccgattccaagtcatccgattccggcgattccgatgaatccagcgattccaaggattccgccgaacgtccaacccgccgccgtacgcgccgcgtttccacggccgacgatgccgccgaaacgccgcgtcgcacccgtcgtacgtccgccgcatcttccagcgataccgatgatgacgacgagactccgcgccgtccgcgccgcgccgcttccgcagtggccgacttggatagcgaggatgatcgtccgcgccgttcgcgccgcacggtcagtgccgatgatttcgatgacgatgccgccccgcgttcccgccgccgttcagtcgtggacgatgacgattacgacgaggaccgttcggttcgccgccgctctcgctcccgccagtccgacgatgatgactacgaggatcgcccggttcgctcccgcctccgccgtgcgcctatggatatggatgatgatgacgaagaccgtacggttcgccgtcgttctcgccgtgcagttgcggatacgcacgaggacaccccggatgagcgcctgttcgacgcggtcgaatccctgccctctggccacgagaccgtgcgccgtggcaagccgatgacgtccctgctgttccaggaaccggtgctgcccgccgccgtggatgcgcacgataccgctgacactcgtgatgacgatgttgacgccgacgaacgcccgtctcgtcgctcccgccgctcgcgcagccacgacgatgacgatgcccagccgcgcagccgtcgccgcgacgatcgcgacgaccgcggccgcgcctccgccgaccgtgacgcttcccgtgacgccgcgtccggcgataccaacgccgatcacgacgatttcgacgccgacgacacctcggactcccgccgttcgcgccgctcccgccgtctgaacgcccaggagcgccgtgcagccgccgaagtcgagcagattgaggaagacctcgagctggacgatatcgcctactcgccgattgccgaggaggagggcgacgaggaatccgacgtcacccgcacccgttcgcgccgtcgccgccgtcgtggctcacgcggcgaaaccggtgccaacggcgagcacgataccgccgagaacgatgccgaggatacgcgttcccgccgtcgtgacgatcgcgatgatcatgaccgtgatcgtgatgaggacgatgaggagcagaccgtcactcgccgtcgtcgccgccgtcgtggcggcaagaacggcgagggcaccgacgaccagagtcagaacagcgaacagccgctggtccgccgctcccgcaagcagcagtacatcgacgaaatcaccgatgtggaaggctccactcgtctcgaggccaagaagcagcgccgccgtgacaaccgccgtgagcgcagccgccagagccagcttatggaacaggacttccttgcacgccgcgagaacgtggaccgcctgatggtggtgcgcgagaaggaacaccacacccagatttccgtggtggaagacaatgttctggtcgagcattacgtctccgacattcaggaagtacagaccgtcggcaacatctatcttggccgcgtgcagaacgtgctgcccagcatggaggccgcattcgtggatatcggccagtcccgcaacggtgtgctctacgccggcgaggtcaactgggatgccgctcgtctcgaaggtcagccgcgccgcatcgagctggcgttcaagtccggcgacccggtgctcgtgcaggtcactaaggacccgatcggccacaagggtgcccgcctgacctctcaggtcacgcttgccggccgcttcctggtgctcgtgccctccggtggcatgaccggcgtgagccgcaagctttcggagcgcgaacgcagccgtctgaagaacatcgtctccaagatcgccccgaaagacatgggcgtgattatccgcaccgcggccgaaggcgcatccgaagacgccatcgtcaaggatctcgaatcactggtccgccagtgggagcgcatcaacgccaagcgcgaggaattctggcacggcaagcgcccgaaactcctgcagggcgagcccgacgtggccatccgcgtggtgcgcgacatcttcaacgacgactttagcaagctcatcgtggaaggtgacaaggtctacgaccgtatcgaggaataccttgacaccatggcccccgacctgaaggacaagctggagaagtgggacccggccgagcacgaaggcaaggacgtgttcgacaaatggtccatcgactcccagctgcgtaagggcatggaacgtcaggtctacctgccgtccggcggctcgattgtcatcgatcgcaccgaggccatgaccaccatcgacgtgaacaccggccgctttatcggcaagggcaagtccttggaagaaacggtgacgcgctgcaacttggaggcgtctgaagagatcgcccgccagctgcgcctgcgcgatatcggcggcatggtgatgatcgactatgtggatatggtcatgcccgccaaccgcgatctggtgctgcgccgcttggtcgaatgcctggcacgcgaccgcaccaagcatcaggtggccgaagtcacctcgctcggtttggtgcagatgacccgcaagcgcatcggccagggtctggtcgaggcgttctccgaggaatgcccgacctgcaagggccgtggtttcatcctgcatgatcagccgaccgtttcggccgactacgacgatccctacgcgcttcgcggtggcgacccgttcgtcaaaaccaacaagcacggtcgcggcaccgctcccgctcccgaaccggctggttccagcgccgacgtcaaagccaaactggctcagattgccgccgctgccgtcgccgccaacaatacggcggaagagtaacaggtgtgtcgtgcttgacacgcgggcaaaaatcatttgatttagtccgcatggtggtgtagatttgaaactcggtgtctgaccgcaggctcggtgcgtgttaggcaaggtagctttccaaaacataaaaggaacgataatgtacgcgattgtgaaggccggtggccatcaggaaaaggtcgaggttggcgacgtcatcctcgtgaaccgtctcgacgccaagaagggcgataccgtggaattcccggtctccctcgttgtcgatggtgacaaggtcaccctcgccgccgccgatctggccaaggtgtccgtcaaggctgaggttgtgaacgatgaagccaagggcccgaagattgacatccagaagtacaagaacaagactggtgttgctcgccgtaagggtcatcgccagaagctgactatcgtcaagatcacggcgattgcctgagttatagaaaggaccatgaatcatggcacataagaagggtgcgtccagctctcgcaacggtcgcgattctaacccgcaatacctcggcgtgaagaagttcggcggcgaagccgtcgtggccggcaacatcatcgttcgccagcgtggcaccaacttccacccgggccacaacgtcggcatgggcaaggaccacacgctgttcgccctcaccgatggctccgtgaagttcggtgtgcgtcgcgaccgcaaggttgtcgacgtcatcgcctgagcgatatagcgtcaagctttttcaagccgcgcccgtaaggacgcggcttttttgtaaggtaatcaatatgagtgattttgtggatcgagtaaccgtccatgtcaagggcggcgatgggggcaacggttcggccggcatccgtcgtgagaaatacaagccgttggccggtccgaacggcggcaatggcggcgacggtggttccgtggtgttcgtggccgaccgtaacgccaccagcctgctcgactatcgtttcatgccgcatcgtgtcgccggcagcggcaccatgggtttgggcgacaataaggacggctccaagggcgaggacctgattctgcccgtgccctgcggcaccgtcgtctttgaggcgcgcggcgaacagggcaaagccaagcatcccggcgcacagctcgccgacttgcgccacgagggcgaccgctgcgttgtcgcccagggcggtgccggcggcctcggcaacatcgccctggccaacaagacccgacgcgcccccggcttcgccctgctcggcgaactcggcgaggaacgcgacgtgattctggaactgaagtccatcgccgacgtggcgttggtcggtttcccctcggccggaaagtcgtccctgattgcggcgatgagttccgccaagccgaagatcgccgactacccattcaccacgctggtgccgaatctcggcgtcgtcatcgccggcgactctcgatacaccatcgccgacgtgccgggcctgattcctggcgcctctgaaggcaagggcctgggactggagttcctgcgccacatcgaacgtaccgaaatcatcgcccacgtgattgattgcgccacgcttgaaccggaccgcgacccgatgtccgactaccacgcgctggaaaacgagttggcgctctacgccgacaagctcgaactgccattgggtgccatcccgattcccgaacgcccgcgcatcgtgattctgaacaagatcgatgtgcccgaggccaaggaattggccgagttcgtgcgtccggagttcgagaaactcgggctgaaggtctttgagatctccaccgcctctcatgaggggctgaaggagctcaacttcgcgttgtctgcgctggtgcatgagatgcgtgaggaagtggccaaccgcgagcaggccgaagaggagacgcgcgtggttatcaagccattggagaccaagggccgccgtccgcgtcgcgctgacgagggcggcagtgcgcttgagttcacggtcgagcgccgcgaactcggcaatggcgaagtgttcttcgaggtgcgtggcgtcaagccggagcgctgggtcatgcagaccaacttcgacaacgacgaggccgtgggctacctggccgaccgcttggccaagctgggcgtggaggacgagctgcgccgcaagggtgcccaccctggtgacgaggtgcgcatcggtcgtggtgcccgtatggtcgaattcgattgggatccgaccatctccgccggtgccgaaatgctcgacggctccaacctcggtgcccgaggcaaggatctgcgtctcgaagagcaggacccgcgcacgcaccgccgctccaacgccgaacgtcgtgcccaatatcacgagatgatggacgcccgtgccgccgtgcgcgatgcgatgatggccgaacgcaaggccggccactgggccgacccgaccgttgacgacgatcgccatgacgaaaccagtctgttcggccacggtgagtccagcgaagatggtgaaaccgaggaataaatgagcactccgagtcag

SEQ ID NO: 890 - DNA, 17216 bp, Unknown
  R14_18m  MAG No. k141_21756
tccctctttgcctgatactctcaaacgtaatattcttgcgtttcgccgcttgcttcatcagtttgatgagccatctcctactcgtcattatattgttaactcctttcttgacaactctgtcaagtgtggtatttacttttaaccgccgaacgtgctgaactcggtggtgcgctcgccgggagcaatggttgtggactgggtcatgcggccttggtaatagcgggtttccttgagttctccgttgatgacttcctgaaaatgcgcttcgtggcgctgcacggcgggggagccgaggtcggtggcgttctgataagcggcctgatggtatttgagccaatgcgacaactccctgccgttggtcgaaccagccacggatgcggcgtcatatggggtcagaccgttgatgggcgttgcgccgggagtgcatgagacgtccgaatgcactgtggatggtgttgccgtgggcgcgggcgatacatgcccttgcacggtgagccaattatcggtgaccgggttggcggcaccgtccagcgcggcgaccagttcatcatcgatctccacgctggtgacccacgtgcgttgcggaatcggatgattggccaccggcgatccggctgtcaccacatgctcgatggtatattcctctgcccaatccgaggcaagcgtggcggcaacgatgccaccttgggagtggccgatcagtgccacgggctcgtccttgccgataccagcctgacgcatcgcctcggcaaccgtgcgagcgctgtccgctttcctgcggcgctcctgatcggcgctcatcagttccacgttctgcgcccagccgaatggtgagtcaggttgtccatcggtacccgggatggtgaccagccaggagttggttccatcagcccgttcatagcgttgaatggcgatggtcccatattcgagtccgctgttcagctcgattttgccgagccgttcttcggcgagcctgcgcagattctccattgactcggccaccgatccgcttgcacggacgacgtcggcattcgcctgcacctcgcgcacgttcagatgattgccttggacgacgtctttcgccgggccggagaaattggcgattttccccgcagccttgttgacctcatcggtgtgcgcaatgctcttgccgataggtacgccgccaatgattccgcccgcgccgctgagcactccttcctggaacggataggtgaacgtggacatccatgctgggttcggtttgccgtcaatagcccagccggccagaaagccgcccgccgccacagcggcaacacccaccgcggcatatcccggtttggcctgtgtaccggcctgcaataattcggtaaacatgcgccgagccgtcatctccgcctgagaatacagagagtgtgcgcgaatcagcagatcggccgcgccacgcaggtcatcgctcaaccgctgacatgccgttgcatggtcataacaccgattgcccagcgcggcatatggtgcagtgacatggccgggaacaacggcgctcggatcgcccgactgcaaggtgacgcacatcggcgcactatgccgatgtgactgcaactgtaatgcggccgattcccaagccgtggctatggccgcaaatcctgccgcctcgtcatcgagagccttggctatggcggcatattcttcaagagtggctggcgcatatcccactccgccgtaaacggacgattccacctgccagtaatcgtgctcgctcatgatgacccccaagccaatcggtgggtggtctccatgtcttgcgcgagactggccgaatactgtgcggtgcgactgagccgcgatcggaataggtcggcggctttaccggtccacacgatgttgcgagagcggttcacggccaccgccatctggtccgattgcgccagtgtggccgcacgttggacggacacgaggtcgcgactacgctgtaccgccgcatggcaagggcaagtgccgtaatcgaacggcgtcaccgtattgccggcaaagccgccggcgggatcgatgggtgctggggtgctggtgtaggtattcatatatccagctaaaaggacaggactcatgcttgtccagccggaacgaccaatgtggttctagcttgccgattttgggcgaagttattcacaagtgttgtgtatagccgtaacgattatccacaaatagcctgtttgggcacaccttggatcagccatgggctagcgggatcagacaaacgccaaagccgacagccgaaaccgggaaacagccgcgataaggccatgacccgtgaggatgtgagaaaaagagcaaccgtgaacgactgcttaccacggcttggtggccccggtacccttgttctgcgtcgccttctgcttggattgggtggtgttcgactgggtatcggtggattgctgattggccttcatcagctcctcgacctgcttcttctgctcgtcggtcaacgcgccgccctttttggcattggctgaggaactctcggattgctgcgccgactgggcttgcccggaatcggaaccgctgttctgcgcctcggcctgtttcagggtgatcttcgtcagctcggaagaaatcgaagcattggtgtcgatggcgtccttgacttgcggcaacagaagcgtacgcattcgcccggcctcggcgaattgcgcatcggtctgctgctgttgcgccttgagcgtggtgatatcagtcgactcatcctgagccgctttgatattggcattcaatgatgcggtggcctgattgaacgtaatcgaagcggacaggtttactgccgccacgccggcaaccagcagcagcaatacggtgccacaagccaggacgatacgtgcccaaagcgggcatttcgcccgcatccgaatattcgccgagccatcgttctcgtggatttcgttactgttcctcacagcagcctccttgaggtcgcgatccatgcaccgacttccatggcaagcaatatcgccaacgcaatggccaacggccataccaccggcgtggtgcgtgtgcgctccttgaccgtggtggtcatgcgccactgcttcgacgacctggccgaaaccgaatccgccaaagtctgtgaagcgtccacggccacatacgtgccactgatctcgtcggcaatgtctttaaggttcttctcatccatcttggagatgccgggttcgccggtatccgggtcgaccacccagtggtccgtggtgttggaatcgccggcactgacgccatcggcgatgacgggaatcttgccgccctcggtcgagccgacgcccacggtaaacccatcattgagatactgtcgcagtgacgagaacgtacgacgcgtcacattcgaggtctgttcgccgtcagtgatgaggtacagcacaatcgcatcatccgggtgcgcttcacgaatcgacttcgcggtcagcagcaattgatcgatcggagcatccagactggatcccgccgacacggatgtggcttccaccgccaacgtgttggcccaattatcgatggccggcgcatccggggtcagcggcacatcaagtgttcccgaagcaccgaaccgtaacgccgcgaaactggcgtccgggtaagcagcggtcacatcatgcacggcctgacgcgcggcatcgatgcgggtaatggtcttctcggacccgtatgtggcatcagccaccgccatcgacccggtggtatccaccgccacgatgacgtcggtggcattgatgacctgtgaggtggtagacgataccacgctgggagtcagtaccatcaccgcgacaatgagcagcataagcgtacgtcgtatgcaagcccacacggtctcgtcactggaagcacggcggcgaacaaacaatacgatttcgagaatggccagtacggcgagcccggccgccagcagtccgtcggcgacccagcccaaggcgggggagaaggtgaatccgttcatcgcctcaacctccatgcacatacgatccagataatgagtatcacggccagagcaagcgtccacagaccgggagcgtccaccattgaggatttcgccttgttctccacatccgtatctctacgcgactgaatatcccgtaccagctcatctatcgacgcgccattcgattgggtgaggaagatgcctccatgcgactcgatcgcggacttcatatccgttgtggtttggtccgattcactggctttcggcccggaatacaggccgtccacggtgattttggtctgctgggtcaagtccaacgcttcggtcagcgaataggtgggtttgcctgacacgacgttgtcggtggccagcacgatggatgccgcacgctgacggtcggcattcgcatgattggcttcgccataagcgaaaccggggagcatcgccgcgcaagacaccacgccgtcgccaatcaaggaggtggcgtccttgcggttctgcgtgccttcgagccaattggcgatgtcctgatattcggcatcggacatcttatcgatgtcatcctgcgactcgacgcctttcagcgccttgctggcggaggtcaactgtttggtgaccagttcgtagtcgtcggtcagcgggaacaccgtgcgtgaggtcgagttgaagatactcaaaccgatacgttccccctcgaaatgcttgaccagctccaaataggtatcgatgacctcgcgatcataggggagcgtggatcccgacacatccagacacaggacgatatctcggctggaagcacgttcgtcaccggcatccacttggctggggcgagccaccagcacaatggccagcgccagcgcaagcaccagcacgctgatggcgagacggcccaaagcgcgccattgacggaacagacgggaagcgtgctcggtattgagatcgtcgtccatcgagaatacaggggtgtcgtcggcggcgttacggcgggcgaacacgacaatcagcacgataatcgccagcgctgccaagacgccggccagagcggcccaaggccaatgccatgccagcatcatgaacgccacctttccaccagattcgccacccactcggcggcctgctgcacgctggtcgtctgggcgattcggttgcgggcatcatcggcaaattccggtggatacaacgcgctaatggtctgcttcaatgcgtccaatccttggcgattcgcgggcgtgcgattcaggtacgccaaatcggtcagcgtactggaactaagctccttgcctgatgcggcaccggcgaaatcacgggcgatgacggccaattcgacgaaagcctcatgccggggcagtgctccggattcatgacgggccaccacatcgtcgatgcgggcacgccactcggccttggagccggcattgctatgagtgccacgcgcacggtcgctgttccgaggtttgcgtgcggggcgagccagcatgatgatcaacgcgatcagacctaccgccagcaacaggcatgcgacgatggccatcaccaggggagtggtcaaggccaacgactccacgggcctgagatcgccgggatcagtggcgagcgggatgatggggaacatgctgtgcatcatagatcacccgccaaagtcagtccgaccagttcgggtgcagtgcccagtctattgcgtgtggtgcgggccaatgcccgggacaccagggcgacgaaacgatcgaacatggattcgctggatgcggctcgaatgatatgggaaccggcacgggtgagctcctgttccaaagccgcggccatatacgcgcgatgagtatcgacctcggccgctgccttggcgttgcgcaggaatgccggcacacgccgtgcactcaagccgtcggcgggagcgtggcgggatgagacggccttgaacggattcatcgtcgccacatcgatcagcaccatcggatgggtgcgggtaatacgacggatcgtggtgatatgccgctcctccatcgcatgctcatcggtggccaatacgatcaatgcctcacgatccttgatacggcgcgcatattccagcagcgcgtcgatattacggtgatgatcccaatcacgatcaagcgccttgtccagcgtgcgttcgaactgcgcgaacccaccgttgaacggcacgcgggtgatgctggactcatcgccgaacaccagcgaaatatcgtccgaccggcgcaacgacagtgcggcgaacatacgcagcgcattggcggcaacctgccatgcgcgttctccggaagggcatacgccagtcatctccaggccaacgtccatcagcaaccagacccgtgacgtcgacaggcgctcgcgctcgaccaccatggggcggccttggcgggcgctggtcttccaatcgataagacgggattcgtcgcctggctcataggcatgcacatccatcgcatcgccgctgccgccacgacgcccggatgcgtgttcgccctccagcacgcccaaagccttccttacggtaggcaggctcagctgagtgccaagggcctcgattttcttgcgaacggaatcggaactcacggaacaggaaccgtttcgacgatcttgtcgacgatctgatcgctgaccacgccatcggccagtgcctcgaacgtcagcataatacggtggcgcagcacctcatgagcgaacgccttgaggtcctcgggcaccacatagtcgcgcccggacagcaacgccttcgcctggccgatacgggtcaaggcgatggtggcgcgcggcgaggcacccaaacgcaccaaggacgacagtcccttgatggggcgggagccggcacctcgtgacgtggcggtgatatcgaccgcataacgcatgatcgcgtcggaaacatgcacgcggcgtgccgccttgcgcagaaaatcaacgtcagacacggaaatgcgttcgccggtgatggtgtcgggaccgatcatatcggagccacggtgggtgagcatggccagcatgcgagcctcttcgtcgggcgaaggataggtcatgacggccttcatcatgaaacgatccatctgggcttcgggcaggttgaacgtgccctcctcctcaatcggattctcggtggcgatcaccatgaacggcttgggcaaggcgatacgctgcccgccgatggtcgtggcaccctcggccatggcctcaagcatggcggactgggttttggcattcgaacggttgatctcgtccagcagtacgaaattggcgtgaatcgggccgatctgcgtggtgaacttctgcgacgcaaaatcgaagacctgcgtgcccaccagatcggatggcatgagatcaggagtgcactgcacgcgtttgaacgagccggatacgcaggtggcgagcgtctgggcggccgtggtcttggccaagcccggcacggattcgataagaatatgcccgccggccaccaaggtcacgataagcgattcgcgtagattatcctgacccaccagtgtctgggcgaacctcgcccgaatggcgtcggccaggatacgtgcgcgtttggcgtcatcggcacccagcggagccgatacgccgggcgcgggaacggtgaccggtcgtgcggcggtggtcggcgaaggtatgttcggttgcgtggggaacaaagtcatgccctcactgtaactactcacaatgactgttggtctgtctaaagagtccaatccaccgggtcggcacccatggtgactagggcttgattggctctggagaatggtttggagccgaagaatccgcgggaagcggacagcggactcggatgaggcgatttgataatgaaggcattggtcagcaatggctcgaggctttgcgcattacgcccccagagaatcgccaccagcggcttgggcttgccgtcggcgtccgtgcgcgcgttcaacgcacgaatcgcggcctcggtgacttcctcccagcctttgccctgatgcgaattcggccgcccgacgccgacggtcagacatctgttgagcaacatcacctcacgttccgtccacggtgtcagatcgccgttggtgggcatgggcaccccaaggtcgtcaaccaattccttataaatattgaccaggcttttcggcagcgggtgaacattcggcgccacgcagaagctcaaacccaccgggtgacccggggtcgggtaggggtcctggccgacaatcagcaccttgatggaatcgaacgggatggtgaacgcgcgcagaatattgtggcttgccggcagccacgggcgcccggcggcgttttccgcacgaagaaaatcgcccatatggtggatggcgggctccacgtcggccaaggcatgggcccaccccggctctaccagttcgctcaatggtttgatcatgactcaccactgtagtcaaacgtgcatatccggtgcacgaggcgtggtgtggtggactgatgagttgtttgccgattacactcatgggtagttttgacaggaagaaagggcgattatggcacgcgacatgatgacctacgaatcctatgaaccggattccttcgacaatcctccgaagggaccggtgggagttcaccgtggcgctcgttcggcagtggcccgcctctgcccgttcatcgtcgttattctggtggccgcactgtgcggtgtcggggtctgggcatggatttccggggaatacagggatgcaataggaggatcgtcccagactgcgaccacgtccgggactgcttccaagtccgattcgtccagcaaggctgagaccaaaaacagcaccaaggatgattcctcgtccacttcgaccgatccgtccaaggactcgacttcggattcggcaaaatccgataccaacagtgatacgacatcctcgaatgagaatcaagactccgatcagcagtctcagcagtccggagccaccgcgactgtgaataaggccacgcaggtgcgtgtggtcaacgccacaggaatccaaggatatgcaggtcagcaggccgatgtgctgcagaccgccggttacaccagcgtcgaggcgaccaatccgcgcggcacattgccggcttcttccgtggtatggtatcagaatgaagccgataaagccaccgccgaagatgtggcgaccacgcttggcatttcggctgtggagcaggtgcaaggactcgccgttcccattacggtggtgctgctcaactagcgttgttgatgcgcccctgatatcggcgtggaatacatcgaaaactgtgagcgttctcacgtctatgaaataattcgtaccgaaaatgtgccactgcggttgggattgttccctcgtcactgtacaatcgtcatctagtcgcgaggtaggggagcgcgatgcggttctttctacgttccctataggttttgtgtcgcgacgcctaagggaacaaaggaaagatcagatatggcacaaggtaccgtgaagttcttccttgccaagaaggggttcgggttcatccagccggacgacggcagcgaggacgttttcgtgcactacgcggaaatcaaggacgacggcagcaccaataagttcaagatgctgtacgagggcgatcgcgtggagtatacgcccgcttcgtccggcaaaggcacgcaggcaaaggatgttgtcaagctgtcttcgggtgaagcccgctccgagtgagcaacacgcacgcaaggatgtgcattgaaggccctgaccgtttcgacggttggggccttttcatgcccaaagcgcaatcgccgccgatgatgttggcactcggcggtcgcgagtgctaatgtctgggttagcactcggaggtcgagagtgataatcggcagctgacggctggtcgtcacgactcgacgcttgcgagtgataaccggtatacctagccatttggaggaatacgcaaccatggcaaagatcatctcttatgatgaggaagcccgtcagggcatgctggagggccttgacaagctcgccaacaccgtcaaggtcaccttgggcccgaagggccgcaacgtcgtgctcgacaagacctacggcgctccgaccatcaccaacgatggtgtgtccatcgccaaggaaatcgaccttgaagacccgtacgagcgcatcggcgccgagctggtcaaggaagtcgccaagaagaccgacgacgtcgccggtgacggcaccaccactgcgaccgtgcttgctcagtccctggttcacgagggtctgaagaacgtggtcgccggctccaacccgatcgccctgcgtcgcggcatcgagaaggccaccgaggtcatcgtcaaggaactcgtcgccgccgccaaggacgtcgagaccaaggaccagatcgctgctaccgccaccatctccgccgccgaccctgaggtcggcgagaagatcgctgaggctctggacaaggtcggccaggacggcgttgtgaccgttgaagacaacaaccgcttcggcctggacctcgacttcaccgagggcatgcgtttcgacaagggctacatcgccccgtacttcgtcaccaacgctgacgaccagaccgcagtgctcgaagatccgtacattctgctgacctccggcaaggtctcctcccagcaggacatcgtgcacgtggccgagctggtcatgaagaccggcaagccgctgctgatcatcgctgaggacgtcgacggcgaagcactgccgaccctgatcctgaacaacatccgtggcaccttcaagtcctgcgccgtcaaggccccgggctttggcgaccgtcgcaaggccatgctgcaggatatggccatcctgaccggtgctcaggttgtctccgacgaactgggcctgaagctcgagtccgtcgacacctccgtgctcggccacgccaagaaggtcatcgtctccaaggacgagaccaccatcgttcagggcgctggctccaaggaagacatcgacgctcgcgtggcccagatccgcgctgagatcgagaacaccgactccgattacgaccgtgagaagctgcaggagcgtctggccaagctggccggcggcgtggctgtcatcaaggtcggcgctgccaccgaggttgaggccaaggagcgcaagcaccgcatcgaagatgccgtgcgtaacgccaaggccgccatcgaggaaggcctgctgcccggcggtggcgtggccctcgttcaggctgctgccaaagccgagaaggccgaggccgtcgcctccctgaccggcgaagaggctaccggtgccgccatcgtgttccgcgccatcgaagccccgatcaagcagatcgccgagaacgccggcgtgtccggtgacgtggtcatcaacaccgtccgctccctgcctgatggcgaaggcttcaacgccgccaccgacacctacgaagacctgctggccgccggtgtgaccgacccggtcaaggtgacccgctccgctctgcagaacgccgcctccatcgctggtctgttcctgaccaccgaggccgtcgttgccaacaagccggagccgaagcctgctgccccggccgccggtgccgacatgggctactgatccgcaagcgatcgctagctgattgagctgaaaggggactccttcgggagtccccttttttgtattctggctcccctctttgaggggagctgtcgaacgcagtgagactaaggggagctgcggtgtagggatactccctcagtttcgcttcgcgatcgagctcccctcagggaggagagccaagaaactagctggcgaacaggcgcgaagcttggatttcggcgtcagcatacacggtggaggcttgcgtcagcgagcgttggatggactcgagtgaggcctccatctgctgttgggccgcacgccactgttcggctaccgcggtgaactgggtggccgccgaacctcgccatgcgtcctgcaaggcattgagattggtgtacatgccgcccacggcctgcctgatctgcgagatcgaagtggccactgcggccgaggatgattggattcgctcggaatctacctgatattggggcatcgttgctccttttctagagggttaatggtatgtatggcggccgcttgccaataccggccgctaaggtggaggatatgtcaacaacgaatcgggaagacggaaaaacaactattgtggtcctatcttcggagccgtcctgttcggccttcgggaatatggtccgaaaatggcttgtttgtgccatttgcgcccttgctgcagtagcgatgaacgcaatgtggataaccgcaaatgcctatggggataactcgggcgacagctctgacagctccagcagcagcaccgacagcggcgtgaccatcaccgagaacatcacggatacggaaaatctcctgggctcccatgcggccgaagtcgcggatgccatcgccaaaaccgagaaggaaaccggtgtacacgtgcatctgctgtatctttccagtttcaatagtcaacagaaaccggaagactgggcggcaaccgtgatggagtccatgaatcccaagccgaacacagtgatgcttgccgtggcctcgaatgacggcaacctggtggtcgtcgtgtccaagaactccgataagtggcttctcgataacaaaaccgtcgataagctatccgaagccgcacagcagccgttactggaaaacccgccgagctggtctggcgcggcaacggcaatgatggatcaaatcgtgaaatccaaaaaagcctccacctcatcatccacggtgaccgtaggcataatcatcatgggtgtggtgttggtggcgctggtcatcatcatcgtggtcatggtggtgattcgtcggcgcaaggagatcaagaaggattccaaggccgaactccaagatgacattcaggaaacgcccagaagagcgcgacactctaggaagcatgagtaagcctattgaagcatcgattgttgttgtcgacgacgagccgtccatccgagaactgctggtcgcttccctacacttcgccggattcgaggtaaacaccgccgcttccggttccgaagccattgaggttatcgaaaaagtgcagcctgatctcatcgtgttggacgtcatgctgcctgacatcgatggatttaccgtcacccgccgcatccgccaggaaggcattaacgcccctgtgctgttcctcaccgctcgtgacgacacccaagacaagatcatgggcctgaccgtcggcggtgacgattacgtcaccaagccgttcagcctcgaggaagtcgtggctcgcatccgcgccattctgcgccgtacccgcgaacaggtggaagacgacccgattattcgcgtcgccgacttggaaatcaacgaggactcccacgatgtgacccgtgcagggcagccggttgacctgagccccaccgaatacaagctgcttcgctacctgatggacaatgagggccgagtactgtccaaggcacagattctcgaccatgtctggcaatacgactggggcggcgacgcagccatcgtcgaatcgtacatctcctacctgcgcaagaaagtcgacggcatcgaggtcgacgacggcgaaggcggcaagcgcaaggtgactccgctgatcgaaaccaagcgcggtatcggatacatgattcgagaaccgaagaactagtcgccccatccataacgcatcgcaatctcatgagtatccccgataagcagtcaggcggcgtaccgccgagcagcacgccgaacgccgccccgaacacgaatcccatgcctgcaatgccgccgttcgccgcccatttccaagagcggcgcgagcgtaagaaaaacatactgatgcggcatatcgaccgtatctcgttgagcagcaagctggtggcctgcaccatcgccgtgctgcttatcggcgtgtcggtgatttccttctccatccgcgcgttggtgaacaactacatgctgcagaaaaccgacacccagttaagctcgcaaagccagctggtggtcaacaatatcgatctgctgtcaaaaaatgactcatcggggccgaactcgtactttctgcagattcaatataccgacggcaccaaagacaaagagggcaatcctctggtcgtgaccccgctgatgccgcagatgcaggacggtatcgtatcggtgccgattcttcctacctatggtgataccagtggcatcacgctcggccaggcattcactacgcaggcagtggccaagcagatcatcacggtgcagtccgacagtgcggacagccagaacgatccggccaacggaaactccaattcctctgacaccatcgccaaggtactggccaaccccactgtcaatgccaaccatgccgccatcgtcacggcgagggcaccatggcgtattctgccggtgaccttccagcaaaacggcaaggaccgtgccgtggtgtacatcggcttgtcgctggccgaccagatcgacaccgtcaacacactcacccgatactgcattgtggtcggcatcgccgtggtgctgctcggcggctccctgtccacgctgatcatccagcacacgatgacgccgctgaagcgcatcgagaaaaccgctgcaaagattgccgccggcgacctgagccaacgtattccttccgcgccggaaaacaccgaggtcggctccctggccgcatcgctgaactccatgctcacccgaatagaatccagtttccatgaacaggaggagaccaccgacaagatgaaacggttcgtctccgacgccagccatgagctgcgcaccccgttggccgccatccatggctatgcggagctgtataagatgcagcgcgatatgcctggtgccttggagcgtgcggacgagtccatcgaacatatcgaacggtccagccagcgcatgactgttcttgttgaggatctgctgtctttggcccgtctcgatgaggggcgcggcatcgatgtgaccggcacggtgaaactctcgtcgttggtcaccgacgccgtcgacgacttgcatgcgctcgacccggaccgtgccgttcgccgcatgcagatttccctcgaaccggcgcgcgatttgaaccatcccgccgaattcaaccttgccgaaggcgattggcccgaggtcgtgctgcccggcgacgcctctcgactgcgccaggtggtgaccaacatcgtgggcaacatccaccgctacacgcctgccgattcgcctgccgaggccgcgctcggtgtgatgccggccgccatcgatccaagacagctcgctcgcatgcccgccagcgacgcatcaatgcggcggttcatcgacgccgccgaagtaggtgcctcgatgcagaccggctatcgatacgccgtattgcgtttcgtggaccatggccccggcgtgccgcctgaatcgcgctcgaagattttcgaacgcttctacaccgcggacccatcccgtgcccgcgaaaagggtggtaccggtttgggcatggccatcgcgcaatccgtggtcaaagcacatcacggctttatctgcgccaccggcaccgatgggggaggcctgaccttcaccgtggtgctgccgattgagcagatcgtcgctcctgagcccaagcggcccaccggcaaaaccaaggacgccaaacagaagacttcttggttcagctctgagcgtaagactcaggcgactcagcccaaagcgtgaggtcaagccctgtgaggtaaactgtaccttcggtttactatttccattgaggattaaggaaggttcgcaatgcccaccggtcgagttcgttggtttgacgcagccaagggttatggcttcatcaccagtgaggaaggcaaggacgtgttcctgccggctcaggccctacccactggcgccaccacgttgcgcaagggggccaaggtggagtattccgtggtggacggccgtcgtgggccgcaggccatggatgttcgcctgatcgcctccactcccagcttggtcaaggccacccgcccgaaggcggatgacatggccgccatctgcgaggaccttatcaagatgcttgatgcggccggcaatacgttgcgccgtcaccgttacccatctgctgccgacagcaaaaagctggccacgttgctgcgtgcggtggcggatcaattcgatgtacaggactgatctgatctatgactgataccaccgaaaccatcgtgacaccggaccctcacgccatcgcgcgcgccgtgctgctcgaagtggccgacgagagcgatcaggtgggggatttcgttacctcatatgatcttgaggatcacgtcactgacttccgcttcgccgcgaatatccgtggctacgaaggatggcaatggtcggtgacgctgtatcacgacgaggagatcgactcctggaccgtcaacgaatcctccttgatccccactgagggcgcgttgatgccgcccaagtggattccttggaaagatcgccttgagcccacagatctggctcccaccgattcgatcggtaccgatccggatgacgagcgcatcgaggaaggcgaagtcgaggaatcctcgctgcaggatgtcaacgatgccgtcgagaccttccgactgacccgccgtcacgtgctgacctcgttgggtcgtgcgcaggctgccaagcgctggtatgaaggtccgcgaggccccaaagcgttgagcaccaaaaccgccgaaggcaacctgtgctccacctgtggtttcttcgtgccgctcgcgggcgaactcgaccgtatgttcggcgtgtgcgccaacaagtggagtccggatgacggccgcgtggtctccctggaccacggctgcggtgagcattccgaaatcgaacctcccgagccaagccagctgtgggtgcagtccaagccagcctttgacgatctgcatatcgacgtggttgccaaccgtccgtgcaagcaggagcaggttgcccaggacgaggccgaaggcgaaaccgacaagacaggcgagcctgccggtgatgatatcgaagcacagaagactgttgacgggaacgccgtcgatactgagcccgctgaggaggcggcaggcgacgggacctcgcaatcccagtctgccggtgatgagtctgttgcacagaacgcatccgattccgttgtggatgttgatgcagctgattccagcgacgagtccaagtctgatgctgacgacgaggccaccgaagaggacatcctcaacaacaccgttgccgatgatgatgaggatgatgagatggacgacgaagaggataacgttcgtccttcagacgatgtgactcctgaactcgaaaccgtcatcgatctcattgagcagctgcgccagaacagggcggacgaggaataa

SEQ ID NO: 891 - DNA, 10342 bp, Unknown
  R14_18m  MAG No. k141_22132
cgctcgcccgaactgttcatgttggatgacaagcacgagaacgacgagcatacgtggaaggtgcgtcagattatcgatgattccgatggcgaccacgactgggccatcgaaggcatcgtggaccttgacgccacccaagacaccggcgaagtagtcttccacgactacaaggtgagtaactgattcctggctcccctctctgagggaagccaaggtgcagctcgaacgtctgttcgaacactggggtactataggacgttatgagtgagaacgatttgtttggggcggctgatgcgccggagtcgatgacacggccgttggcggtgcgcatgcgtccacgcactttggacgaggtgattggccaaacgcaggtgttgggccagggctcgccgctgcgccgcctcgccaatccggccagcaaaggcagtctcaccgcgccgagctccgtaatcctgttcggccctccaggcgtcggcaagaccacgctcgccaccatcgtggccggccaatccggccgcgtgtttgaggaactctccgccgtgacctccggcgtcaaagacgtgcgcgacgtactcacccgcgctcacgaacggctcgtgtcacgcggccgggaaaccgtactgttcatcgacgaggtgcatcgcttctccaaatcccagcaggatgcgctgcttcccgccgtcgaaaaccgcgacgtgacctttatcggcgccaccaccgagaacccgagcttttccatcatcaaaccgttgctctcccgttcggtggtcgtcaagcttgagtcattggagcctgatcagctcaccgaactggtgcagcgcgcgctgactgatgaccgcggtctcaagggcgaggtcaaagccacggacgaagccatcgccgatatcgtgcgcatggccggtggcgacgcacgcaagagtctcacgattctggaggccgcggctggcgcggtcaccggcgacgaagcccgcaaaaagggcgcacgccgacccatcatcacccccgaaatcgtggctacggtaatggacaccgccaccgtgcgctacgacaaagacggcgatgaccattacgacgtgatttccgcattcatcaaatccatgcggggctccgatccggatgccgccatccattatctggcgcgcatgctgaaagcgggtgaagatccgcgcttcatcgcccgtcgcatcatgattgccgccagcgaggaagtcggcatggccgccccgcagattttgcaggtcaccgtggccgcggcgcaggccgtggcgctggtcggcatgcccgaggcacgtattattttggccgaagccacgattgccgtggccaccgcgcccaaatcaaatgccagctataacgccattaaccaggcactcgcggacgtggatgccggcaagatcggcgctgttccgctgtatttgaggaacgcccccaccaagcttatgaaagagtggggcaaccacgagggctacaagtatgcgcacgattggcccggtgccgtggcgccacaggaatatatgcccgaagagctgcgtggcaccgagtactaccatcccaacgatcgcggctatgaacacgaagtcagccagcgtcttgccaagattcgcccgatactgcacggtgacgaatccgggcgggaggcgtcgcgggccgcggactgacggtcttaggcgcgccggcgtgaggcgcgaatgcggaacgcggtggccagacagcaccagccaatcaggcagataaccgtcatcgtggcaaacgtccatgtgccgccgacggcagtggcgtgagcaaactcagcggtgccttcttctcctgcgccggcctgagccacggaaagaatcgtggagaacagtgcggtaccggcagcgccgccaaactgaagacacgtgttgaaaatggcgttgccgtccggcttgaactcgggagagacctccgacaggccactggtcatcacattcgcattgccgatggaatagaacagaccgaaaatgaaatagaatccggcgagcagcacgggcgtaagctgcatcgagaacaccagcataagcactgggcccaaaatagcgatgccgatcggaatcagaatcggcttgaccgcgccgaacttatcgtagaaccagccgccaagcggggcacagacagcgccgaccagtgctccgggcagcaccagagagccggccacaaatgccgtggtgccgagcgagagctgtgccacattggtgatgacatagccgtagccgatggcgaccaatggcagcagcagatatgcgcaggcgtgtaacagtacggcgggatccttgagaatgccaaggcgcagcagcggggagaaggcacgcttggaactcatggcgaacacgatcaacaaggcgaggcccacaatcagactgacaatggcgataatgccggagcgtgtggctgacttgccggacaccgccgcactgatggccacgccaccttggttgagcgccagcaccagaccgaccaacgcgacaacaatggacccaagctgaatcgggtcaagataggcagcctcggtcggtgtcttctgctcaatgcacttcatgccgatgcatgctgcgattagcaccagcggaatggcgatgacgaaaatcgcgcgccacggcagcactgtggtcaccgcgccgccgacggtcgggccgatggccggagccacggtaatgaccagcgatcctacgcccatcaatcggccgatcttcgaacgaggagactgctccagaatgatgttgatcatcaacggcgtggccacgcctgagccaatgccctgaataatgcgggcgacaatcagcagcgggaaggcttgggcgacgatcatgatcagcgagccaacgatggccagaatcacagccgcaagaaaaatggttttcagtgcgaatcggcgcttcaaaaacgagctgatgggcatggtagcggccaccgccaacagataaatcgtggtaatccattgcacagtggccgtgtcgacatggaattcgcgcatcagtgcggggaaaagcacggtcatcacggtttcggtcagaatgccaatgaaggcaagtgagccgacagccacaatcgcgccgataagacgtgtgggaatcttctcgttatcaatatgctgctcaggcatacatgctcctaaacgttcggttgcaatgtatggaatgtaaggtttaccaaccggcgtaggtacctgtgcgtgcggataaaccggcaatcgtactgccttggctgcacgctatggaatcacaaaaccacctgtgagtgtacggttcggggcggacgctacggtcgatgcgcaatgggctgtcccttggtttggtggggtttgatggggcgggttcggcattggtccggcggggcgggttcggcattggttcagcatgaggaaacacgcgataatatccgccctgccgcctagtttggtgaaccatgggtattgagaacacgcataagctgattgtcaactgcctgccactcaacgaaggagaacggcgcgctttcgccaaggcggcccgcgatgtgccgcaggaattcgtgggcgacgaagcgcaccgcggcgacatggtctggtcggccgctgttcccgaggagcttcgctcccgagctaccgcagtcatcggcaactttccggtctcgcaggcttcccaatacacccgtcttgaatggttgcagaccttcagcgccggtgtggatgcgtacatccgcccgggtgtgctgcctcgcggcaccatggtcaccaatgcgagcggcgcgtatggccaaagcgtgtcggaacacatgttcgccaccatgtgggcattgatgaagaacctcaaccggtatgcctccaatcagcgtgatcatcagtggcaggatgaaggcccggtattgagcccggaaggtggcatcgcgctgattatcggcgtcggcgacatcgggtcgcatttcgctcagcttgcccaatccgtaggtatgcgtaccttcggcgtgcgccgtcatgcggacgtgccggccaagggcattgaaaagatgtatggcttcgagcggctggaagcactgctgccattggcggacgtggtggcgatggcggtgccgcgctcgccgcagacccatcatctgctgaatgcggatcgtctgggtcgtctgaaatccacagccatcgtgatcaatgccgggcgtggcgacgccatcgatcccgaggccttggccgacgccttgcacaatggacggctccacggtgccggattggacgtcactgagcctgagccgttgccggcggaaagtccgttgtgggatgagccgcattgcctgatcaccccgcatgtggccggcggcaatcatttggaaaagacttccgaacacatcatccgcatcgccctgaccaacgtttcccgctatgccaaacagcaggaactgttgaatctcgtgcgatactgattcgcctgtatcgggtgtacatgaactcatgtacacggccggcgtgtcgcatcccgctacgactgcggcatcgagatgatacctgcagaggcgtggttgatcagaggcccaatgaacgtggcccgaggtcagtctcagtctgatagttcgtagccgttggcgtctttatgccacggcgagccgggcttgctgcacagaatgatgatgccttcaacaaagccccagatggcggctgcgattgggccaagtccgagcagaatccagccgacaagcgtcagcagcagctgggccacggccttgccagtgttgccgagatagaagttgtgcacaccaagtccgccgaggaagatgcccaacaggccggcagccaacttggacttggatgattgccacaccggggcggcggcatacggagcggcggtgtattgcggctgtgcgtaggcattcggctgctggtaggcctgtccatagccgggctgctggccgtagcccgctgcgggctgtgcgggctggccatactgcggctggccatactgcggctggccatactgcggctgagcgtactgagactgagcgtatgcgccggcgggctggccgtattgcggctgctgctggccgtagcttccggcggcgggttgagcgtatgcggtgggctgtggggcgccatagccctgcggctgccgtgcggcatcttggccgtacgacggctgtgccggctgtgcaggttgtgccggctgcggaacactgtccgaaccgtacggttgttgttgattatcagtcatgtgggtctatcccttctcaatcgggaacggcagtaccttcttaccgtttctgcacaacatcatctcacgttttgcctaatagtaaaacctgccgcgctacgattgggccatgaaaagtttcctgaccagctggttgattatgactatcgccgccgccgtcatggtcgcggtgactcccggcatgaccccggtgggggagcctccgattctcggcatcgccgcgttcgctttattcatggcgctgattaatgcgtcaatcaagccgattgtgcatctgatcgcactgccgtttgcgattctgtctctcgggctggtcaccttgattatcaattggctgttcatgcgactcgccagctggctggcggtcagtctgttcggcgtgggcgtcttcgtacacggtttctggtggtcggtactggggtccttggttctgaccattgttgcgggaatcgtcgggtccatcttggatcagtgacggtgctcgctgggcgaatatgaataatggcggttggaatcggactgattccaaccgccattactcatatcaagctacgggatcgagcagagcgaacgctactcgcgcaccaagcggatatgctccacatcgtcgcgccgggagcgacggaacagcacgaaacgattgccgatggactgcaccacttcggcgttcagctgctcggcaagctcggcggcggcttccttggcggtcaggccagaaccgtcctgcacggcgcacttgatgagctcgtgcttctcaatggtttcatcggcctgattgacggccgactcggtcaaatcgttcttgcccacatagaacaggggcttcagcgagtttgccatcgcgcgcagctgcttgatttgcttcttggtcaatgccatgggaatttccttacatctttcgtataaccacaccagcatagcaaccggtgctgtctgtgctgtttgccgccctacagcgcgatgatggcggcgatgtaggcgatgacggcgacggcgaacacgagatcttgcgcggcgatggtcagggcacgccagtgggtgcggcggatgctctcctcgtagcagcgggcgtcaagtgcgaggctcaggttgtccgcgtgacgcaacgtgccggcgaaaatcggcacgataatcgcgctcatcgccttgatgcgctgggccagcgaaccggtttcgatggaaccgccacgcgcggattgggcgtcgacgatggcacgggtctcgtcggtcagcgttggaatgaatcgcaatgccagactcatgaccaacgcgatctcctgggcgtggatgccgagccggttgagcgggctgatcagggtggcgaaggcgtcggtcatggcggtcggcgtggtggtggtgaggaacaccgcgcccaagatgatcaccaacgcgaaacggcaggcgtacagcacggctatggccacgccctgatcggtgatgctcagcgggcccagcgccaccaccggcgtgccggtgcgcaccacaaacagattgaccacgcccatcagcaccagcagaatcagaatcggatgaatggattcgagcacccgtaacgggttcaggcgtgccgccgcgataacggccagggtgatggcgatgcccagcgcaagctggaggggtgtgttcaccgcgaacatcgtgaacatggcggccaggaagcccaccatcttcacgcgcgggtcaagtcggtggatcaccgagtgcgcgggtttgtcaggggagacggactcggcggggaaggcagtctcggttgccgagatgctctcagcaccagccgcgccggcaatcggcatacgtaccacgcgatcggcgatatgcttggcctccgctcggtcatgggtgatgataagcacggtcacgccgcgcgatttgagcgtgcgcaacagctcatggatgcgctccttggcctggacgtccaggctcgcggtcggctcgtccatgatgagcacgtcaggattgcaggccagcacgccggcgatggccaccaatcgctgctgtccgccggacaggtcgaaaggggagcggtcggcaagatgcccgatatgcaacaggtccagtgattcgcgcacacggtcggccacctcggcctcggcgagcccctggttgcgcgggccgtacgccacgtcctcggccaccgtgtccgcgaacaactggtgctccggatgctgcatcacgtaacccacatgccggcgcaattgcgccaattgcctgcgattcgccggctccggccgtgcgttgctaccgcgtttgccggtcgaggccaccggaacgccggccacctcgatgctgccggcggtcggcgcggccagcgcgcacagcatgcgcaccagcgtcgacttgcccgaaccgttcacgcccatcagtgccacggtttcaccgcgcgcgatggtgaacgacaggtcatcgataaccgcccgtttggccgaaggatagcgataggtcagatgcgagacgcgaataatggggttcgtcatatcaccgatgccgtcggagagcagcggcagttcggagccgtcttcgcgcttccgctggcggggtctgtcgttcgtaggacgactgggggcggcttctgtgccgataccaccctcagtctcgctttgcgagacagcctccgctagcgggggtcgattatcggcggctgcagtgacaccaacgattcgcccggcctccatgtgcacgatgcgatcggcatgaacggtctcatccggatgatgcgtgacatgcacaatagtggtgccgcgcgcctgcaaatcatccaaaatgcgcataacttcggcgcgtgcggattcgtccagcatggcggtcggttcgtccaataccagcatcgccgggttcatggccagcatgccggcgatggcggcgcgctgctgctgtccgccgctcatacgggtcgggtcggactgacgcaagttcgccaaccccacggcctgcaatgaatcaacgatgcgctcgccgatgagcccgcgctccagcccgagattctccgggccaaaagccacgtcatcctccaacacggtggtgaccagctgatcctcgggattctgaaacaccataccgatgccgcggcgggcagcgcgataggcgttggcattcgggccggctgcgtacacgcgctgttccagtagcgtcacttcgccaccgtccggcgcggtcaatcccgcaattagacgggccaacgtggacttgcccgatccattcggaccgaccaagcataggcgctcgccggcatggaccgtgagcgaaacgccatccaaagcccatgaagtgccgcggtcatagctgaaacgaatgtccttgagtacggcggcggggggagcgggctcggcggaatcgtggaactcgtcggcgtcgaaggaatggggtgcaacggtcatgaaacagcaatccgtaactgataggcgaaaacgcagaatcccggcaagggccggagttctgcgttcttgttctttgagtggtcgttgagtggtcgttagtcgtggcgggcataggcccgtctcaggccggtcactgctgcttggacagcaggttggagaccggcttgtagatcaggaaggtgatcacggcgtgaatcgccatcttagccacgttgaacggcagcagaatcggcagaatcatcgcggccacagcctggtaggtcatgtgcgcgtaaatcggcgtgacgatgaggttgcccaccagcgccaccacgatggccagcaccgcacccaccagaatgccgatggcggcacccttgcgcgtacggatcttacggtagatgaacgcggccggcacagacaggaacagcgccaccagcacagccatcagcgaaccccacgggtcggcgaacatgtgcggcacaaagccgagcacagacacgattgcggcggcggccggaccgtacgcaaagccggcgatcaggcagacgatgccggacgggtcgtacttcagccaagtgaccggcgtaatcgggaattcaatgaagctggtgaccatcgccagcgccacgaacagtgcatacatggcgatacggcgcgtggaccagcggccggaatcggccacaccagtggtgtgcgagccgagtttggcgctggtgctggcggtggacgcgctggccgaaccctcggcctcgggcgccacagaacgaacaacttgcatgcggatacgcgaagatacgctcataatgagccctcgtttcttccatccggactataccgttggctccggaatctcaccggatcagccgcttgcgcgggtcgcgggcttcccgccatccccgttatgaaacccggggtacaggttaccgccagtaaggaattgcaccttccctgaaactgacaggcttattcatacgccatgcgccggacgtacgcaacccgcgtttcactgtgcagaaattcgtcttgtgccggtcaagtgcaacaatgggagccatggctgaagtgaagaaacccaacaacaccattgacaagcttgccctgatcgtcaccacctacaaacgtcagcagctgctcgaggtactgttcgattcgattctggcgcttgagcaggcaccgtggcgcattgtcatcgtggacaatgagcagtccgatcagacggcggacatggtcgctgcgtttgccggcaaggtgaccggccagtggggcaccaccgtggccgaccagtccggcaacgaagagcgcgtggtctatgcgccgcagaccgagaacatgggtggtgcgggcggtttctccgccggcgtggccaaggcgtatgatctgggcgccgcatggttctgggtgatggatgacgatgtggccgtgctgccggacgccattgccaagctgtccaagtggaccgacaagcacgaggtgattcagggatcccgattcgattacgatggcggcccgttctactggcagtacgacttcattgtgccgctgggcattccgaacccgatcgcgcccgccgcatttggcccggccgggtatcgagtgatggacacgctgtgcttcgaaggcggcctgttcaaccgccgtgtggtcacggaaatcggtctgccggacccgcgcttcttcatctactgggatgacacgatgtatggctaccgcgccagcaaggtcaccaacccgattgtggtgcccgacgtgatcctgcgccgtacgcgcgaaatcggcaattgggatatcgccggc

SEQ ID NO: 892 - DNA, 5691 bp, Unknown
  R14_18m  MAG No. k141_24131
aatgttcgagccaaccgccatctatgcccccaacccgcaccgttacgacacgatgacttacaaccacgccggcacctccggcctcaagctgccggccgtctcactcggcttctggcacaacttcggcgacatcacgccattcgaccagatgaagtccctggtcttcaccgccttcgacaacggcatcacccacttcgatctggccaacaactatggccccgaacccggccaggccgagaagaactgcggcctgctgctcgccaagtacttcaggcaccaccgcgacgaactcgtcatctccaccaaggccggctacgaaatgtgggccggcccctatggcgacctcggcagccgcaagtacctgctcgccagcctcgaccagtcgctcgaacgcctgggcctggattatgtggacatcttctaccatcaccacccggacccggaaaccccgcttgaggagacgatgggcgcgctggctcaggccgtgaactccggcaaggccctgtacgtgggtctgtccaactacgatggcccgacgatggagaaggccgccgcgatcctcaccgacctgcacgtgccgttcatcatcaaccagaacaagtacaacatcctcgatcgcaccgtggaaaagaacggtctgaaggagacggcttacaagcttggcaaaggccttatcaccttctgcccgctggctcagggcctgctgaccaaccgctatctgaacggcattccggccgacagccgcatggctcacgatccgcgattcctcaacgattccgccctgaccgagaaactgcacaagcaggtcgtggacctgaacaatctggccgccgaacgcggccagacgctggccgagatgagcctggcatggctgctgcacgatggtaaggtgacctccgtgctgaccggagcctccaagcctcagcagattctcgacaacatcggcgcgctgaagaacacccacttcagcgacgaggagctcaagctgatcgacgagatttcggctcggtgaccatttcggctcccttcgctgaggggagccaagtaccaccttcagcgcgtcatctcttcgtagatgcgcttgcaatcggggcaaaccgggtacttggacggatcgtgcttgggcacccagaccttgccgcacagggcgaccaccgggcgaccggtcgcgcgtgattcggcgatacggtccttagaaacataatgtgcgaatcgatccgcgtcgccgccatcgtcacgaaccggagactccttggtttccgggcgttccagcaccgacgtgccggcaccttggtccgggttgcgcagcggttcggcatcatcaacgaacatctcggcaaaagtcatggtgcacttctttcctcgtattcaacgattcgactgcactccatcatagattcccgtcgttacccgcgaaacccattggcgcgtaatccgcacacctccacacacccatgtcgcgcatcacgccaccccgccacatacaatgccacataacaatgccgcacacaacgccgcaccgacgccacatacggcaccgcacacactgcctcatacgccgacgcgacaacaatgcacgctcggcagcacgaagcacaccattcgcggtaggctataaggcatgactatcgcagtatgccccggctcgtatgaccccgttaccgccggacacttggatgtaatcgagcgctcggcacgattctttgacgaggtacacgtggtggtggccgtcaatgccgcgaaaacaccgatgttttccgaagccaccagagtcgacgtgatccgccgtgcccttgacaaagccggttgcaagaacgtcactgtttcttccaccgacggcctgatcaccgactactgcaagaaggtcggcgccaccgttatcgtcaagggtctgcgccagaacggcgactatgaagccgagctcggcatggcgctggtcaatcgcaagctcgccggcatcgaaaccctgtttttgccggccgatccgattcttgaacacatctccagttccatcgtcaaggacgtggcccgccatggaggcgacgtgaccggcatggtgcccgattgtgtcgtgccgatgctggccgatgccctggccgaggaacgtcagcggaaggactgatgcactaatgactatgagcgatgaccaccccactggatacgtcgatctgaccaaaccgaatgcggacgccgcatcgtccactccggagccgtccgccccggaaccgaccgcgtctacgcaagccgcgccggcacccaccgaagaggccgatgttctcgccggatcgccgcccgccgcgcctacccctactccggcacagatgcaggccaaagcgcaggcccaagcagctcagcagacccgggcacaagctcagaccgctcaggccgccggcactcgcccctcgttcatgaacgaaatgcccgacctgcgagaaaccacggacgacgacccggccacggtcaagagccgcgaggaattcaccacggtgtatgacatcatcgaccagctcgaggcggcactgggcgaagcgaagtccagcatattcgcccccggcatggtgaaggttgaccgcgacgaattcaccgaccagctttccgagttgaagaaaatgctgccggtgcagttggagcgcgcctccgccctcatgcgcgaggccgagcgccgtctggaatcggcacagacccagtccaacgccatcgtcgcctccgcacaaagccgcgcagccgacatgatcaaggacgccaacgaacaggcacagttcctggccggccaagagaacgtcaccgagcttgcacggcagaaagcgcgcgcgattcttgaccaggcacagaccagagccgaccatctgacccaaggcgcggaccagtactgcactacggtgatgaaagggctgtcccagcagctcggcaaactcagtcgggatgtgcaggccggtcttaacgtgctggaagagcgccagcgtgcggccggcgaacagatgccgcacctgacgctgaacgactatcccgaagcccagtaacgccagcagcaccagcaacatcagtaacgcgaataacgccagtaacgaataactccagccaacatacgaaaggcaccaagaacataccatggcacgagttgaagattccccgtgggccattccggtagcgcagattgcttcgcgcgccggtcaatccaagccgattgacgccgatttcccggccccttccggcattggcgacagcatcgtcggcatcaaggatggtgagcccgtacatgtgagcgggcagttcgattcgattgtggacggcctgatcttcaccggccgcctggtcgcgccattcgtcagcgagtgcacgcgctgcctgaagccgattgacgaggactggccggttgatgtgacggtgttcttcccgtatgagtcgggtcaggacaaggccaacggcaagggcggcaagaacaagaaggacgacgagatcgacatcatcgccggcgaggacgagtcggaagacacgtatccgctgcgggagaacggcgcattcgcggacatcgaggcgatgatccgcgacacgctggtcgaatcgctgccgttgcagccactgtgccgaccggattgcaagggcctgtgctcgcagtgcggtgccgatctgaacgaggatcccgaccatcatcacgatgtgacggatatccgttttgccggattggcggggctcaaagcccagctcgaggccgagcagaacggcgagcaggccgagtgacgcgcgcctgaacggagtttgtacgagctatgcgttaagataacggacgcttaagctcaattgttcgaacgaaatagaggatactcaaatggcactgcctaagtacaagacctcgcgcgccaacacgcactcgcgtcgcgcgaactggaaggccaccgctgctgcgaccgtgaactgcccgaactgtggcgctccggccctgccgcacatggcttgcccgagctgcggtaactaccgcggccgcacctaccgctccgccatccagccggctcacaccaagtgagtcctgcgataacggcttgaatgaaggccctgccatcgacgggtggcggggtcttcgcataagtgcaccattacgtacaccatcgcatcgcaaacaacacaacacaacacacaacacatcaccatcgcgtgaaggaccatacaacaatcatgagcaatgaaaccccacagcagccgacgccggccaacgagcttcttgaagcgttgggcaccactctcagcccggatctgctcgtgcaggcactcacccaccgctccttctcgcatgagcaccccggcgtggccaattacgaacgcctcgaattcctgggagacgcggtgctcgaactggtctccactgaaacgctgttcaccattcacccggatatgaccgaggggcaactggccaagatgcgcgccaaggccgtctccgaagacgcgctgagcgccatcgccaaaaccaagctcaaggtgggcccctacattctgctgggtcacggggaaaccgagcagggcggcgcggagaagaactccattctgtgcgacatcgtggaatcgctcatcggcgcgaccttcctggaacacggcatcgacgaggcacgcaaggtgattcaccggcttattgacgacacgctcgccgaagtggccaccgagggcccggcacttgactggaagacctcgctgaccgtcaaggcgcacggcctcggcaaggatgagccggtctaccatatggaggtctccggcccggagtacgcgcagatcttcaccgcgcgcgtctcattgggcgagaacggcgacatcatcggcatcggtaagggctccagcaagcgtaaggcgcagctggcggccgccgaagcgggctggaagtcactggactcgctcaagacgcggactaagtaagcccgctgtcagatttgcgaatagactgataccaacatgagcgacgagtcgtgccggggccacaagtctcggagaagcgactggaatcagacacgcgggcacccggccccatcccaaggtcgggcaggttcgcggcaaaatctatgaggtgagaggaatcatggctttacccacgcctttgcaggcattcagcggcgtgccgaaaatcaacgcggcccccgataagcagaccatcgtcgatggcgagaagatgactggcgcccaagcgctggtgcgttcgctggaggatctcggcgtcgaggacgtcttcggcattcctggcggcgcgattctgcccgtctaccacgagatcaaagacaacacgaagttccgcttcgtgcttatgcgccacgagcaggccgccggccacgccgccgaaggctacgcactggccactggcaaggtgggcgtgtgcatcgtgacttccggcccgggtgccacgaacgtggtcacggccattgcggacgcgaatatggactccgtgcccatggtcgtgattaccggtcaggtgggcgtgcaggccatcggcactgacgccttccaggaggcggatatcgtgggcatcacctacccggtgtccaagcactccttcctcgtgacccgcgcgcaggacattcctcgcgtgctttccgaggcgtactacatcgccaacaccggccgccccggcccggtggtcgtggatctgaccaagaccgcacagaccggcgacatgtactattcatggccgcagcgcatgattctgcccggctacaa

SEQ ID NO: 893 - DNA, 7945 bp, Unknown
  R14_18m  MAG No. k141_25675
gtgctgcgagatcatggacgacgatggccggatgatgaggacccccgacctgacccggttcgcccaggagcatcagatcccgctcctgaccatcaaggaactgcaggaatacaggaaagcgcacgatacgctcgtcgaatgtgtctcgaccgtggcgatgcccacgcgatacggggaattcacggcgcactgctatgtgaacaggttgaacggcgagcatcatgtcgcgctggtcatggggaatctgggcgatgggaccgatgtgttgtgccgggtgcattcggaatgtctgaccggtgacgtcttcggctcgttgcgttgcgattgcggtcagcagttggacgcggcgatgcggacgatcgcggagcatggctcgggcgtgctgctgtacatgcgtcaggaagggcggggcatcggtctggtcaacaagctgaaggcctaccgtctgcaggacgagggcatggacacgctcgacgccaatctcgcgttgggattccccggtgacgcgagggagtactacatcggagcgcagattctcagggatctggggatacggtctatgctcctgctgaccaacaatcccgacaaagtgtatcaattggaagactatggaatggagatccgcgacagaataccaatcgaaatcgaagccaatgcttacgacagtttctatctcaaaaccaagaaaaaccgcatgggacatatcctgaacatggaggaggaataaatgcacacgttcgaaggcgatctggtagccgaaaacatcacgataggcatcgttgtggcgaggttcaacgagttcatcacctcaaaactgctggcaggggcgctggacaccctgaaaagggagaatgtccgcgaacaggacatagcggtggcctgggtgccgggcgcctttgagatacccctgatcgcgtcgaagatggccaagagcaagcgctacgatgcgatcatctgcctgggcgcggtcattcggggcagcaccagccactacgattacgtgtgcaacgaggtctcgaagggaatcgcgcagaccagcctcgacaccggtgtgccggtgctgttcggcgtgctgacgacggattccatcgaacaggcgatcgaacgggccggcaccaaagcggggaacaagggttccgagtgcgcgcagggcgcgatcgaaatggtgaatctgatccgctccatggacctctgacggcgaaccacccggctgcgggcgggggtcttccagacgttcccgcccgcttcgcgccacacggccaaggcccgatcgatcgccgcgcccgctaccgcagggtgagcgttgcggccaaagccagatggtcggtgtccggcacttcgaaggacgtcacgccggacggtctgagcccttgggtgaacagaatatggtccagttcgatgcgcggccacttgagccagcgcgggaaggtgagattcgggccggcggcttgaatcagacttgcgtccttgaatccggacttgagcaacgcgcggaagctcgggtggtcggtgctcgagttgagatcgcccataacgacgacgatgttgcgattgctgacggattttgcacgggcgagttctcgcagacccagaatgccggccgaccaatccgcgcagccgcgcatcggcgatttcgggtgagccgaacaaagcgtcaccgtgcgagtaccggaggttttgagggtgatggcgggaacgtcggcggcagggatggagaccacgttgggcaccgctgcgctcggctcgtagcgggaatagatcacgttgaatccgccattatcggtctctttggcgtctccgaactgatggtaggggaggagttcgttgatgtcggcttcggtaagacgtgtgatgaggtcgtcggtgacttcctgcaaggccaatacgctgatattgcgttcgcgaatattgcgaatgatttcagcggcgtcggcgcgtccgtatcgacaattcatcgtcataaccgagaactggggcgagagtgtttcacgcaccgtttcacggtgcccatcggggactgtttcgggtccttccttcggagtgtttgaggtgctcgatgtattgctgttatggctttttgacagcgtcggcgaagttgtttcacgggctgtttcacggtgggattctctgcgtttgccggctgggtcgattgacgtaccccagtagttgatgcgctgtgagctggcaatcagcgcgaccacaataagcgacgacatcgcagtccattcatgttgccatgcggcgaccgcggccagaatcatcaaaggaacccacagcagcggagtcagggcaatcatgtacggaagcggcatacgggcctcgagaccggcgggcagcgcgcttaaggccgtccataacagtgcgatgattgccaccgcgctgaagattgtcgtcatggaagttcctttcgaaatataaattgaaccgagatataacttggctcccctctgcgaggggagccaagttgtgagatcagcggccgaacagtccgccaaggcctccgccgaggttcggcggcagttcagtgccaccatcgacgttgcccatcatctgttcaaggccggcgggcaggggcgggttctgcggcttcttggcgaaggcggaaccgccggtcgaaccggaggatttgccggccagcttgtcgcgcaatgccttctcctcggcctcgcgcttcatcggattgccggatttgccgcctttcttcttgttcttgcccttcttcttgccgccgcccatagccgggccgccgaagccggggatgccgccgcccatgccgccacgattggacatgcgcttcatcatcttcgcggcctgctcgaaacgctgcagcaaagcgttcacctgagaaaccgtcacgccggaaccataggcgatacgggcgcggcgggaaccattgataatcgacggatcgcggcgctcggccggggtcatcgagcgaatgatcgcctcggtgcggtcgatttccttctcatcgaactgctcgagttccttgcggtgctgggccatgcccggaatcatgccgagcagcgacttcatcgagcccagcttgcgtacctgctgcagctgatcgaggaagtcgtccaggccgaaggagccttcggagattttctcggcggccttgcgggcctcttcctcatcgaactgcttctgcgcctgctcgatgagcgtcatgatgtcgcccatgtcgaggatgcgcgaggccatgcggtccgggtggaagacctcgaaatccttcaggccctcaccgttggaggcgaacaggatcggcttgccggtcacggacgccacggacaacgcggcaccaccgcgggcgtcgccatcgagcttggacagcaccacgccggtgaagtccacgccctcatcgaacgccttggcggtcttgacggcgtcctggccgatcatcgcgtcgatgacgaacaggatttcgttggggtgcacggcatcgcgaatgtcgcgggcctgcttcatcagctcctcgtccacgcccagacgaccggcggtatcgatgatcaccgtgtcgtagagcttctgcttggcgagttcgatggaatcgcgggccaccttcaccgggtcgccggagatctggcccggagctgcgacggcctcgccgccatcggattggacgcccttttcgggagcatagacgggcacgccggcgcgttcgccgaccacctgcagctgcgtcaccgcgttcggacgctgcaaatcggccgccaccagcagcggcgtgtggccggaatccttgagccagtagccgagcttgccggccagcgtggtcttaccggcaccctgaaggccggcgagcatgatgatcgtcggcgggttcttcgcgaagttcagcggacgatcgaccccttggccgagcacgtcggtgagctcctcgttgacgatcttcaccacctgttgggcggggttgagcgcgtcggacacctcggtgcccagtgcgcgctcacgcaccttgccggtgaaggaacgcaccacgtcgagcgccacgtcggcgtcgagcagcgcgcggcggatttcacggatcgtaccgtcgatatccgcctcggaaagcttgcccttgctcttcagatgcttgaacgcattcgagagtctgtctgtcaaagatgaaaaagctgccataatgggcaacagtctagccgccacgcgggaaattgcggtgttggggacgactctttccggggattgcgtcgcggagtagtcagggatgttgggcattcagacggcaaatgccgtgccgtccgctcgtggcgaagccaatcgagtgcttccgataccatggaaaccgtaaagaatcctgtgttttttggaatgcttacgctgttttgaaaatcgctggacaccgcttatacgcagactgccgtgcgctccgaaccatgacgttcgggccaacgcagacatgccgtgcaataaggaaggcccactgatgcccacccaaaaactactcgaacgcaaagccctaatcgttggtatcgtcatcaacgtgttgcaggtcttagccggcatggccgtgttcttcatgaccggcctcaaggccatgttcctcgacttctccttcaccgcgatttccgtcctgtccggaatggtggcggtgtacctctcgtcgcgcacggtgcgaaccaccgagcgcttccccaatggcatgttcgcactggaacccatctacgcgatctgcaaggccattttcaccatgtcgttgttggtgtattcgctgattgacgtgtgccgagtagcgtacgactacttcgtgttcgggtccggcgaacgcattgaaaccggcccggtggtcatctacgagatcctgaccgtaatagtgtgcttcagcctatacatgtattaccggcgctccaaccgctccatcggcgattccagcaccatgctcaccgccgagtgcaagagcacgttggtcgacggatcaatgtcgttcggcatcggcgtggttgccatcttcctgatgctgctaccggccggcggtccgcttgacttcctgcactacaccggcgatttcttcatcaccgtggctttggtggcattgaccatcaaggaaccgttcagcgtgctcaaagaggcgttcgtggaattggtcggcggcgtgcatgacgacgatgagaccaacgcctacgtggaggccgaggcacagcgccatctgcctgccaacaccgactacgagcagacgctgatcttcaagaccggcatgaactacaccgttgacgtgtatctgagcggcatcggcgaaaccattgatgtagccgacctcatcgaatgcaagcgctcgctggagaaggagctcatcaagcgcctgcacatcgtggacgtggacttcgtgtttgactgattgatgggtttgaagcggctacttcaggctccaagtggaaccctgcgggccgtcttcgatggcgatgccggcctcggtcagggcgtcgcgaatctggtcggccttggcgaagtccttggccttgcgggcctcggcgcgggcgttgagctgctcggcaatcagtgcctccagcgccgcatgttcgggcgactcggccgtgccatcagcggcaccgccagcagacacccacggctcggccagcgggtcgagacccaaggtgtcgagcatggcacgcacggcgagcagcgcctcacgcacctcggccttggcggtttcggaatcggcgcggtcagccagctgtgaaagcaacgtattgccggaacggatggcggtgaagatcgcggcggttgcaccagacacattgacgtcgtcattcatggcggccacgaaatcggcgggcaggtcgtcggcggagacggcagcaacctcctcgcgagaaggctgaccgcctagtgccacaccggcgcgctcgatgaagttcgagatacggtcgtatgcggcctgcgcctcgaccagcgcctgatcggaccattcgagcatcgaccggtactgcacggagcccaaagcgtaacgcaccacccaagcggaatgctcggccagcacgctcggcacggacaggccggtgcccagcgacttcgacatcttctcgcccttggcggtcacccatgccgaatgcatccagcgcgcagcagaggggtagccggccgcgcaagtctgcgccatctcgttctcatggtgggggaagcgcagatccaaaccgccgccgtgaatgtcgaagccatcgcccaggtaacggtgggacatggcggagcattcgatgtgccagccagggcgacccacgccgaacggcgtcgaccaacgggcgtcctcgggatcggtgtccttgggggccttccacagggcgaaatcacgcgggtcgtgcttgtcgggggaggcgtcggccgggtcgaccggattgtacttgtcggcaccggtggcgtccacggacgggcccatgcggtcggccacggcggcggcctcatcgacttcggaggtctgcttctggtgggtgagttcgccgtaatgcggccaggatgccacatcgaagtacacgttgccggtgggcttgccgtccgcatccgtgaccacatagccgtggccgttgtcgagaatgcgctgaatcaggtcgatcatgtccgacatgtggccggtggcgcgaggttccacggtgggcggcagcacgccgagcgtgttgtacgcctcggtgaattcgcgctcgtaataataggcgcgggcccaccaacgctggccggcggccgcggccttatcgaggatcttgtcgtcgatatcggtcacattacgcacaaaagtgactttgtagccgagcttcaaaaaccagcggcgcacgatgtcgaacgccacggcggcacggatatggccgatatgcggtgacgactgcacggtggcgccacacacataaatgccgacttcgcccggcttgagcggcacgaaatggctgacctggtgcgaggcggtgtcatacagattcaggccttctgcggccttggcaacatgcaccggcgtcaggcttgaaggcatgacggaaatgttgaaatcctgcggttcttggctgtttcccataacgctcaagcgtagggtccgaaccagacatgctgaattgttactcgaagagcttggtgaacgcttcacaggcggggcccgaacgaggtgacagacggatgagaagcgggacaacagtctcgcgagaacacgtctttgaccgctgcggaaactgcgagattcatggatttgccctgctcgttacgcaaacggggaacgctcgtgccacaatagaagtcatggccacaccacaagtgctcattttgcaacatgtcccatgggaacgcccgggacgcatattgtcgaacctcgaagacatcggtcttgagacggtgacgatgaatatcgtcgacaaaaagaaaccggacttgcctgatttcggcgaactggctggcgtggtaatcatgggtgggcctatgggcgcgcttgattacgacaagtatccggggctgaaggcggaagccaagttggcgcgtgccgccgtggcttcaggcaagccgattctcggtgtatgcctggggcatcagattatcgccactgcgcttggtgcgcagctgcgcaagggcgatgcgccggagattgggttcgcgccgatcaagcgtgtggacaagcatgacttcttctccatgtgggataagcagctgacggtgctgcactggcataacgacgtggtgggcttgcccgagggaggccagctgctggcacgttcgtcttccaccaaggtgcaggcattccgactgggatccgcgctgggcatgcagttccatcttgaggtgtgcggctcgctgctggacgaatggctggatgagccgagcatggtcaaggatctcaaggccgcgggtgggtccaagtcccaattgcgcgagcagttcgcccaatacgatcagctactgcatccgctcgccgagcaagtgttctccggttttgcggcccgctgcaactcctacgctcagacgctgggcaaataac

SEQ ID NO: 894 - DNA, 33153 bp, Unknown
  R14_18m  MAG No. k141_25904
ggttttcatccacacgttatccacaacacgccaaaccgcgtcatagtatccacatttgccggttgcgcttgtgctcttacataagtaacccgcacagtggaatcatgaacgctttaccacctacccagccgacgacgaagtccggcatcgacgccggtcttgcctttcaccagcccatgctggcttcacctgatccgcaggcaacgctgccttcggaacggattgcggccacgatgggcgaccgcaatctgacgcccaaacagttcggtgcgctcggcgagcagtatgccgccgcgtggctggaggaacacggttggacgaccttgagccgcaattggcatacccgttacggcgaattggacatcgtgatgctcaatcccgagtacacggtggtgttcgtcgaagtgaaatcacgccggtccatgcattacggatatccgcaagaggccatcacgccggcgaaacagcacaatctcaggaaagccgcctgcgattggctgcttgaccggcgtaatcgtgtgccgcatacggcagtccgtttcgatgtcgtcaccatcgtgcttcgggtgggcagaccgctcgtgcatcacatcgaaaacgccttctgaattcgtcccccaaaaaacagccacgttgcgaaacacattgcgaaaggagtagacatggctatcggcagcactctctcattcggactgatcggccttaaggccttcatcgtccaagtgcaggctttcatcagccctggcttgccatacttcagcatcatcggattgccggatgcatcgttgtccgaagcccgcgagcgcgtgaaatcggcgtgtcaagccactggattcggttggccgcacacccgcgtgaccgtgaacatgagccctgcggccatgcccaaacgtggttcgtcgcatgatctggccatcgcggccagcgtcctatgcgcggcgggtgccatagggcatgattgcttggaagataccattgtgctcggcgaagtgaatcttgacggctcggtgctgccgattcatgggctgctcccgatcatgctgcatgccgaggaacgtggcgtgcgcaaaatgattgttccccatcgcaatcttgacgaggcttcaatggtggatggactggatgtagtgggcgtgaggcatgtgggtgagctcatcgaactgatgggcggcgatgccacctatacgattcccgatacaccggttgccgacgagaccaccacggatcaatcgcccacaagccatcccaacgattgtggcgatatgaacgaggttctgggtcaggaacatgccaaatgggcgctgcaagtggcggcggcaggcggacataatctcatcatgaccggaccgccaggcagcggcaaaaccatgctggcctcacgtatgcccggcatcatgtgcccgttgaacgaggcggaacaactggaggtggcgtcgatacggtcgctgtgcggcatactgcctcagtacggcatcaccgacatgccgccgttcgaggcaccgcaccacaccgccagcacggcggccttggtgggtggtggcagcggcatcgccgttcccggcgcgatcacgcgcgcgcatcgaggcattctgtttctggacgaggcaccggaattcagcgcacgcgccctgcagacgttgcgcgaaccattggaatccgggtatgtggcgctttcccgttcaaaaggcagcacctattacccggcctcattccaactcatcatggcggccaacccctgcccgtgcggatactattacggtaccggcgaacgttgcgcttgccgggaaaaagaccgtattcgttatttctcgcgattgtccggaccgatattggatcgtgtggatattcagatggcggtgccaccggtctcgcgcattgccgcgcagagcgagacgatcggcgagtccagtgccgggatacaagctcgtgtgattcgcgcccgtcaagtggccaaggaccggttcagacagtatggatgggtgtgcaacgcgcaagcttcgggcaaatggctgcatgccaatacgtcgctgaaagcgatggaattggtcaatcgggccctgtccaatcatcaactcacattgcgcggggccgatcgcgccatgcgtctgtcttggacgctcgccgatctggccggccgcgtgtcccccaccgagcaggacgtccatcagggcatcgaaatgagaacgaggatgacatgagtaacgctactgatatccgacaatctggcggcaccgcaggcagtgtggatcacaccgatacgggcctcgctgtttcgcgcaccattcccatgcctcccacggatacgttataccgcgccgcgctcacgttctgtcttgatggggcggatgtgatgatgtacgccacgctcaaaggcgcggaaagcgccgaatccctctggcacgcgttggcgcaatcccatccaagccagccatctggaatctgcggcccggcgctgtcacgtattgaccgcatgttcgtggatggcctcacccgatggggccgcaaggcgtcggcgaacgcgatgcgctccttccgcaatgcactggccggctggcataaccgcatgatggacctgccctcgcaagacatcatccaactggccgactggttcactatggatggcacgcaatggattatcggccccggccatccatgttggccctcgcagttggccgacctgtccattcgctccgattgggcgccaccgctgtgtttgtggatcaaaggcgatccacgcgcattgaccagttgcgccaaaccggtcggcatcgtcggttcacgggacgtgaccgaatacggccggtatgtggcacacaccgtagccgaacaggcagtcgttgccgggcatctggtcgtgtccggaggcgcaatgggcacggatgcggcggcacattggggagcgttgaatgcgctgcacggcagaatgcccgccaatgtgggcagaaccgttgccgtattcgccggcgggctcaaccatatcggaccgatgcgtaaccgcacgctgttcgaacgtatcgaggcgcagggtggtgcactgatcagtgaactgtgcccagggacgattcccgaagcccgtcgttttctactccgcaaccgcattatcgcggccatgtcttccacattgattgtgacgcaagcccggttgcgttccggagcgctcaacaccgcgggatgggcatgcgaattgctgcgcgaagtgtatgcggttcccggtgacatcaatcagccttgcaacgccgggtgcaataagatgatcggcgaccaccgggcgatgattctgtgtgccgccacatccactgaggatatatgccatgaacggcataagcccgttatggcggcatgcccaggcataccgaaatccacaggtcaggactcgtccgaaaacgaggaggccatggaagtgccggcaacgactccgttatcgccagcatcctcggaatcatcggcgtcacaggagtcgtcacaagattcaggtcattcgaaacgtcttaggaccaagcatactcagcctacactcgttcaatccaaggatgggccggcgagcgcaactgccgaggccggtgccaacaagagcaagggtgaagagccgccctcgtcgcatcagatgccggatcttcgtgtcaagccgaagctcgatcccgagaaggaagcccaacaacgtatcattatcgccaagctgccggaaatggaacgcacattagtggcattgattcgtgaatgccgtaaacgacatctcatcgtcaccccggacgcactattgcgtgtggcgcgagagacggtacccgacgagattcccaatatcggcaccatacttgagctactcggcgcattggagctgaagggagtgatcgagcgggatgccggcatactcaagctgagcagccgtgtcggctaatcggctttcatgacacggctcgaagactgttcggcgggtgtgcgagaatcgaacccatgagtccgaaacgtttggaagatatgtatgatgcggtgatcgtcggcgccggagcggccggcctgtcggcggcgttgggactgctgcgctcccccaaaatcaccgagctcaaggaacaaggcgtggacccgaagatcctcgtggtctccaaactgcagccgctgcgttcgcacaccggttcggccgagggcggcatcgccgcgagcctgggcaatgtggagtccgatgactggcactggcattactacgacaccatcaagggcggcgactggctcgtcgaccaggacgcggccaaactgctcgccgaatacgcgccgcagaccgtgatcaacctggagcgtcagggcgtggccttctcccgtaccgatgacgggcatatcgcccagcgccggttcggcggccacacgcgcgagttcggcggtgccccggtcaagcgcgccgcctatgcggccgaccgcatcggccaccagattctgcacaccttgtggcagcagtgcgtggccgccggcgtcgagttcgccgaggaatggtatgtgaccgacctggtgctcgccgacgacggcaagcaggcggccggcatcgtggcatttgacacgcattcgggcaagattcaggccatccacgcgcgcaacgtgcttcttgccaccggtggcgcgggccgactgttccataccacatcgaattcctgggacctgaccggcgacggcatggcattggccttggccgccggcctgcagctggaggacatcgaatttgtgcagttccaccccaccgggctcgcgcacaccggcatcctgctgtccgaggcggcccgcgccgagggcggcatcctgaggaacgccgacggtgagccgtttatggaacgctacgccccggagcatagggatctggccgcgcgagacgtggtctcccgctccatcatggcggagatcgacgccggccgcggcgtcgccgacccgaaggacccggatggtccgaaggactgcgtctggctggacatgaccggcatcgaccccgaacgtatgaaggaagtgctaccgcaggtggtcgaaaccatcgagcagtacgcgaacctcgatccggccaaggacctggtgcctatcaagcccactgcgcattacacgatgggcggcatccccatcaccaccaatggcgaggtgtaccgttgggccgacggtgccgtgcaggtagtcgatggactgttctccgctggcgaatgctcttgtgtctccgtacatggtgcgaatcgtctgggcggcaattctctgctcgacgcctgcctgttcggtacacgtgctggtcagacgatggccgcacgcatcgtcgagaacccggttgactcccccatggccgatgattcgaccgatgacatgctgaccgatgccgccgatcaggctgccgattcccgcaaggcagagcttgacgaactgctcgccgggccgatggacgattcagacgatggcgggcccaccgccaatccttatcagctcatggcccaactcggatcagtgatggagcaggctctggccgtacgttgcaccgctcagaccatcgatacggcgttgactcagatcaacaacgacatcacaccggttgccgataccttgcgggcccatgacaagaccgccgctttcaatcaggaggtcaccgccatctgggaagtccgtcatctaatcgaactggccgaggccatgctgcacgcttccgaatcccgtcaggaatcccgcggatccatgcaacgacttgatttccccgaacgcgacgatgagcatttccttgctcactcgatggtcgccgatgatggtccggcaagtttcaagccggtgcacatcaccgactatccacccaagaagcgcgagtactgatccgctgggggtaataccaagccgcctagggcttgtggcacaataggttggctgatattggacttgacatcccactgtttcatggaggcagaacatggctgaggcgagcaacacgacggttaccctgcaagtgcatcgtttcacgccgcgacccgagcgcgccgaacgtgcacgcggcggcagcccgttcgccaagaaaagctccccattcggcggcggctcggattcggcggcacgccgtcgtccgcgcggcaagcagtgggtgcaggaatacacgattcccgcgcgcccctcggacaccgtgctcgactgcctgctgaccatcaaacgcaccgtcgacccgacgctggccttccgctattcgtgcggtcacggcatgtgcggttcggacgccgtggccatcaacggcacccccaccctgctgtgcacggccaccatccgcgattgggccaagcagcccggcgccatccccgaagtcgatgacgaagggttccggcacaccggcaccgagtccgaagaatccgacgattccgcggaaaacggcgcaaacgcggcagccgaccaggactcggccgcaaacggctcgctgggagtcatcgaactggcatccctgcccggcttcccgccgcaacgcgacctcatcgccgacatcgacccgatgctcaaccaaataaggaagctcaccccatatcttcaggcggacggcgtgctcgccaccaccgccgaaggcaaggtggacgtgttcgaatacctgcagaaccccgaacaactcgccaaatacgagctgctgagcaactgcatcgcctgcggcgtgtgcgaaggcgcctgcccggtgtacgccggcggcgacgctttcatcggcccggcctcgctgatttgggcctcccgtttcgtcaacgattcgcgcgacaccaaggccatggagcgtatggacgccatcgacaccgccgacggcgtggccgcctgccagtccgtgcgcgcctgctcccgccactgcccgcgcggcatcgatgtgggcgaggagatgtggcagatcgtggccaaggtccgcgagcgctaagccgcgccatgaccagctacggcaatcgctgcaacacgtagtcgatacatccaccgggtgcccgcacgagagaagacataaaggaacgaattatggacagaacacagtacaccaacctcgccaaggcatgggaattcaccgaggaacacgcgcgcgaacgtgaatccaatgcgttgaccgacgcccgtacggccgccgacaagtccggccagttgcagggttcggccgcgcaggcccgtctgctgggcatgctggtgcgcatcaccggcgccgcttcggtcatcgccgtaggcaccggctcgctggtggagaccttgcagctcgcccatgcgctggataacaagggcctgctgactgcggtcgattccaccgctcagggcatcgcgctgattcgcaaggcgttcaccgaactgcaggatgagaccgacaccacgttgcgtgcggtgaacgccccggccagcgtgtttctgccgcgcctcaacgccaatgattacgatctgatcgtggtggcgggcgacgccgagaactatgccgccacgttcgcccaggcctcccgtctgctgcgcgcgcacggcgtgatcgtgttcaccgatgtgctggcgttggaggacggtcagggcggcatgattaatccggccgaccgcagcgacaaggccatcgccatgcgtgagctgctcaccaccgtcgaagatgacgaaggtttcgagtccacgcttacccctgacggcacaggcctgctcatcgcctacaaaaagtaactctgcccttggctcccctcggagaggggagccactctatctcgcttacctcacaattgcgctgacggccacctccacggcttcgtcggcgtcatcggtcacggtgaccagtttcgggtcgattgccgaaatcatgccgtgctcggccaccggaccgttgagccagtcaaagagcccctgccagtattccttgccgtagagcaccaccggaatattcgccaccttgtgggtctggaccaaggtcagcagctcgaacatctcatccagtgtgccgaagccgcccgggcacacgatcacgccggaggaatacttgacgaacatggttttccgcacaaagaagtaccggaagctcatgccgaggttcacccactggttcaacccctgctcgtgcggcaattcgatgccgagtcccacggatttgccgccagccagtgccgctcccctattcgcggcttccatgatgccgggaccaccgccggtgatgacggcgatgttgcgcttggctatctggctacccatgcgccgggccgccttgtagatcgattcggtgcgctgggtgcgtgcggagccgaaaatagagaccgcaggtccgagctcggcgagcgccccgaaaccgtccacgaattccgattggatgcgcagcacacgccatgggtccatgtgcagccagtcggtgtcctggtcgggtttcagcagattggcggtggtattgtccgagggaatcatctggccgcgtagaatcaccgggccgcgatgataggtgtcgcccagcggcgagacgtcctccaagtcgaccgggttcaccggcgttgcggcagcctcggttgccgtctcggcctccaacgttgccgcatcattcgcggctgtggcttccaatggttccatatcgtccacgactgtggacttggatgcggcctcggctagattctttgcttcagcggcctttttgccgtcgttcttcttggatttcttctgcttctttgccatccaatatcctcctgtacggtgctatcgactcttcgcattctagcgcctgaagctctgcatacgttttccgcgaaatcatccttgacttcgtgaagaacgtacggtgagtgacactcagcgtacggttttcacgaaataaggcctcatctcgtgaagaacgtacggtgagcgcgcctcagcgtacggttttcacgaaacaaggccaacaatggagtagggatcgtctaagccatcagtggcggaagtcaatctccacactggcggtgccgtcggcgagggtgccggggtgttccgtgggcgtggtggactttgtggtgcgaccggtctgaccagcgccatcgccatcaatcgattcgtcatcctccgcatcggccgctgctgcggctgcggccttctcgaatctcttggactgacggctcagcagcacaccggaaatcgcagcggcgatcagggaggccaccagcacgccgaagcgcgcctcagcggaaagttccgcattcttgtacgccagcgaggcgatgaggaaggacacagtgaagccaatgccgcaggcgacggcagcgggaatcatgtcgcgcacgcgcagccccttggccatcttgagcccgcccacatgcgtggccagccatgcggtggtgatgatgcccaaaggtttgccgaccaccaaagccacaatcagtgcgataaccaacggcgaagccagcaacagcgggctcaccgactcgaagtgcacgccggtggcgaacagggcgaagatgggcagggccagcagtgcggagaatggctgaagcttgttggcatagcgttcggcacgcggtgaaagttcgccgtgcatttcacgggagggagtcagcaggccaaccagcacgccggccagtgtgggatgcacgcctgcctcgaacatcatgatccaagcgaggacgccgacgatgccgaccgcaatccacggcacttttttcagtcgtacgaggtatgcccagatgacggcgcacacgacgatgccgatgaaccaataccaggcgttgatcgaggagaagaatacggcgatcagaataatggccagcaggtcatcgacggtggcaagcgtcatcaggaacgcgcggatcgaaccgggcagggccttggcaaacagggcgagcacggccagtgagaacgcgatatccgtggcggtgggcactgcccagccgtgcgacatctccgagaacggaatgctgctgccggtggtggtcagaatcagcgtgccgggttcaccaggcccgatctgagagaacaatgccgtgacggccaggaacaggatgggcggggcgatcatgccgcccaccgcgcacagcatcggcacggcggccgctttcggattggcgagcgagccggtggtgagttcctgcttcagttcgaggcccacggtcaggaagaagatggtaagcagaccatcctgggcccaatggccaatcggcaggtcgagattggtgtaggggatgaacagatgcgtttccgctacggtctcgaacgcatgcgcggtggcgggcaggttcgcgagcaccaggccggtgagcgcgaagccgagcatgatgagtccggaaatacggtctgaggcggcgattcgcctgatggtggaccaaagtcctttcttcgcgccggcggtcgtggccatcgcgtctccttgctgtactttcttggatgaaccgtatgtaatagtacggaatatctcaggacgttccgctccaggctgagtcgcgaagggcaaccttacccccctgtgtggccgactcaaacgggccaatacaattggaaaagcctcggaagcatttcgctttcgaggcttactgtgcgccagacaggattcgaacctgcgacctgctgatccgtagtcagctgctctaatccgctgggctactggcgcataccactgttgtccccgtggttcgggagtgcgccagacaggattcgaacctgcgacctgctgatccgtagtcagctgctctaatccgctgggctactggcgcatgttgtcttttcagacaactcgatatataatacacgccgttcagatgaatgcaactcggcgtgttgcggcgagtcgcaccatcctaatcgccaccgcaacggcgtatttactggcctcacgccgcatgtgtacggactcggtcaagcaaaaccgactacgcaactttgaggcgtccctgcggcacatccacggcttcgcgcaagagtttgggcgtactggaaccctctacggacgccttgtccacaatcacctgcttcacatcatccaaactcggcaactggaacatcgtgtcctgcaacgtacgttcgataatcgaacgcaacccgcgcgcgccggtcccctgcttgatggcgatatcagcaatcgcccgaatggcctgttcggtgaactgcaggtcgacgccgtcgacggcgaacagcttacggtactgcttgatcagcgcgttggctggctgggtgagaatcgccgtcagatcgtctacggtaagttccttcagcacactggtgaccggcaaacgtccgatgaactcaggcaacagcccgaactcggccagatcatcggcattgacctgttcgagcaattcctcgtctttcatgtcggcgtcgtgccaattcgcgccgaagccggtctctcgacggcccaatcgcttgcgaacaatatccgtcagtcccacgaacgcaccgccgcagatgaataggatgccgcgtgtgtccatctgcgcagtgtcctgctccttatgcttgcgcgtgccctccaacggcacggaggcgatggtgccttccaaaatcttcagcaacgcctgctgaacgccctcaccggacacgtcacgggtgatggaggtgttctcacctgatttgcgcgcgatcttatcgatttcgtcaatgtagatgatgccgtgctgggctcggcttacgtcgccatccgcggcttgaagaagacgttggagcacggtttccacatcgtcgcctacatagccggcctcggtcagggtggtggcgtcggtgatgacgaatggcacgttcattacgcgggccaacgcctgtgcaagataggttttgcccacaccggtggggccgagcaacagaatgtttgatttggcgacctcaacgtcagccaaagggtcactgttgcggcgggtagcacgcgtctgggcgggagcggattgcttggcttgtttgccggtctggccaccgtgcccgttattcccgtcaagctgctcagcggactcctgaagctccatattgacgcgtttgtaatgattgtatacggccacggacaatgcgcgcttggcgttctcctgaccgatgacgtagcggttgagataatcgaagatctgagcgggcttgggcaggctcagcgaattgacctcggcatctttgacacgctcctcggagatgatgtccacgcacagggcgatgcattcatcgcagatggaggcgttgggaccggccaccagttttctgacctgacgttcggttttgccgcagaacgtgcaacggggtacgtcctcgttgtagctcaccacacgtcccatgattctcctttgccgaccgcgccgcaccgtcgaaccgccacgctgcgcattatcattgtcatccttgaaatacaatacccccggtcgttgccgaccgagggtattgcaatgttcggaagttttactggcggtgttccagcacctcgtccacgatgccgtattccttggcttcaggagcggtcaggaaagtgtccacttcgatgtcgcggcgaatcttctcgacatcctggccggtgtgcttggcgagggtctcctccagccattcgcgcatacgcagcatttccttggcctgaatctcgatctccgtggccttgccgaatccttggtcgatggccggctggtggatgagcacacgggcgttcggcagcatcaggcgcttgcccttggtgccggaggccagcagaatggcggcggcggaggcggcctggccgagacacacggtctgcacgtcgggcttgatgtactgcatggtgtcgtagatggcggtcatggccgtcatcgaaccgccgggtgagttgatgtacatcatcacgtcacggttcggatcctgggattcaaggaccagcagctgggccatcacgtcgtcggcggaggcgtcgtccacctgcacgccgaggaagatgatgcgatcctcgaacaggcgggagtaggcgtcctgggtcttcatgccatacggggtcttctccacgaactgcggcatgatgtaacggttggtcggcgcgggctgggctgcgcgggcggcggccggcatgaaaccggctacgccatgacggccggccaagcggtcggcacgggcggcgaactttgcttcttcacttgccatgagtctcactccccctgctggttgttgccgatggtgtccggcgtggtcacgagcttgtccacgaagccatagtcgagggcttcctgggcggtgaaccagtggtcgtattcgttgtcgcggtagatctcctcgagggtgtggccggtctgctcagcggtcagctcgctcatggttttcttcatgtccatgatgagctcggcgttgatgcgcacgtcagtggcggtgccgccgatgccgccggaaggctggtgcatgagcacacgggcgtgcgaggtcaggtaacgcttgcccttggtgccggagctcagcaggaactggcccatggaagcgcacatgcccaggcccacggtcgccacgtcaggctcgatgagctgcatggtgtcgtagatggccatgcctgcggtgatggagccgcccggcgagttgatgtacagccagatgtccttcttcgggtcctcggcggccagcatcagcagctgagcgcagatgcggttggccatatcgtccttgacctcttcacccatccagatgatgcggtctttgagcagacggttgaaaatcgggtcgacggggccggccgggacgtcatcgcccgccatgaccggcaaggtcgcaaaggtattgctcaccttgattctccttctaattactcgaacattgttcagactaccgccttgaagcgactgaaggcggcttttcgcgtgctttttggcgggtagcgtagggatttcgggttattccaaggtgtcgaggacgtcgtcaatgaggaggcgggtctgggaggcggcatcgtcgcccagacgcgggaagcgacgggcggcattggcggggctggcaccggcggctcgcgccacgttggacttgctggcaccatgggccacggctttttccgcgagccgatcgaccagtgaatcggcgacttggcgcatctgttcggccacccataattgggccatatccgcaggcaagtcgtagtcttcggccacatcgctggcggcctcctgaatggcggcccacaacaccatgaatggctttcgatagtagtcaatctgctcagtgagcggctcagcggcaagcgattcaagtgccgcacggacttcggtgttttctgacatagctttctttacctcggctcccctcagtctcactgtgttcgacagctcccctcagagaggggagccagaatatatgcatctacttacttacgactcagcaaccactttgatatcaacgacgacgtggccacggccatgccgactggcacgaagaaggtaatcggcgcttcggtcagctccatcaccaagcacatggccataagcggtgcctgctgtgaggccgaaagcaacgaagccgcaccgatcaaggcacacgcggttaccgaatcagtcggaaacatcagtatccatacgaggccgagcatcgcacccagcgtggaacctaatgcgatgccgggctgcagcacaccgcccgatgcaccggagcgaatggtcatcagcgtcaccagcgccttggcgacaaaggtgagtgccaacacacccagcaacatccagatattggactgggacagcgggaaaccggcgttcatcacggatccagaagagccgctcccaccctgaagcatggcccaaaacgaggccattccagagcccgctcccccgccagaggccgaatcggatacattaccgccgcccgtcagcaagttccatggagaggcggccgctgaagatgccgactgcatggcaccagcagtgccggcggtttcaggaatgaacgtgctgaatccaagttgcgctgcggcacggccgttgcccatcacctgcggcacaacaatcgccaccaaaccggtgatgagaccagccagcggcatccgccacagaatggccttgccggtcggcttgtgcgcttccgcccattgcgaaccttttcggaacaatgcgccgcccactccacatgccgcaccgcagatcagagcgaacagcattaacgttggcgtggattccggttgcatggcggtgatgtcgtagaacaggcaatgccctttgatcgcaaccgccacgaatgcggcaatggcagacacgcccagtccaaacgcaaccttttcgatcgtcacatccaccaacaggatttcgacggcgaagaacatgccggccagcggcgcgtcatagacgcctcctagaccggcaccggcagccactgccaccaccatgcgccggtcgataccatcaacgccctcgatatggaacaggtcgcaaaaacgttgcgcgatcatggcgccgagttcgcgtggggcgacttctcggccgatcgaggcaccggagccgacgatgaaaatctgcaacaccacatgcacaatggtttgccagaaaggcattcgctttcccgccacggccttcttgactgagggcaccacagtcgttttgtgtcgtagcagataccagataatgcccgcgatgccgagtcccacggtcaccgatatcacacggcgtgcagcgggcacgccgaatggaccagacaattctgggccttcgatgtagccgagcagcacatgttcaacgccgtagagcaacagggtcagcagacctgctcccacaccgatgagcacgccgagcacaatggtcgccgcagcgagccaaccaaggcgtttgatagtaaccgttggctgcatgtcaacctccgcacgctatgcaacgagtatgccttgggaactcccctcagtctcgctacgcccgacagctccccccaaaggggagccaaagaaatagtccttttaccagaataggaagagcccggaaccgtgaaacacgattccgggctcaaacaatcacgctaacgcgatgaggctatgctcactcagcgtccttggcgtcatccttggcggacagttcgtcggccacggcggcagcagcggaagcggcctcgacggactcggactcttcgtcctcagcggcctcgcccaggaagccggagaggtccacaacctcgccatcagcggtgaacttgacggcgcgcatgccggcgagcagacccttggaacggccgacttcctgcacagcggagccaagctggccattcttgatgatggcctggatgaagttgttcgggtccatgccgtactgctgggcgatggaagcgaggaagttgaacacgtcggactgggacacctgaacgtccagcttctcggccagggcgtcgagcaccatctgatcgcgcagatccttctccacggtctcctcggcctgagccttctgctccttggtggccttctccgggtccggggtcatgcccttgagctgctcttcgaccatgttggccttgacacccttcggcaccgggatctcgagaccttcctgcagcttggcgatgaaggcatcgcgagcctcggtggcctgacgaccttcggcgtcctgagcggcagccttgcggatgtcagccttgagctcgtccagagtgtcgaactcggaagcttcggaagcgaactcatcgttcagctccggcagttcctcagccttgacggagttgaccttgaccttcacggtggccttctggccctcgtgctcgccggcttccagcgtgccttcgaaggtggtctcctcgccggcggacaggccgtcaagagcctcgtccagaccgtcgagcatggtgttggagccgagctcgtagctcacgccttcctgggagtcgacggtctcgccgtcaatctcagcagtcaggtcgatgttggcgaagtcgcccttggcggccgggcggtccacgccgaccaaggtgccgaagcgctgacgcagggtctcgaggcgcttgtcgacgtcctcatccttgacttccggcttggagatggcgatctcaagaccgtcgatttccggcagttcgatgtcaggacgacgctcgacggtggcggtgaacttcagcttggtctcgtcgttggcggactgcggaacatcctgcacgtcgaactccggctgagccatcggacgaatcttcttctcatccagggccttggagtacagctccgggaccgcgtcgttcacggcctcaccggcgacggcggcgaaaccgatgcgctggtcgatgatcttgccgggaacgtggcccttacggaagccgggaacgttcacctgcttggcgatttccttacgggccgcatccagatacgggttgagctcttccggttcaacagtgacggtgagcttcaccttggtgggctcgaggttacgaacgctgatcttcacgctaatgactcctcaaaagtcgttatttcttacagttctgccgtaaggcaacctctacatgataacgccacttacggacggtgcaatgagtttcacctgccagtttcttgcgccctgctcgatcaggaacgtctcgacgtccacttccaccgggtcttccacccagcacaggttgcgtaggatctgtggcttgatgatcatctcggccggcgtgcgggtgtcttcggcgatgcggttgatcacacgccgtacccgctgcagacggtcataacgctccggatggcgctgttgccacagtcgcatggatcggggcgcgttcaccacaccgttttcgtcctgttcgggggcgggcatggtaggccattgggtgggcttcagggccatggcgcggtcgatggcctgcttccagaccttcggcttgaccgtacgctgaatcggcgcgtaccgctcgaacattttgtcctgctcggtgccggtatgaatgcgcacacgctcgttcagggatcggagtgcgcggaattgggcggcattgtgcggcttgttggtcgcggcctcgatgattgacgaatcggtcaataacaggctgggagcgatgtcgtatcgccgggcgagccggtcgcgctcctcccatagggatttggcgatggccaagcccctcggatcacgactcagctgggtgatgcgcgagatacgcagccaaggaatcggatgaggtttgcgcggggcaaggcccgcaaccaaagcgtgagaaaactcttcagcggcccactcgtccttgcctgcggctttcaggtcacgacgcatcaaggtttcgagttcgataagcacctccacgtcgagcgccgcatagttgcgccagtcgcgcggcagcggacggtaggaccaatcggcggcggaatgctctttggccagcgtgatgccgagatagtgttcggtgacggcggccagaccgaagcggtgcaggccgagcaatcgcgccgctatttccgtgtcgaacaaggccttgggtttgagtccgatttcggcgaatccgggcaagtccatcagagaatcatgcagaatccatgtagcatcgcccacggcgtcattgaattcattccagtcagctccggcccgtgtcagggcgacgggatcaagcaaggcgatgcccgcaccttcacgtttgaactgaatcagccaatcctcatgtccatagcggaatccggacgcccgttcggcgtcggcggccagcgagcccgtcgcctcggccagcgcatcgcaggcacgatgatagccatccagcgacgaagtgacatcgggcactcccccgcgaggctctttcagcagtcggggttcggtgtcacggacgtcactcaactggcgtcatcctcctcaaaacggatggtggatctgatgaatgcggcccacgagcggatttgtgcgccggcgtccatagtaccgtccggtccggtcccgtcaagcggggtccatgagacgcgaatctcacacccggcgctggtggagccggccatcgaaccaaaagccgtgttttgggtcacggtgactgtgccggataccgaatccggctcgatgccgtcgaaatagtcgcacatgtcatcccagtacatgccgggggtcagagaatcgttttcggcggtttccagcggcagccgcgcgaacgccacgcaacgccagttggaatcccggtcaatgcgcagctcatgagcataaagcatcatgatccagcctgtggcgattcgtgattcggcatcgttgccaagaccggcggaaaaggcatcgccgagggcacgctctcccgcttcgaattccacgccgataccataatcggccaaggtggaaggcacgggaatctcccgatagcgcacgtcatggatgcgcttcatggtgctgacggattcgacagctgcccatacttcatccggcacaccctgagggcgtacggggcgtccgtcgttggacgctcccataggaaatgcgtagatgtcggccatatctctagggtatgggcgaacgggccgaatcgtggtatttacgcgcggttcggccctgcaatttaaaacacggtgaagccgtggtccttgaactggttggccacccgcgaacgggtggcggcgttgggtcccttctggttctccagcgggtatgggatgcgcagttcgtgccacttcgggcggccaagctggtggaatcccagcacgtcgatgtgttcgacggcatcaccgaaggactcgcagatcttcgccacgttttcgacgttctcttcggagtcggtcaggcccggcacgagcacaaatcgtacccagatcttcttgccggccttggccagtcgctggccaaaatcgatggtgggctgcaaggtgccgccggtgaccttgtgataggtctcctcgtcgccggatttgacgtcgagcagacacaggtcgatgtcctcgagcatctcgtcggtgtagctcgtgttgaggaagccggacgtatcgaggcaggtgtgcacgcccatctccttggcggcatggaacacacgcgaaacgaaggcgggctgcatcatggattcgccgccggagaaggtgataccgccatgcgtggccttgaacaggtccttgtaacgatcgaccttcttgatcatggcgtcaaggtagacgggcttgccgtcgcgcatcttccaagtgtccgggttctggcagtactggcagcgcagcgggcagccggacatgaatacggtcatgcgggtgcccggtccatccacggaggtgttgatgtcccaagagtggacgaagccgatatcgccggatttcagggcggaaaggcggtcacgtcggtcgagtccgattggggattcaaagccggaaaggccgcccatcaaagtctgcgaggcataggtcttcgattccttgagcatatgcctggtcgtggtgcggaacgtgggtgttgcgggcatagttgtcctcctgttccaaatgatgcgaaggtctgtgggaaataaggaaggggtggagccgtgccccaccccttcagttagtcattgccgcggttcgcggggttggtcatcagtcgacgacggcgccttggtggaaggtacgggagatgacgtcgagctgctgctccttggtgagcttgacgaagttcaccgcgtagccggagacacgcacggtcaggtgcgggtacttttcggggtgctcgacggcgtcctccatggtctcgcggcgcagaacgttgatgttcgcgtggtagaggccgtggccgttgcccgcgtccaagatgccgaccaggttgccgatgcgctcggcttcatcgcggcccaggccatcgggggtgatggtgttggtcagcgagatgccgtcgagggcgtcgttgtagtcgatcttgccgacggagaacatggacggcagcatgccgtgcgagtccatgccgttctccgggttggcacccggggcgtacggggtgcccttcttgtggcgggacgggaaggaaccggtgttcttgccgtactccacgttggaggtgatggtcaggatggactgggtcgggacggcgccacggtagacgggcaggcgcttgacctggcccatcacggtggagacgacccacttggcgatgtcgtcggcgcggtcgtcgtcgttgccgtagaccgggaactcgccctcggtgcggtagccgacgaccagatcgtcgtcggcgccttcgacgtactcgtactcgtggccttcgaggttcttggcttccttgttggtgatcgggtacaccttggcgtacttgatggcggacagggagtcggcggcgatggacagaccggacatgccgcaaccgagggtgcggtacacctccttgtcgtgtagggccatctcgatggactcgtaggcgtacttatcgtgcatgtagtggatgatgttcagcgcttcgacgtaggtttcggacagccactcgagcgccttctcgtagttgttcttgaccttctcgtagtccaaggtgccgtcggcctccggggcgatcgggtcgatgacgcccttgtcgatgacctgcatgccggtcatctcatcgcggccaccgttgatggcgtacagcagggccttggcggagttcactcgggcggcgaagaactgcatctgcttgcccacgcgcatcggggagacgcagcatgcgatggcggcgtcgtcgccccagtgggaacggatttccttgtcggactcgtactggatggccgaggtgtcgatggagatcttggcgcagaagcgcttgtagccttccggcagcttcggatcccagaagatggtgatgttcggctcagggccaggtccgaggtgctcaagggtcagggtgttgagcagacggaaggaggtcttggtgaccatcggacggccatcgtcgccgaagccggcgtcggaccaggtcgcccagtacgggtcgccggagaagatgttgtcgtagtccttggtgcgcaggaagcggacgatacgcagcttcatgacgatgttgtcgatgagctcctgggcgtcggtctcggtgatcttgccggcctcgaggtcgcgctcgatgaagcagtcgaggaaggcggagttacggccgaaggacatggcggcgccgtcctgggacttgatggaggccaggtagcccatgtaggtccactgcacggcttcctgggcggtctgagcagggcgggacaggtccaggccgtactcgttgccgaggttgatgagctgcttcagagccttgatctgctcgtcgtgctcctcgcggaagcggatccagtgctcgatctccggctcggtgaagtcgttgcggtacgggatggagtccttgtcgcgcttcttgaaggcgatcagcttgttgacaccgtacagggcaacacgacggtagtcgccgatgatgcggccacggccgtaggcatccggcagaccggtgaggatcttgttgtggcgggcgaccttgatgttcttggtgtagacgccgaacacgccgtcattgtgggtcttgcggtacttggtgaagatcttcttgatctccggatccggctccttgccggcttccttgatggcctgctcgaccatacgccagccgccgttcggcatcatggcgcgcttgcagggcacgtcggtctgcaagccgacgatcacgttgtcgacttccggggagtcgatgtagccggccgggaaggcatcgatgccagccggggtgtgggtgtccacgtcgtagacgcgctgcttgcgctccacggccaggtagttgtcgtcgaggtacttccacaggtgcttggtcttctcggtggcaggagccaggaatgtctcgtcgccctcgtacggggtgtagttcttctgaatgaagtcgcggacgtcaatatccttctgccagttgccctcggtgaagccggcccatgccttggcgtcgagctcctcttgggagacagctgcattttctactgcggtcatgtcactccttaaatggggttgtaggtttcgcatcttcacggaacccttggttcaacagtgtagttggcacttgcttgggaaaagccgaaattgggagtgagctatctcacattgttttttgtgaacgctaccattccaatggtttctaggtattgatggggctattgcacgtctccagatatgggaaaccgctcatactgtgatgttcgtatgagcggcttggtgagcggttcggtcttgagattgacagcagaaccgtatccgtctgttttggccgtcagtcttcatcgttcgcttgcgcggatttcacaccgtagttcttccagcgccagttctcctcctcccatctggcgttgcggtccaccacgatgtcccaggcgtgttcggcatcttccttggtcttgtacggacccatgcgctgttcaatcggtgagaccatgcccagctcggcctgcttcttgacggtgttgaaataccactgcttcttgttatcgtctgtcattggtacctcctcaacggtattacttgctcccgctggcgggagcaatatatgtttattccctgaacgcgttggtgacgggcagtcggcggtcgcggccgaacgcgagggccgtgaccttcggtcccaacgggtattggcggcgcttccattcggcgcggtccaccaatcgcatcacagtgtccacggtgtcctggtcgaagccgtcggccaacaggtcggcgcggccgtgcgcgtgctcgatgtatgcagcgagcaccttgtcgagcagcgcgtattcgggcagggagtcggagtccttctgcccggggcgcaactcggccgagggagccttctcgatggatgagaccggaatcatcacgccgtccttcaacgggatgccggcgttgccgtcctcgttgcccacgatcttgagcccgccgataccgacgcctgcggccgcggccttgttacgccaacggctgatctcccagacacgggtcttgagcaggtccttgatgggtgcgtagccgccgaccgcatcgccgtagatggttgagtagccgcaggcgagctctgacttgttgccggtggccacggcgagcaggccgcgagaattggaactggccatcacgatcacaccgcggatgcgggcctgcaggttctcggcggagacgccatcaaggtcaagttgctgttggtaggcgttgaacaatagctcaataggctggacctcgtaatgggcaccgatgttggaggccaggtcagcggcgtcgtctttggaaccatcggaggagtacatggagggcatggagatgccccagacgttctcgccgccgcatgcgtcggccgccatggcggctaccagtgcggagtcgatgcctcctgagaggcccagcgtcacgccggtgaagtggttcttggccatgtagtccttgaggccgagcacgcaggcagtgtatacctcttcgtccgggtcgagttccggaacgatctcggccttgacctgatgttcggcggtggaatcgaagtcccagaacgtcaggttttccatgaacatcgggccgcgttcgataagcgtgccgtcggcatcgaccacgaagctgccaccgtcgaagaccaggtcgtcctgaccgccgacctgattcaggtagatgaccggggcgttgacttcggcggcacgacgctgggcgagctcgaaacgggtgttggtcttgccttcctcatacggcgagccgttgatggtgagcagcaggtcgatgttcttggtggccaggtcggccaccgggccaccatcctgccagatgtcctcgcagatggccacgccgatggtggcaccatccacgtcgagggtcacggaacggtcgccggcggagaagatacggaattcgtcgaacacgccgtagttgggcaggaagtgcttgtcgtagccggcccagaccacgccctgatgcaataccaccagtcggttgcgcggcttggaggtcttacgatcagtgcccacggtgccaaccaccacgaacagattgccgaggccgtcgtcgttgagctgggcggcgagttcgttggccttgtcccatgcggcttggcggaaggtgcggcgcagggccagatcttcgatggggtatccggtgagggtcatttccgggaaaacaaccacttgggcattccctgcggcggctttacgggagtagtcgagcactttggcggcgttggcatcgagcgcgccgacgcaggtgtcgatctgggcgagtgcgaagcgaagctgtgtcatagcttcttagtgtagccgcgtatggcgtcggattgcctgttcttccggcttggcgtcattcattaggtcgtttttgcgttcattaggtcactgcaatgcgatatcagtcgttgcaatggcgcgattccaacaaccagtatcgccgttcaccgacctaatggacgatgaatcgacctaatgaacgaatgccactcccctcagtcagcttcgctgatagctcgtcctgcacttatggacgggcgaggcccgcgcatatctggttcggctgtcgcctcactttcggctgcagacagcccattgggctgtctgcctaacgcctcagcctccagaggggagccaaaaaaggatttacctcagctcgttgagcacgcgcagggcggcgttgacgtagaagttgacgaaggtgggaatggattcgtcgagacccacgaaatgcgggctatgccagtcggcgcaaccttcctggccgtttgacccgacgaacgcgaacaccggcaacgtcaccttggcgaattcgcagaagtcctcccccgccatcgactgacgtatcggttcgagctgcgcgtagtcgttgacatccgccgccacggccttggcaagacctggatcggagaccagcgggtcttggaaatcatcccagaccacatcggcgctgataccgtatgcctcggcggtgtgttccaccacttccttgaatcggcggccgaccagattgccatccgacttgtggaaatagcgcacagtcccttggaatccggcttcggcgggcaccacgttccacacatggccgccgtgcacttcggtaacggacagcaccagcgggtggaagggcgtgacgttgcggctcacgatggtctgcaggctcagaataatactggcgagcgcttcgatgggcccggtgcccttgtacgggtagccggcgtgggtgccttgggcgtggagggtcacgcggaatttcacgcagccggccatcatcggctcgacgccgatggccagctggccggacgcatagttggggttgttgtgcgtgccgataatggcttcgacgtcatccacgagtccggcgtcgatcatggcgcgagcgccttggccggtctcctcactcggctggaacagaatcttgattgagccggcgaacttgtcacggtgctcggcgagccagaaggcggcaccgagcagaccggtcatgtgcaggtcgtggccgcagccgtgcatcacgccttcattgacggagctgaactccagtccggagtcttccacgatgggcaggccgtcgatgtcggcgcgcagcccgatacgcggcccgggaccggcctcgccctgaatgagccccacaacaccagtctccagcgggttgtgcaggatctcgatgccgtgcgccttgagctggtcggtcagatagatgctggtgtcgaattcacggaaactacgctccggatgggcgtgcaggtagtggcggatggtgatgagttcgtggtcgatgtcgatatgttcactcatggttcccgattctagtagcgcgaagaatatattgcggccctcgcttcatattggcgagggccgcgatctatggggtcagtatgccttgttattgctggcgtttgagcagtcgtttggcgatggcgttggcgatgccctgcaccacctggaccagtacgatcatgatgatcacggccgtccaggtgacggtctggtcgaacttctggtagccgtaggcgatggcgaagttaccgagaccgccaccgccgatgtagccggccatggcagacatgtcaagcacgccgatgaacaggaaggcgtaggccaggatcagcggtgccagggcttcggggatgagtacggtgcggatgatggtgagcttgccggcacccatcgaacgcgcggcctcgattactcccgggtcgaccggcacgagattctgttcgaccagacgagaagtggcgaaggtgcacatgaccaccatcgggaagatggcggccacggtgccgatggacgtgccgaccacgacgatggtgagcggctgcatggctgccaggaaaatgatgaacggaatcgggcgcacgatgttgacgatgatgtcaaggatgcggtagacgaccgcgttctcgaacaggttgccggggcgggtgccatagagcaccacgccgaggatcaggccgaggaatccgccgatgacaagggtgacgagcaccatggtcagggtctggccgatggattcgaacaatagtgggcgcagcacgttccagtcgctacgcgagttggcgaggatgatcatgcgttgtctccttcatgtgcggcggcggatacagcgggcgcggtggcagtatcggccgccagtgggtcatgggcgcggtcttcggcgtaggaggcatgtccggcaactgcgtcggcgtaagccacgggctttgcggcggtgccgaagtcaatgacgtcgctattggcggcgagctcgcgcaggaattcgtccacgtgccagccgggcccgttgaattcgtaggtgatggcaccgatggcggtccccttgaccgtgtcgatgccgccgtagagcaggctggattcgacgccgtatttggcgatgagttcggagatgttctgtccggatgccttgagttcgtggccatggctgccggaaacgtccttttggcggatgagcacggtgacgatgcggcccgaccattcgtggtgcaatcgctcgacccggtcttcctcgggcaggccggacagggcggtggcgatgaatcgcttggtcaccggctgctggggcgcggcgaacacgtcgtatacgtcgccggattcgaccacgcgtccggcgctcattacggccacgcggccggcaatctgctggaccacgttcatctgatgggtgataagcacaatggtgatgccgaattcctcgttcacacgcttgagcaaggccagcacttcggtggtggtttccgggtcgagcgcgctagtggcttcgtcggcgagcagaatctccggattagtggccagtgcgcgggcgatgccgacgcgctgcttctggccgccggacagctgcgaggggtatttgtttgcgtgctcactaaggcccacgaattcgagaagttcgttgacgcgacgatcctgatagtccttgcgccagtgatcgagttgcagcgggtaggcgatgttctgcgccacggttttggtggagaacaggttgaactgctggaaaatcatgccgattttctggcggatgggccgcagcttggtctcactcaaagaggtgatatcggtgccgagcacggtcacggtgccggaggtgggtcgttcgagcgcgttgataagccggaccagtgtggatttgcctgcaccggaatagccgatgatgccgaagatgtcgccgcgatcgatggtcaggctgacgtcatccacggctcgtgcgatgttcgcgccgcgtccgcgtgttttgaattccttcacgacatggtcgaaggtgatgatggggtcgctcatagtgctccctgatgctggttgttgatgtccggtcacggaagcggagcgaatcccgattgttggctcgggtactcgctccgcttggtggtaatggctatggacaggttagtcgtgcactcgtatcagccacggctcactgctgggctttggcgtccttctcaatgtcggacaggaagccttgcagctcgctggcgctgaacttgtcggcgaacaccgcggtaccgccggagttctcctgcagggcgtcgagcacatccttctgctggtagatggaaacgagcttcttgtaggtctcgttgttcacgtccgccttgcgggccacccacacgttgatgtaggggcgagcttcttcggattcggcgtcatcctggtagatggcgtccttcgggttgagaccggcgtcggccacgtagtcgttgttgatcacaccggcggcgatggtcgggtccttcagggtggtggccacctgttcggccttgagcggggtgaccttgaccttgctcttggcttcgtcgatgtcggccggagtggagaaggcggtccagtcgcccttgagcgtcacgagaccggcggccttgagcacgccgatagcgcgggcctggttggtttcgtcgttcggaatggtgacggtgtcgccctgcttcaggtccttgatgtccttgaccttggtggagtacacgccgagcgggtagatggcggtgccgccgatgggctgcaggtccttcttgttgctcacgttgtagttggccaagtagagcaggtgctggaattcgttgaggtccagctcgccggagtcaagggccgggttttcggaggtgtagtcctggaagtcgacgatgtcgacgtagatgccggccttctcggcgtcctgcttgaacttgacccattcggggttggtagcgccgaccacgccgatcttgaccgggttgcccttgctgcccttggcggacgactcgttggcaccggcaaacgcgcggtagccgaagaacgcggccacggcgataatcgccacgaccacgatggtgatgatgacgttgcggacggtgtggttcacacgcaccggctcgttattgttaggagcggccggagttgccgactgggttgctgctgtcattggatttcctctctccaaaattgatgtcgggtaacaccataacgcgcttgaaccgcgaaagtgacggaaaatggccgattgccgtataggtgtcttttatggcgcgcatgcaatggccgggattcgtgcgtttgataacccgctataggcgtgccgaacacgccggaaagcacgtcgagaggggctttgacaatggaagctatgactaccgatactgccaatgccgatatccgagccgtattcttcgatatcgatggcacgctcaccagtttcacgacccatacggtgccggattccacaatcgaggcgattcaccggctgcaggccgcaggcgtcaaggtgctgatttgcacgggccgcgcgccttcacagatgcacgtggtgctggataccatgccggtgacgttcgatggcgtggtggcgttcaatgggcagtattgctttgatgacaccggcttctttgcctcgcaggccttggatactgctgatattgaggtgattctcgactggctggaccgtcaccccgatgtggtgtgcaatttcggcgagaaggattacgtgtacttcaaccagtccaatgatctgcttcgcgccacgtggagcaaactgggcaaaaccgcaccgacccggtattttgaggacccgcgcacccgcgcgctggatcatgagactttccagatcagtccctttgtcggacccgagttggaggccgaactggtgggactgtgcagcaatgtgcgcggggtgcgttggcatccggatttcacggatctgattccggccgatggcggcaagccgcgcggcatccagcggttcatggcgcattacggcatcacgcgcgggcagaccatggccttcggcgatggcggcaatgacacggatatgctcgcctacgccggcatcggggtcgcgatgggcaatgcgaccgccgagccaaaggccgccgccgattacatcaccgacgacgtggaccacgacggtgtgcgcaatgccctactgcatttcggggtgctacgcgattattgatgccgtagcgcctcgaccgggtcgagctttgccgcgcgtctagctggatagtagccgaaaatcacgccgacagcgatgcagatgcccactgccagtccgatggactgcacggaaactgctggcgcgatactcatgccaccggcgatgccggacaccaatccagcggcgcccaacgacagcaagtagccgatcaacgtgccgataagacctccaagcactgtgattgcaatggattcggcgaggaactgcgcggtcacgtcacgccgagtggcacccaatgcccggcgcaggccaatttcgcggatgcgttcggtaacgttggtgagcatcatgttcataatgccgatgccgcccaccagcaacgagaccccggccaccgaacccgccagcacctggaatgcgctcatgaagctggaaagctggtcgatggaggattgggcgcttacgaccgacagattctggtcgatctgttcggttgggatacgcatgatgcgagcgacaacggtcttcgtctgttccgtgagctggtcgatatcaaccccgtccttggccagtccgtagatctgcatgtatcccatgttcgaggacgcaaaccgcagcgccacagtggtggcaggcatatagatattcacgccgtcgccgcccatgccgcccatcaatccagacgactcgaccacacccacaacggttgcttcattgccgtcaagcgtgacggttctgccgatggcgtcaatgtccgcgctgccgaacagcttctgcacgccctgcccgtcgagaatcaccaccattgcaccactcgttgcttcactcgatgtgaaggcccgtccacgaccaatcgtcactccggatacatcgaagaaatgctcgtcgacaccggtgatgctcgccgacaccttgtcggtggtaccgggcgcggcgattgacgaggcggcaccatagttcgtcggcgagaagtactcgtagtcggtcagttcctcgcgcatcgcagtgatctgttcgtcgtcaagggtgccgacgtccgtgtaaatcgaaatcgtgcgcgccgcgttcatacccagttcgccgaccagagagtctcgaatgccaccgatcagtgaggtcatggtaatcaccgcggcaatgccgatgacgatgccgagaatggtcagtgcgcttttgcctttgttcgccctcagtgcggagccggtttccgccagcagatcccgtgttctcatcggtacatcccttcacgcagtacgccgtcacgcatgtgcaggcatcggtcggcgcgttcggccacttcggggctgtgggtgatgagcacgatggttttgccttgctgcttgagctgttcgaacgtgtgcatcaccgcatcgccggttttggagtccaggttgccggtcggctcgtcgccgagaatcagcggcgggtcctgtaccaacgctctggcgatggccacgcgctgcatctgaccaccggagagttcattggttttgcggtcgaacagttccggactcaacgccactgattggaatgctttgatggcacgcccttcccgttcacgcaccgggcagtcggaataggccaggggcagcatcacgttgcgcagcacgctggtgcgcggcagcagattgaaggattggaacacgaagccgatgagccacccgcgcagttcggagcgttcgtcatcactcagattctgcacgtccatgccgcacaggcggtaggtgccggatgatgggcggtcgagcaggcccagcgtgttcatcagcgtggatttgccggaaccggatggtcccatgatggcgaggaactcgccttggcgcacgttcatggtgatgcctttgagcacatgggtgtaggtgtcgcctgtctcgaagatgcggttgatgttttcaacctcgatgacgttggctgtggcggtgggcacggcaatggtctcattacgccgtttgccgcgatttgcccggctcgcgtcggaacgaaacgggaacatatcagcgtgccctttcgtccgaagccgcggtttgcgaggtggaagaagcagcatcgccagtattgtcggcagccgaagcgccatcaagcatgatgacatcgcccttgctcacattgccttccacaacggctttggtgttgttcttggctttgaccgtgactcgcacccgcttgaactcatgggtttcggcgttggtctcgagcatgaccgcgctgctctccttaccctcatccacgatggcggcgagcggcaccatcaaagcgttgtcaatgctctgcatggtgattttcacactggccgtcatgcccggcttcagtttcggatcaggggcgggaatgatgagacgcacggcgtatcccacgccgccgttgccactctgcccgcctgccgaggaatcagccaactgcgacgtggtgctggcgatggtatccaccttggcatcgagcgtcagtcccggcaccgcggagaacgtgactttggcgctctggtccttggccactttagtgatatccagctcattgatgttgacattgaccttcatctgactcaggtcggcgatctgacacaatggtttaccgtctgcgccggcggaagtggatgagccatcggaggaagctccgatggcggcaccgggcaccgcgctcatggtcagcaccgtgcccgagaccggagcagtgac

SEQ ID NO: 895 - DNA, 3122 bp, Unknown
  R14_18m  MAG No. k141_26779
gtcgttggcgtggtggcctccatgttcgcgatgcccttggtctccgcgctgtccgaccgcacacgtattcctctgggccgccgtaccccgtggatggtggcgggtggcgtgctgtgcgcgctgatcacgctggttctggggcggaacacaggcctcgtagtgctgtgtttcttctgggcgctcatgcagtttgcctatgcgatgatttccgtgccgttggccagcgccatcagcgaacgggttccggacaaattccgtccgcgcattgagcgctggcacggtatcggcgtgatgcttggccaagcgcttggtgtatgcatgggtgcgctcggcgtgatgttcgactccttcacgccgtttgcctacaccgccgtgctgtttgcggtttccggcatcctgaccgtgatcatgctgcccaaggagccttccagccaggagcagccacatcaacgattcgagtcgagccaggtgtttgaccagctgcgtccgccggcacatgcgcctgcattcgcccgtgtgttcgccgctcgcgtgtgcatgatgacgggcgttgggctgaccggggtctttctgtggtatctcgtgcgcttttgggtgtatggcaaggctgtggtgttcacttccgcgccattgaccattcccgcgggcctcctcatcgccggcatggccgcggcaacgctcatcggtgctgcgctcgcgtcctgggccgctgggccgatctccgagaagatcgaggaacggaacatcgccaccactgcagtggtggcggcatcctgcctgctgtatgccatcggcgtggcggtggcatgggggctcggcgtctggtccaccggcacggcacgcgaaaacggcatgctgctcttcgcgctgatctccggattcgccttcggcgtctacgatgcgttaggccttgaactggtaatggactctttgcccgacccgcgccgagccggccacgacctcggcatttatgcgctcgccaactcggccggtctggcgctcgccgccatcatcggcgcgctactggtgaacgccttcgagcacagcttcggctattacctgctcttcccgtccgccatcgtcatggtgctgctggccggaatcgtcaccctcaccgccgagtccgcgcaatgacgggccgatccggctccccggccgccggcggcgttcctccccgcggcgggggcgttcgtctcggcgacgtggcgtccacaatgtgaacccttgctggattggcaagacagccaaacctatgtttacatttcagttcaggtcgaacggcctgaggaaataccgaaaggaggccacgcgatgactggattcaatgcttctgcgtttgtatccgcacgaattattagcccgtcttcgctggcggactaattcggcattgatgcttgaagccccgtcaacgaaggcagggccaatcaagctgacacaatcggtaaggccctgcaagttgcggggctttttttgttgcgctcacaaggcttacggcagaatcccgcagacggaaacggtagcggacagtacacggcaacaacacagcaacagaacaacaacctccctgtgagacgaaataatcgcccgccaatgagagtgaacgagagcaaaacaggagtaacaatgactgcagcagtcgaagagactggcttagggcaggcggcaggtaaagccgctaccttggtacgcgattcggtcaagaccgtgatcgccgcatcgatggtcggtaccgccatcgaattctatgacttctacgcctacggcaccgccgcggcaaactacttcccgcacaccttcttctccgcgaaggacaaccccaccgtcgcactgctgatgagcttgctgaccttcgccatcgccttcatcgcccgcccgctgggctcgctgatcttcggccacttcggtgaccgcatgggccgcaagaccacgctggtcgtcagcctgatgaccatgggtgtcggcaccttcctgattggctgcctgcccacctacgatcaggtcggcgttggcgcagtcgccatcctctgcctgctgcgcttcatccagggcatcggcctgggcggcgaatggtccggtgcggcactggtcgccaccgagaacgcgcctgaagacaagcgcgcactgtacggctccttcccggagctcggtgccccgatcggcttcttcctgtccaacggcacctacttcgtgctcgaatccttcaacaatcaggacgcgatgctggcttggggctggcgtgtgccgttcctgctgtccgccatcctggtgatcgtcggcctcgtggttcgcgttcacatggaggagaccccgatcttccgtatggctcaggagcagaagaaggtcgtcaagtccccgctgaccgaggtcttccgcaagtcttggcgtcaggtgctgcaggccaccttcctcgtggccgtgacctacacgctgttctacacgctcgccacctggtccctcgcttggggcaccaaggagcagggcgaaggcggcggcggccttggcttcaccaaccaggaatacctgctcatgctcatgatctccatctgcgtgttcgccctgttcatcgtgctgtcctgcctgtacgcggacaagatcggccgcaagcgcgtgctgaccttctcctcctgcgcactcgtcgtgttcgccgcgctcttcccgttcctgctggacggtggtctggtcggccagaagaacttcctcgccaacatggtgttcctgtgcgtcggctttgccctgatgggcgtcgccttcggcccgatcggcgcgttcctgcctgaactgttcgaggcgaacgtgcgctactccggctccggcatcggctacaacctggccgccatcgtcggcgcggcgttcgtgccgaccatcgccacttggctgagctcccactggggcgtccactccgtgggcctctacctcgccgtgatggccgtgtgctgcctggtgtcggtcctgacctgccgtgagacgaaggacgctgactttaccaagtgaaatcctccataactaaatatcgccaagttcacaacgtgaaaaatctcaattccacgaagtgaacccctgcgaggcttttccggtgcaacaggactaaacctgcatatcggaaaagcccacaaggaaagcca

SEQ ID NO: 896 - DNA, 3557 bp, Unknown
  R14_18m  MAG No. k141_27924
catggtcaacctgctcatgcgcttctatgagatttccggcggctcgattgcgattgacggcgtggacaccaagtccgtgccgcgctggaacgtgcacgaccagttctccatggtgctgcaggatacgtgggtgttccgcggcactgtgcgcgagaacatcgcctactccaagcccggcgtgaccaacaagcagatcgaggatgcgtgcaaggccgtgggcctcgaccacttcatccgctcgctgccggacggctatgacaccgtgctcgacgacaagtcgtcgctctcccagggccagaagcagctgctgaccatcgcccgtgcgatggtgcaggacgcgccgattctgattctcgacgaggccacctcctcggtcgatacccgcaccgaagagctgatccagaaggccatggacgcgctgaccgtggggcgtacgagctttgtgatcgcgcaccgcctctccacgattcgcgacgccgacatgattctcgtcatgaaccacggcgacgtgatcgagcgcggcacgcacgacgagctgctggcggcgggcggtttttacgccgacctctacaacagccagttcgcactcgctgactgacggattgtttcctgcgttagcggattagcggattagctatactcggctcccctctccgaggggagctgtcagcgtagctgactgaggggagcaacccatcggtccacccgagggatgtgatactgatgatttcgtgcattagtgtgtgaaaaagccgccgggaaaattgggggattgggcggcggtgcggttggcgttgagaatggcgcattcgaaggggaagtgagcgcgcagctgggtggccggggtggtgaacagggcggtggcgaggccgtcggccagtgtgacagggacgtgtgccgcaacggtgttcgacgaatcgtcggtatcgcggtttgccgttgtcgaggcattgctgccatgcgtcgatgtcttcgtggttatggcgctcgatggcggcgtgacggccacccatgtggcggctacatcgtcaaccggtagtccgtcgatggcgttgagcagatggtgaagttggtgacctgcggcgtcagaccagtggcggcggctgggggagctcgcgcagaatgcgccgtggctgatttcgaccgtacctacggcgttggccggatcggcaggatcttcaagggcgatggtgattggttcgtccgtgtgcactagcaaatcacccccggcgtcgatgacgtattgaatgggttgagggtgacccgcgccatcacccaacatccccacaagcaaatccaccaaataccccttaccgcacgcgccgaaatcgagcgcgaccggtccgcgcgtcaccagtgttgtgccatgccgctcaacgtcggctgaccaaatggctcgttcgtggatcgcgcctgcatgttcagcggcatctggcgcaggcgtaaacgaatacgactcgtcatagccaagccgaatcaaatcctcgcccacgcatgggtcgatggtcccattggtcgacgcaaacagctggtcgtacaggccaaataaacccaatgcccaatcaggaaaatcgaacgtgccgccatgcgtggccgtgcgcatccggccgaccgtcgaatcatccttgaaccgggacaatgcggcttcataggtgctgatgaacatatcgatgcagttactgagcccgtcgtccagtgcgacatcggtatgcagcagcaacccggtgcccagcgcttcggggaaagcggcgacgtgcggtagtcgttcggccagaccagtcatggctctcatcgtagagcctgcggatggctgaggggaaggcggctcggggtgtggattgtggtgtgcggttttgccctgcagggaattgagtgtaaaaccccggtgtatactggtttttgacactgtgtcaatgttgattcggaggttatggggaatgggcaatacgactacagcaagtgtaacgggcgcgcaagttgcaccggcgaaatcagccatcaaagatctccccatcgccaaagtgtgggcgtttgcggtcggccagttcgggtgggcgctgctttccggcatcatctccaactggctcgtgtatttctaccaacctgaccaggagaccatctcccaaggtcagaccgtattcgtgccgcagggcctggtcgttctcggcatcgtgaccgtggtgggcggcatcaccgccttcgcccgattcttcgacgcgttcgtggacccggccgtggcgtccctctccgaccgttgcgacgccaaatccggccgccgtatgccgttcctgaaattcgccgccctgccgctcgcggtggtcaccgtactcgtgttctggagtccgatcaacggcaccggctgggtgaacgcggcgttcctgttcgtcaccgtgatcggctactacatcgtcctcacgttctactgcacgccgtacaacgcgctcatcgccgaactcggccacgactccaagcagcaactcaccatctccaccgccatctccttcacttgggtggccggcacggccatcgcgtacgtggcgccggtgatttggggcgcgttcgtgccgatgatggggcgtatcaccgccatccgcgtgaccttcaccatcatggccgccgtggcgttcgtgtgcatgctggtgccgccgctggccatccgcgagaaggactacgtcaactcccagcccacctccgaatcggccatcgaatccctgaagcagacgttcggcgacggcgaattccgcaagttcgtgtgttccgacgtggtctactgggtggccatcaccaccttccagaccggtctgccgttcttcgtgaccagcctgctcaagctgccggaaaccaccacgaccatctacttcgtgctcatgaccggcgtctccgtgctgttctatctgccggtcaatatcttggccaataaggtcggcaagaagcgcctgctgctggttgccttcgtgatcttcacctgtgcgttcgcatttgccggcgcccttggttcggccgcgctcggcttcattccggcgatggcccagggtttggcgctctcggtggtcggcgcgattccgatggccgcgttcggcattctgccgcaagccatcgtggcgaatatcgccgacgccagctccaagaccaccggccaggaccgtcagggcatgttctacgcggcccgcacctttgcgatgaagatggggcagtccgtggccatgctgctgttcaccggcgtctccaccatcggcatggcgtccggcgcgggctatcgcatcgccgccgtgtgcgcggccgtgctgtgcggcttgggcggcatcgtattcgcgttctacaacgaaaagaaagtgctgcatgtgctggaagcatgatgacgttgccgggtgccaccgcggtatccatgcggagcggtgtgggtgatttaccccgtctgcgacacttcggcgtcaaattgcgtttgaccgcactccgtactatattgttgcgagttgctttgcggagcaaagtaacatccaaggggctgtagctcagttggtagagcgcttcgttcgcatcgaagaggtcgcggtttc

SEQ ID NO: 897 - DNA, 3606 bp, Unknown
  R14_18m  MAG No. k141_28508
gaaatagagagtctccacatacataagttggaaaagtgtataaaactccccattttgaggttggaaaacgtagccaaaaccgcattcttatggttggaaaagtgtaaaatatgcgctataaacagttggaaaacgtgcccaacatagatgcaaggcctacaaatgactggagattctcatgctgcgaagaaaaatcgagacacagctggaagcttggagatccgcgccgaaacgcactgcactgctggtcaccggagcccgtcagattggcaaaacctatatcatcaggcactttgcccaacagcattacgaccatatcgccgagctcaatttcatcgagaaccccgacctcgttgcattattcgatcggccccgcgatgccaaaaacctactgatgaggctggaactggccgtaaatacgccattagtacccggcaaaaccctgattttctttgacgaggtccagcgttgcaaggaaatggtcaccgcaattaagttccttgtagatgatggtcggttcgattacgcgctttccggctcgctacttggagtcgagctcgaagatatacgatcggtaccggtcgggtacctgaccgagctggatatgtatccactggatttccaagagttctgctggtcgcagcatatcggcaacgacgtattcgatatgcttgccgaatgctttgccaagcaccaggaagtggatgagttcattcatcaaaggctcatggagctatactccaaatatctggtcatcggcggcatgcctgccgcagtcgactcgttcgtggcaaacggcagcgttgcggacgtgcgcactatacaagagaacataaagcgtgaatatcgccgcgatatcagccaatacgcgcgcaaagaagaccggccgcatatccgcgctatctacgatttggtgcccagcgagttaaataacccaaacaaacgctttaccttcgccaaaatcgaaaagaacatgagattccaatcggttgcttccgatttcgattggctggtcaatgcggatgtagccgtcgccgcgtacaacgtggacgaaccgtgcacaccgttggagatgagcaaggaacgtaacctcttcaaactcttttacaacgacgtgggtctgcttaccggctcgtttctcaagaaaaccgcgctcgacgtactcgacggcaaccctgatatcaactacggttcaatctatgaaaatgcggtggcccaagagctacgcgctcacggatttgacctgtactactacaacagtaagaagcttggcgagctcgatttcctcatccaagaccgcaacgatcacgtgctgccgattgaggtgaagtccggcaaatcctacaaacgccatcgcgcaatggacaacgtgctcgcccaccctgaataccatctcaatacaggctatgtgcttggcccgtgcaacgtctcagtcgaagggaatgtaacctacctgcctgtatacatggccggcatgttccataacgaatgacgggccgcacacttagtcaacaagtacatgtcggtcagatggttcggactggtcagagggcccgctctgatcagttaggtcggtctgaacggactggctgggctggtcggcctgagtagcccgtttggaccgatccggttcgcccttgctggccttcacactgcttcagctccagctgaagttcgctgatgcgccgttcgagttcgtcgatgcgccgtacttgtggcgaagtgagactgaggggagcctacaaaatgctcacaggccgagggcaccggtcacggccatggcctcgtgttcgggatcggcctggccgatgtgtacgttgacgtgaatttcgtcatcgcccggctcttcgagaatgtcggactgggattgcaacatgctcggcttcatgaagtggccttggcggtgggaaaggcgttccatcacctcgtcgaatgtgccctgcatgtagacgaacaccacgccttgacggcgcagcttgtcgcggtagatcttcttcaacgccgagcaggtgaccacggcgggctcgccggcggccacgcgctcgtcgatccacgcggcgatggtgtcgagccaaggccagcggtcttcgtcggtgagcgggtgtccggcggccatcgagatggtggcgcattcgaaccatgcgaacgaatccgatcaggccatcagccacatcgccggcactgaagcctgacccgtcatcgtcacagcaccacgcggcggttgaggtcgcgacgcagcgtcttccagccgggtaggtaggcggtcatgcggcgttggaatccggcgccgtggccgctttcccacagatgcgtcatctcatggaccaagacgtattccaggaattgcggttccatcactcccaattgaaggttcagacggatgcggccggttcgcggcgtacacgatccccagcgcgaggccatgacccgtagcgtgatatgtgtgggctgccggccgatgaccggcccccacttggccagcagctgtggcaacgcggcgttgatcgcggccgccgcttgtcgtttgcgttcgtcggtccagatttgggagcggtcaaaatacggctggacgttcgtaccggcttggcccggcccggcgtcgccgattctcggacgactgatatcaccggttttcggacggccggcaacgtctccatcatggccgctggcaccagctacgccacgacctccgttctcgaagcctgcaccctcgttcaatgccatgatggagcgccgttgcgcctcagccatgcgctgctgctgggcgagaatccacgaatgtcgctctttgacgaaatccgcgatacgactctcgctcatccgcatcggtgcggagatttcgacgcggccgctcggcggtttgatgcgcaaatacaggtttttgatgggtttgcgcgtcaggtgcagatggatgccgtcaatgtccaacgactgcccggcggcagcggaccgaacggatttcggcgcaccggacttcggagcggtggattgacgacggcgataaggcatgcaagtcattcttgcacaacggcggacaacaagcggcacacaatgccgcccctcacgaatcggcaaccggcgctgctacattcaatccgcataccaactgcccacaccggagaaggtcgcgcaggagaaggcctcgctgctcgagatcgacgacagcttccagaagatcgtcctcgtacgcgacgtggtcaaacccgtccgcgacgaacacggcatcctcacgatgagcgtctacgatttcctcctcgacccggacagcctgacgatgtgacgccggacggccggcaaatgccccggaacgcagccccccactcctcgaacaccgccttcgcggtggccgaggacaccatgacgagacagccgagcatgatggcacccagcagagggtgccgaagttcgcgatgacgtactgccacaggtccgacccgtccgtgtagccgtcgaagcgcagcgcctcgacggggacgagaaatccgtcaagcgcatgcgcggcgtcagatacaccgtcctgaagaaccccggcaagctgaccgacagacggtccgaggcgtccgggaacctgcgggacacggaccccaagggccggccctaccgttc

SEQ ID NO: 898 - DNA, 4871 bp, Unknown
  R117_24m  MAG No. k141_369
cccatggcgatggcggtggccgggctggtcaccgaatccataggggcgccgatcaccggcacatcgaactcataggcgtcgatctgccaagaggtggagacgtcctcggggtcgcgggtgcgacgggaggggacgatcgccacatcgtcgagtgcgtagccgagacggccctttttgcccaaaccgatttcaatttcctgagacatggttgtaagcctattgcccgggtgggacgccaacaaggtcgtttcccacggaccggacgattgcttcaagtcgttacaaacatgcgctatgactaaatcatcttcacaccatctatcaggaggaagcatggccaaaatcaaggtcgaaggcactgtcgtcgaactcgacggcgacgagatgacccgcgtgatctggaaggacatcaaggatcgcctgatcctgccgtacctcgacgtgaacctcgactactacgatctgggcatcgagcaccgcgacgagaccgatgaccaggtgaccatcgacgccgcccacgccatccagaagcaccatgtcggcgtcaagtgcgccaccatcacccccgatgaggcccgagtcaaggaattcggtctcaagaagatgtggaagtcccccaacggcaccatccgcaacatcctgggcggcacgatcttccgcgagcctatcgtgatgagcaacgtacctcgtctggtgcccggctgggccaagccgatcgtcgtggcccgtcacgcattcggcgaccagtacaaggccaccgatttcaaggttccgggcgccggccagctgaccgtcaccttcactccggacgatggctccgagccgattcagcacgtggtctacaactacggcgaagacggcggcgtggcccaggtgcagtacaacgtcaacgattcgatccgcggtttcgcgcgtgcctgcttcaactacggcctgatgcgtcattacccggtgtacctgtccaccaagaacacgattttgaaggcctacgacggccaattcaaggacatcttcgctgaggtgttcgagaccgaatacaaggacaagtacgccgaggccggcctgacttacgagcaccgcctgatcgacgacatggtggccagctccctgaagtggcacggcggttacatctgggcctgcaagaactacgatggcgatgtgcagtccgactccgtggcccagggcttcggttcgctgggcctcatgacctccgtgctcatgaccccggacggccagaccgtcgaggccgaagcggcgcacggcaccgtgacccgtcactaccgccgctggaagaagggcgagaagacctccaccaacccgatcgcctccatcttcgcgtggaccggcggcctcaagcaccgcgccgatctggacggcacgcccgaagtccgtcacttcgccgagacgctggaaaaggtcatcgtcgacaccgttgaaggtggtcagatgaccaaggatctggccatgctcatcggcccggacgaaccgtggctcgacaccgacggcttcatgaacgcgctggacgagaacctggccaaggctctggccgagtaaatcatcgaacacatcgtgcggacctacatgggtcatgtcatgtcgccaactgtcatgattgtcgtgcttcatctggaatgttcctcagcacgacaatcatgacagttgttcgatacacgcgcgaaatacccctaattgttcccggatatgtggcgatttgtccactggtccgggactttttcgtatacggcctactagaatcgtgattcagtttgttttcacgcccgcttgaggaggtttcgccgcttatggtgttcgcacgccgctcaaccaccctgctcgccgccattgtcgcatcctgcgcgatggtgctgtcactgaccgcgtgcacctcagacaataagaccgttgtagatggtcaaaccacggtgacgtccaattctgccggcggcgtggccgtgttcacgccttcggacggcattacgctgaatcagcagacgccactgaacaaatgggcgaagctggtgcccgacctaaccaaggccctggtcgacgccggtttcaagaaaggcgatatcgatcatacgacgtccgactcgttggacaagcaaagccgcgccatccaagactttgtggtcgatcatctttcgaataacaccacggacgattccggcattgccatcgcgcccgacaacatgacattgctcgtggctccagtagtcgaggccgacgcttccactcgccaatacggcgattacatcagccagaacctgagcaccaacgatgccacggatgagggagctacttctgacggtgattcttccgaagacagctcttccaaagatgactcgtccaacactgagagcgacggcactgcatcggacgagcaggcgcaggccgtggaccggctggtctcatcgctcaagctggccaaggaatccggcatgcatgtggtattgctcggcaacagcatcgaggggtataggccggacgccttcgtcaagttctcggacgcccagaccatcggcaagctacaggcggaaaagatggtgtccaaactcaagttggataaggccagtaaagacaaccccaaatacattgaggtgctgctgccatacaccgccgtggacgaaaaaggcaacgccaacgattccccgttcgcccaagaggcgttccgtggtatctggcaggtactgggctcctactatcagaagggcgttgtggaaagcccttcaggcaccttggacggcaaatccacggaaaacgattggcaagccgtggcctacgatgccgccaaggaaggctccactgcgaaagtgcttgacaagcgtctggcaaaaaccgacgggcagtccacactcacccgtattgatggcatcatcacgatgaacgactatatcgcctccgaggtcgtcaaggaattggacgatctgggatacaccggctctgccgccgatatcaatccgcagatcaccatctcgggcattgtcggcaatatcaccggcaagaaggatctcagccgcgacgcagtgccggacccgatcaaatcccctgaaaacgacaacgcaaacgactcatccagttccgatgacgatgcggataaggacacctccgcttccgacaaggaccgtgactcgcaatggcctctggtgaccggatacggcgcgtacgtctcgaacatcccatccatcgtcaatggcaagcaatggatgaccggcatggaagacagacagaccatcgccacggatatcgctcaggcctgcgccaggctcaacaagaacgaagcgctgaattccatgccttcaatcaggaactccgaggtaggcggcgtgaagaagatcccgaccatcaacgaaccgttgctggctgtcagcgccagcaatctcaagtccgcgctgatcgcccccggatatatctccttggccgatgccggtctgtgattcatactcgtcacgccgctagccgcctgcgatgcctcttccgtacggccctgttccggccgacaaacattgctgaatcatgacggcttcagtacgatttttcgactccccgcatattgctgtgggtcaagatagtcggccgttcctcgcttgaggccccaatgcaggcaacggtcttcgcaatggtccgagttgccctcaacgatgcctacgggctgtctgcgggagatcgtatcccccaccgagagctcggtaacagccggttcgaatgtcgacgtgacacctccacgatgccgtacactcaccgcatctttgccagctactttgccagcaaaactcacggtccctgcctgtggtgacagaatcacggtaccttgctccgcagcaagatccacgccacgatgacctggtgcccacgggttgatcggccgctcgaactgttgttcgacctgtggatcgtcgaccggccagtcgaaccgggattcgcactgattgccattgcgccacgccagatcagacatatcggtgaaatcctccaccgtgtatgccgcatctccggtcaccgcagtatccgcatgcgcaacatgctgaggcgtggatgccagtcccactcccaaggcaagcagcaggccgataacggcggccaacgcgattatggcatccatacgccgttgccgttcctgagcccgctgacgcgcctgctgacgccgcctgctggcacgtcgggcttcgtcgcgacgccaatcaaacaacagtggtgcattcatgagattcctccccatagtgtgagtgtgatgcgattccggcttctttgccggtgatacccaccttgaggggtccgaaacaggatgtccagccagaacgacctatgtggttccagcttccgaagttatccacaatgaaatttcgcgtgacagtatcgccgcatcgtcatcatgttgtatgagtgggtattcgatgagtccgattctgcggaattcagcgcgacatgccctacacgcatgtaatttgctttttcgtggcaagcatgtaagatatgtgacttgtgcgcgagagaaatctcaaacacagcagatattcctgcgtagctcagttggcagagcatccgactgttaatcggacggtcgctggttcaagcccagccgcaggagctcacctgaagccaccggcgtgtcgccggtggcttttctgttactcattccctgaagctgcttcattcacgtgagaaaataccggtcggcggtaccacgatgcgcgccgatcgccattcaaacgaggacagtcatggaccgtcacgggttcgcccgctacgagcccttcacgattcagaaaccctacattattctacggaatctgtcacttctgcagattcggcattccggccttataccagagcaccgcgataccaacacgttctttgacatcgagcttggcaag

SEQ ID NO: 899 - DNA, 46903 bp, Unknown
  R117_24m  MAG No. k141_446
gcgttcggggtgccggtcatgatgacgtcaccaggcagcagcgtggagaacgacgaaatcgcggcaatctgctcggggatgccgtgaatcaggttcgcggtggtgccagacgccatcggcacatcctcgccgttcagcgtgaaggaaatcttggcgtccttccagtcgaggtcgtcacgcatcacaatccacgggccaagcgggcaggaagtatcgaagcccttggcgcgcgtccacgtggggtcgatgccctgcaggtcgcgcaacgtcacgtcgttcacgcaggtgaagccgagcacgtaatccatcgcgttttcaacggacacgttcttggcgatacggcccatcaccacggccacttccggctcgaagttcatgtccttggagcaggccgggtacacgatcggatcgtcggggccaatcaccgaggtggacggcttggtgaagatcaccatgtcttccggcgcgtgggcgatttcggagtggccggcctcgtgcatgaactgggcgtgggcctcgtagttcttggccagaccgtaaaccttggaggggatgaccggggagagcaggcggatgccgtcgccgtcgaccgggtaacgagtgccggtgggcttgacctggtcgccggccagcggatgaccgtcaagttcgatgaggtagtccttgccgtccgtttcgtccttctgcacgaaggcgtagcgcggcgaatcattcaaagaaaaacgtgcgagtctcatgcctgtaagcctactccttggcagttccttccgcagaagcatccgtccaaggagcaagcagaccggccttcaatcgaccaaaacgcacgttcgctgggattgctacttttcggtccaggttttgtcgtacagcgactggccgctttgcgtgtgcatgatgacgcgcaacgatgccttgccgctggaggtcttgcacatcgagcccagcagattcgcggtggattgataggtgctgttcatagcatccagtgaggaagcgacggtatcgcctagcgaggcatagcggtcgtcgagcacgtactcgtacaccaaggtgtcaccgtcgacacggtagttgaaggtgatgccggtatctgcaaacgtatccgcttcggattcaatggagtccttgaattccgaatagtcgacgaaatcctgaatcgaatcgtacagcccataatcgccgtcggttagatcgtcatgggtttcgcccaacgtgtcgtccagcgcatcgtcaagattatcttgagctttgctcttatcgctgctatcaccgttgcccgaagaggactgactatagaaggaatcggttttcgcctcatctatagccttgctggtgtacgagacaccgccgacgatcagcgcgatgaccagtattacctgtatcaccatgcccgccgcactgatgatgatgccggcgatggccaagcccttgcccttgccgccctgtttcttaatctggttgaggcccacgatgctcaggatcagaccggggagtgagacaaggaacgagcagataaaaccggcaatagccaggccgttgtacttctggttcgcttcaggcggcacactgccgtaagaaccagaccatcccggctggccgttcggttggccgccttgcatatacgggttatagggcgtttgcggaggcacggccccgccgcccggataccgagcactgacgctgccgtagaccggaggaaccgatccgcctgccggagccgtccccggatagggcgaattgggtgctgctggtgcgggcgcaggcgcgggcgctgtcggtgcgggcgcgggcgcagcggcaggagtcactggtggcaaagcctgcgtaggcggtaccggctgattgaccggcgcaagaggctgggtggactgctcggcaggtgtaaacgcctgcgtaggctgctcaacaggagtgaacgcctgagtgggctgttcgcccgctgcgagtgcttgggttggagcattgttggcggcggttcctgcttcccccgtcatcgcatttaacggctcagtcggattggcgtcagctcgctgccccggcacctggccgttcggattggcattcggatcagtcatgacatgcactccttcaactgcatcgcaccccacttgcgagatacgcccctcgtcttacgcgccacattgtgcgttacagacaactgtactcctcgtggcgagccttaagtaccccaggaaatttggcttcccaaaaaacacagaagcctgaaaccggctattgcctcagcaatattcagtcggtttcaagctaaatcgttaatcctctggtgaaacgacggtctacttcttcagcagcggcgcgacctgttcctcgtaggcggtcagggcggtgtcgatcacctggtgcatgtcatagtacttgtaggtgcccaagcggccgccgaacacggtgtttggctcggccgcggccttggcctcgtaccgcgcgtacagggccttgtccgcgtccgtgttcaccgggtagtacggttcgtcgccgcgctcggcgaaacggctgtactcctcccacaccacggtcttgtccgggttctgggcatcgcggcgctccgggttgaagttcttgaactcgatcgcgcgcgtgtacggcacgtccgcgtccgagaagttcatcaccgggcaaccgaaatggtcgccctcatcgtaacggacctccttgaagtccaccgtgcgccacttcaggtcgccaagctcgtaaccgaagtaacggtcgaccggacccgtgtagaccaccggcacgcccgcggcccgcagggccttcttgttgtacggctgggattcgtcgaagaagtccacgcccagcgaaaccgtgatgcgcggatcgtcgatcatgcgttccatccacttggtgtagccgtccgcgggcagaccctcccacgtgtccttgaaatagcggttgtcgtagttgaagcgcaccggcagacgcttgacgatcgacgcgggcagctcggcaggatcggtctgccactgcttgcccgtgtagttcttgatgaacgcctcgtacaggggacggccgatgagctggatgcccttgtcgttgaggttctgcggatcggtgccggccagctcgcccgcctgctcggcgataagcttctgtgcctcggccggcgtgtaacgcgcgtggaagaactgattgatggtgcccaggttgatcggcagcggatagacctcgccgtcatgcgtggcatacacgcgatgcacgtagtcggtgaacgaggtgaaacgattcacgtaatcccacacccgcctgttggacgtgtggaacaggtgcgcgccatacttgtggatctccgcgccggtctcctcatccatatacgagtaggcgttgccgccgatgtggtcgcggatgtcgatgatatgcacacgggcacccgcatgctccaccgcctgctgcgccaccgtcaggccaaacaggcccgcgccgacaatgacgagatcggggtactgcgcgccctccgacgggccgtgctgcgtattctccgccgcatttgccatgactcaaaacctttcatgattccatgtgcaattccacacgcgtttcattgtccaccagtatagcgagaagcacctatgtacatatgcgattccgaattcagcggctcctataggcttccggcttgtgcaggctgggttttcggctttacttggtgcacgcgcgacgtgcgcctaccctgtggcatactgttcatgtccgcataaacagggcggcctgccggctacgaccgcagggcgcagacacgtgaagaaggattcgccatgacgcaggtttcgccgcttgtctcgatcgtcgtgccggtgtacaacgccgagaaatacctacgttactgcgtggactcgattcttcagcagtcgtatgagcatctggagatcatcctcgtggacgacggcgccaccgattccagcccgatgattctggacgaataccagcggcgagacaatcgcgtgcgcgtcatccaccagacgaacggcggcatcgcgaaggctcagaacgccggattggatgcggcgcatggcgagtacatcgcattcgccgacaacgacgatatcctcgaccgtcgcaacatcgagttgctgctgcacgcgctgatttctaccggcgcggatatgagcaaggcccgctggaggcagttcggcgtctcccagatcgaggaagtcgcgatggaagccagtgaaggcgccgccgaacccgaacatgtgagcgtgtccacgaatccgctgcgtgcctaccagaccgtgttctgcaagagcctgcgcctgatcggagacaagctcgggcgcaacacggaggcccgctatttcaacgaggcgaactggtgccgcctgtacaagcgcgaactgtgggacggcgtgcgattcccggagggcatgtacgcgcaggacgtgatggtcgccggcgaactgtacgcccgcatgaacaaagtcgccgacctcaacgtgaacctgtacaactggctgcagtccgccggatcagtcacacatcaggaacgcagcttcggtttctaccatgacaatttcgccgctggcgcgcacaacttccgcttctgcctgaatcacggcgtgctgccgatgcgcagctactacacgatggtgggagcctgcacggaagaggccacgtcccccgacttcaacctgcccgagaatcaggcccagcacaaggccgataaggcggaactcgatcagctgctcgccaacctttcccgccagcagcgtttccgctgcactattacccgccgcatccgcctgctggagaaatacgtctacgaccgcaaggtcaagaacatgaagtaagcaagtagggattcactccatcattcgatccatctcagcatgagctgggcacgctacctccgttgttgtgattgacactgttcctatctgatattggaaacggaaccaatcgtatgtaccgcaatgccccacatacgttcaaaaacaccttcccgattgaagataatcgcaaacaacgatttgcgaattacctcgagcatgagcgcgacgacgaaaacgaaggcagaaatcgccagcatccatacaatcggcaatctcgtctggtagtacttatcgaaggcaaaccactgagtccaaagcaattcgcggacgaacggatgatccgtaataagatacacccccagagtccaagatgccacggaattgaccagtctcgagcggaaccgcatacgggagaaggcgatgaacataccaaaactgacacctaacaccggcaatgaccattctctatccaatggggccggctccggtatgaagctcagcccatcgaaagccggcacgaactacacatcaccgaactatttcatggaaatggccagtgagcacatgaacgcgaaagtgtctccttatctcgcgttcctgtccaccgtacgcaccaagctgcctgccgtggaacgactcgtgctcggcgagggcggtttcacgaacgatacatccaccacatatctggacaagaacggcgatgttgtgaaacgcaaggacctctccaaacagcagaaaaccctgctcaaagagtatcggctcatccaatacgacatgactgccggcaaaggttatctcgccaataccgatttcttcaatgtaccgaacacacagcataggtaagaaggcatcgtcacgtagttcagttcacgatagaatcacgtagcatctttactgttgcgctccgaccacggctagaattacgtgtagcgcatcgtagaaggagtgtcccgtgaagattgcggttgccggtactggttacgtcggattgtcggtggcgttgctgctgtcgcaacataatgaggtgcacgcgttggacatcgtgcctgagaaggtcgagctgctcaacaacggcaagagccccatcgtggatagcaagatcaccgcattcctcgatgcggaccggtccggcgagcggccgttggacttccaggcgacgctcgacccggaacaggcgtatacgggagcggattacgcagtgatagccacgccgacgaattacgacgcccagaagaattacttcgacacgtccagcgtggaggcggcgatcgaggcaatccgcaagtacgaccaaaccgcatggatcgtcatcaagtcgacgattccggttggttacacccagcagattcgcgaacggttccacgatgaccgtatcctgttctctccggaattcctgcgtgagggccacgccctgtacgacaatctgcatccgagccgcatcgtggtcggcgcgccgcaggatgatgcggaggccgtgcaggcggcgcacacgttcgtggacctgctcgcccacggtgccgccccggaggagaaggaccgcgtcaacccggatgggtcgaggggcatcccccagctggtggtcggtaccactgaggcggaggcgatcaagctgttcgccaatacctatctcgcgttgcgcgtcgcctatttcaacgagttggacacgtatgcggaaagccgcggtctcaacacgcacgaaatcatcaagggcgtgtgcatggatccgcgtatccgcgacgattacaacaacccaagcttcggctatggcggctactgcctcccgaaggacacgaagcagctgctcgccaattacgataaggtgccgcagaacctcatcgaggcgattgtggagtcgaaccgcacacgtaaggacttcatcgcctacgaaatcgaggagctcgtcgaccgggccaaggcgaacggcatcgccaaacctgtggtgggagtatatcgtctgacgatgaagagcggttccgataatttccgtcagtccgccatccaaggcgtgatgaagcgcatcaagtcgcgcggcatcgaggtcgtcgtctatgagccgacgctcgacgcccccgatttcttcggcagcaaggtcacgcacgacttggactcgttcaaacgcgaagcggacgtgatcatctccaaccgttggaacgacgacctcaaggacgtggcaggcaaggtctacacaagggacctgttccgcagggactgatcgaatcgttctgagtagtccggaagtggagatacctagaatcgcgtgattcgcgtcagacgaataagcgttgtcccgtctcttcctccgaagaggcgggacaacgcttattcctgcgtttatttccgcacatacgaaattgaggaaagcccaatccccgacatgaacaacataatcggaaggaactgtatcagatacctggaatgcccggattcaaaaatcagtaaaaaaatgattgcaccgaccatggcaatggcgagccatacatcgtaagaaacatgttctccgaacttctctatcgaaagtacctcttcctccttaaagaaagtcctagacattctcaaacaattcatcaggattccactcaccaacaaaatatagaaaatctgctctatctgaatcagcgttctgttggagttggaaccgccagtgtaaagatgggatactttttggataaaaagattttcatggacggcgttcagtggctcattcgcaaatggtctaggcaggaagacattgccggcatatcgctgaacgccgaacgagccatccgaggtgaagtttctgaacttcgtcagcagaaaagtggagtatcctacaacgccatattggcgcagcctctgcttgatgacggcattgttcgcatccaccttctcctgatacgtgagatgcgacatggtgaattggtactcggattccaaatatccgccggtgccggtcattcccatcatgacataatgctgtggggacagcgacagctcatggttgtaggggacgagctgctgagtgcggacagcatggttgtagggaacattcgcacacaggaagccaccggccatgagaatgagtgacgccagcaatgcgacgcagtgtcggcgattcattttcagaagcaatgcaaccaacaatgcgattacaggaatcacagctgatggcttcaagttataggtgaccgccagattcaggccaaacaggaagataagaaccggattcttccaactggacagaaaagccttatcaatggttttctgcgacagcagccagaagcagaaagcgcagttgatcaccgtgaacggcatgcaaaaggtatcgctgtacggatgcaggcaccatcccgacaggccgaggaggatacaccaaagcaggagaacgatattggctaccgaatcattaagataccgcttggccactgcatacattccgatagcacaaacgtcaactaccagaacggaaatcactcgcattacaagcaacagcgcttcaagcgcttgtcacaaagggaagagccttgtaaatcccgagttcaacgaagaacaggaggtagttgttaggggaattggaaagataggaagctccgtccaaccctttgtccgtaatgacttgcggattgacgacatagtcaataacccattcggcatcaaagcccgttgccggccctaatgcgaagaacatcacgatttgccagcaaatcacgatgacgaaaagaatccacttatacctcaccatcatatgccagatgccacgaacggcctgtctcacttttgcaaacaccgataccgccacaatgaatacaagcagaacaaccagcaaaatcgttgaataacgattattcccactcacatcaatgtcaatcatttgtggcgacgtcgccctgatcgcgcagtaccaccaccacagcatcataacgctgaggcaaaagaagccggaaccaatcagtatccgtcgccatccggtggtcatatcatcgacggtttcactcatatgtttatgtttaattgtcatcattggctccaatccacaaaacgaaagcacatacgaattgaggccggcaatagtcacttagctatattgccgacctcaatcgagctgcagacaccatccgattcgaacgaaaagacgcctcgtcactgaatcatcttgaattgcagagcgcggtcgctcaacaacgcgtaggtcttgttcctgttgtttcggacagcgaagaagcaggaattgtcgtcattggtgaaggcgatcatatccgtcctgttggggtcttcgggattgtccagacgcaacgagacaagcagtttgaaatcactgttgttgaagtcgctgaccggaatctcaaaaccaacacgttgccgtccacgctgcttcatcggcaccgaacccgaatcgcagacgacgccacctcgtttcgtgtcaatcaaagaaatggccagatagaaggaaacatcctccgcgaactcgtattcgacatcgaagcggaacggttcaacaccatccgacagctggttggaaaccggccagatcttcaggaacggaacacgtgcattcagaccggtcggatacgcattatccgcatcgtcttccttttcggttttcttcgttgcgaaattctccaacgtgtaacggtccgccaccacgtccttatcaccacgctcgatgatttcgccgttcttaatcagaatggccttattgcagtacttcttcaccgagtccatgctgtgcgtcaccagaatgaccgtcttggtcggatccttcttgacctcagagaagaagttgtcgcacttgcgttggaacgcctcatcaccgacggcaagcacctcgtcgagcacaagaatgtcgccctgggctttgatggccacggagaacgccagtcgcacctgcataccgctggagtaattcttcagcttctggtccatgaactcgcccagttcggcgaactcgacgatatcgtcatacatggcggcgatttcgtcacgggtgaagccgagcagcgcaccgttgagatacacgttctcacgtccggtcagttcggggttgaaccccacgccaagctcgatgaacggcaccagcttgcctcggacatccaccgtgccctgttccggcacataaatttgggagatgattttcagcagggtggattttccggaaccattacgtccgacgatgccgaagaagtcgccctgatgcacttcgaagctgatatcgcggagcaccttctgttcggtatagcccttaatgcccttggtccagttcaggaaggccatcttcaggccgctggcctgttccgtcggcagacggaaggatttggcgacatggtcgaccttcagcacgaccggacgttcatccgccacatctgcagccgtggcggcgttgccagtattgacgttattctcaacgacagtcatcagagcacctccgcgaacttggcactatgcttgcggaacacgtggataccgaaccacagaatcactacagacagcatgtacggcaacaagcacagcaaacggttgtccaccagcgtccaaatcgtcggcacgtcctccggtgagatgagattatgtcggatatccatgatcgtctgcgtggttggaaccaacatgagcagcttggtcacccaagccagttcaggcgcacgctgggtgatcatcgtaatcgggtagatgataggcgtggcgtagaacatcgcctgcaaaacgacttcccaaatatgcgcgacatcacggaaatacacgtacagcgtggccaacaccagagccacgccgagtgcgatcgcatatagctgcaggatattcaatgggaccagaagcacatgccacgtgtaatgcgcattggcgaagaagccgaacacgatgacgaccagcaggttgatggccagggaaatcatggcgcccatcgtggtggaggcgacgatgatgtagttggggaaatgaatcttgcgaagcagatcaccgcggttcacaatcgcggacatgcccatggatgtggattcattgaagaagctccacaggcaggtaccgcataacagcgagatggcgaagctcggtgtaccgtcggagaacttcaggaatcggacgaacaccatgtacatcaccgcgaacaacatcagcggcttcagcaccgaccacagtactccaaggaaggaaccttggtagcgcaactggaaatcggttttcacaagctccttgaacaccaccagtgagtaatggtaacggtcgcggagtctgtcccatgctttcttcataaacaccttattctactcagacaggggatttcccgactttctccgccgaatccacctgccactcgtctctatcgatgcaaaccggagcgtactttcttcagcaccgcatatgccgtgcgaatcggcacccaagcggctttcctcaaccggctctgcataggtttgggtagcgggtaagtcaccgcacggaacactttaccgagcgcaagatgcgtcgtacggcgcagccggccaacgaacgtcaacgacgacctcaggctgccgaggctctccatcacgctttcgccgcgtcgcacgccactggtggtgtccatgaagccctgcgcggtgtagtacagggagtccacttcgatgcgtgcgtacttgtcggacatcacccatgcagggtaatacccctgcgattgggcgatatagccattggcccgttcgatggcgtgcgagatggtgccatcgacacccatcttgccttccggcaggaagtcctcgtaccgccacccatattcgtagaggggcttcaacgcttccacacggaaccaatagcacgatccgatggcggatacgctgggcttgcgttcatccagaggaacgtggatgtgaagcttgttttccagcagatccttggtgatgtcgaagttgatgccccaatcgtgcggcaccgtatgcgcgaaataaagggcgtggataggcggcggcggagtcgccatacccaagcgcggattattcgcgaacaacgtcaatatattccgcacataatccttggagccgagcgtgttctccagcagcttgtaggcgaatccttcggtctcggtcccctgatgcccgttctgctggttctgcccggacttcttgtcgtgcgcgaaaccgacgacatcatattttccaccgagaacgacgtctttcgctccgacgagcagcgccgacacgtcacgaccgcggttttgcaccgggatgaaatcgaccgtatgagtgaagccacgcttatccattgccttgcggatgtcgtcgattttcgactcattcgtcgtgatgtacaggtcggtgtcctcaggcagattggcaagatatcccagcgtctggtccagcaagtcgaggaaatagacgtggtagatgaacgccgaacgcaccggagcatccccgtcctcacgaggattgacggtacgggtcggcaacacgtagttgagatgcacggcttttgcgatatccgcaatattgtatgccggcagtaccgcgtcccatatcagatcggtgtcgtaatcggtatgccggcgcagatactccaacagttccataccgggctgaccggcggtctggttgaaatagtactggtattcaacgaagaaggaacgcttcttgaacaccgggcatcggtcgtcgcgaatcagggaaaccgggtcgtacagcatcggatacgtcgaacgcgaccggtacttgtcatagtcgatatatgaggcccaggtaaatccaagatcggcgaaccgtttggtgaacgtcatctcatgcttacgtgtcgcctccgcgtagtcttcatacacgggcatggtttcccaataacgctggaacgctttggaagtgatcagggatttccgatacgcatgccaatatgattgcagatgcgtcggaatctcctcgccgaaggcgacgtcgtgcggatatgcggtgatgccccagaaatcaacgttcttgccgtccattgtttcgaacatctccgagaacggaaaaaccggtcccagaatcgtatcgttcaggcagatgacctcatcgtaggcggcaagcttgctccacccgattgaaagcagcgcttggcggtatgcggcgatatcaaggcccttgttctcacgaacgatgatcctatcagcgaatcgttcaagcctcttacgagagtccgcgtccagttcgccgttggcgacgatgaccagctggtccagtgatttcacgagcttgctcaggaaataatccacgtagcgcgctacatgaccgtatttggcgtagatgcagtaaataccgcatcgtttccattgacgtcctttggatggcacagtcatatctccgttccttttaacggtgaagaatccgatgcgcggcacggcgcagtaggttacgtcgttcgctaccttccgggaacaccgcatcaaccacacggcgaatgggcgttcctgttttcaacacgcggcgttgctcttccagctggagttgctgccgatatcgctcttgttgctcggctattttcgcctgtttgatttcgaactcgtgcttgtccagtttccctttcaacgcgaggaaaccgttcacgcgttgctgaataaccgtatcggaaatgccgttcaaatccagactgttcagcaacgtcaaccagcgacgatacggatccgcatccgacgggaccgcatcatggtcgacgaaccactgcgcacgtgccgtaagagaatccaacaacatgtaagcggtattctcatcaccccaaacacggcgcagcgaacgcataccggcaatctgatcggtctccgtcaacctcatcacccattcacgtcccacgattccaagcaccacatgcctgtaccattgcgcgcaacgagtcatgttgtcgtcaccggagtcggccgcataccgcagcacagcattcatggaggaatggattcccgtatggccatgctcgaatttctgcaacgtctcaagaccggaaccggacaccccggcacccagattgtagcgaagaccacggtattccatgaagaaccgcattgttttcgcccgtgaagccaatacgaagaactcgtatgaatcctgcatgcgtccaagcggttcatcatacgttgcggcgaatccactacgaacgaattcgccgtcgaacatgcagtcgataagactccacgtgttgcgggttccgaaatcttcggagaacaccgacctcagcacatcctcaccatgcatgtcttcggtatgtagattgaacgaccgctcctcctggagcgccgtatcctgattggccgaaccgtgggggaccacggtacgaccgaatcgcagaatatcgaaattccgaccggacgcatatgaggaaagcacttcgcatgcggtatcctgcagacggtcgtcaccatccacgaacaccacgtacttaccggtggcatgggagacgcccgtacgccgggcaagatgcgcaccctcatttttgtctttagcgatcaacgagaagcgtgaatcattctgtatcgcggattcgatgaccgatttcgtggaatcggtgctcgcatcgtccacaacaacgacctcgaaatccggattggtctggttttgcagactctgcaggcaatcggcaatatatcgctcgacgttatacgcaatgacgacaaatgaaacggtgggcatacttcttcctccgtgcgaaaacttcaaacggcttcaggcagctttcggcttaacgatgatcttgtcgtcggccacatctttgaggtgcttgccgtacgggctcttgccgtacttctcggcggcctcaaacaactgttcgcgggtaatccagccgttctcataggcgatttcctcggccacggcgatgggcaggccctgcgcgcgctgcacggtgcgcacgaactcgcctgcctcgtacagggagtccatcgtgccagtgtccagccacgcgtagccgcggcccagcgtacgcacgttcagcgcgcccgcctccaggtacatcttgttcaaatcggtgatctccaactcgcctcgcgaggacggtttcacctgcttggcaaactccaccacgcgctcgtcgtagaagtacaggcccgtcaccgcgtagttcgacttcggatgcttgggtttctcctcgatggacacggccttcttgtccgcgtcgaactcgaccacgccgtaacgttccggatcgtccacgtagtagccgaacacggacgcgccctcgccgttctccgccttcgccttcgccttgcgcagcgtggcgcccagtccattgccgtagaagatgttgtcgccgagcacgagcgcgcacggctcgcccgcgatgaactcctcgcccagcaggaacgcctgcgccagaccatccggggacggctgcaccacgtaggagaatttcacaccgtactggctgccgtcgccaagcaggcgttcgaaattcggcaggtccttcggcgtggagatgatgagaatgtcacgggtaccggccatcatgagcacgctcagcggatagtagatcatcggcttgtcgtacaccgggagcagctgcttcgatgtcaccgtcgtcaacggatacagcctcgtacccgagccaccggcgagaatgatgcctttcataaggacctgctttcttcacagtcataatcagctcacaccagcttagccaagacagtggcgaaacagaaaaccgcgcaggtcattctgcgcggttttcacactgacatcaggctgtcggaatgggctgacagacctttccagtttgccctatctgtcctacttgccgagttccttgctcacgtatgcttccaaggtttcctcccagtcggcgggcgtgtagccggcggcctcgatcttggacaggtcgagcgcggaatgcttgggacgcgggctgaccggcgagttcgcgttcgcgaagtactcggccgtgctgatcggcttgaccttctccccgttgccgttcgtcagttcgaacacgcgggacgcaatctgcgcccagttcctcaccgcgccggaaccggtcaggttgtacgtgccgtacggggcatgcgagtccagcaggtggaagatcgcctcggccatgtccttcgtgaacgtgagacgcccgtactggtcgtctaccaccgtcacctgctccagctggtcgtccgggttcgcgacacggtccgacagcatcatcatcgtcttcacgaagttgcggccctctccgatcacccagctggaacgcaggatgtaatgttccggcgcgttcgccaccgcgatgtcgcccgcagccttcgtctgcccgtacacgcccaacggcgagaacgcctcatcctctgaatgcaggtccgcggtgccgtcgaacacgtagtcggagctcacatgcaccagcgtgatgtgatggtccttcgcgaccctcgcgagcagggccgggccctgcacgttcgccttccacgccgccggacggccctccgcggtctccgccttatccacggccgtgtacgcgcccgcgttgatgatcgtgccgtacaggctccaatcgtacttgtcgtacgcggccggatcggagaagtcgaactcgtcgatgtccgtgtactcgaaaccacgcagaccatgcgcctccgcgtacgcgcggaccgcacggcccaactggccgttgcagcccgtcaccagcgtgcgcttcggctccatcggcttggcgtccttgagcatcggatgatgcaggtccgcctcggagcgttcgctctcctccagcgggatgggccagtggatgttcagctccgggtcggcgaggttgacgaacgtgtacgtcttcttctgctctaacgaccagtgcgcgttcaccagatacgtgtacacggtgccatcggccaatgcctggaagctgttgcccacgccacgcggcacatagattgcgcgagacgggtccaggcgggtcgtgtacacctggccgaagctctcccccggccgcaggtccacccacgcgccgaagatctcaccggccgcgatgctgatgtacttgtcccatggctccgcgtggatgccgcgcgtcacgcccttcgtcgcgttaaacgagatattgttctgcaccggaccgaaatccggcagacccaacgcggtcatcttcgcacgctgccagttctccttgaaccagccacgattgtcaccatgcaccggcaggtcgaacaccaacaggcccgggatgttcgtctcctcgaccttcaagtccttctcgaattcgaacgacatacgttccctactttctatcttcagaatcgttttgccacgttgctatgcagcgtgcaggattaagcgttttcaaggcctcccctttatcggggaaagcccaattcgggcattcggggcccaaggcatcgaggatgaagaacatgtcgtatctcagtttcgcgaactcgacccgcagaaggttctcatcatgaccgatacggttgcggatggtacgaaccgatttgaggcggtccaccagttccttgcgcagcctgtcctcaaacgggtcgccgtcgttgccgggaagccttcccttcggcatacgacgcagttccgacgcccatgcatccgcgatgttggggaacgcgcccatgaggacatgggcgagttcagggtccttgccggaacgggacaacatgccatcccacgtgcccaatgtcaattgggagaacacgtcgtcgcgggtgatcacatccccgtgccttggatgcgtctggtcggaacgccaatgccgctgcttgcgcaatgccgtgttccgggcctccgcgatatagtcgcgctcggggctgttgatcaaagcccgtatcctcccgatcggatcgcttttgccggcttcaagccagtccgggatgcccgttatctgctgcccggacacccattcgcaaagccggtgatcgattgcgtttctgacgaatatctcgatatagccgatataaccgattgtggtggcggatgcctccacgttccagcggtacagcctcaccgccagaccgaccagccgttcccgatcgactgtatccacatgccgtcttgcataatcgagatacacccggaaccgcgcgtcagcaagaaaacgactcgccatcacggcattgtccgcttgctttttcaaattcatatgtgtatctttcttagtgctataggggccacaccttcgaggtgtggccattttcatattccgctcactgaccctgctgcttgtatttggcttcggtggcggccttggcgggctcccaccaggcgcggttgtccgtgtaccacttgatggtctgctccaggcccttctggaagtccgtgtgcaccggcttccagccgagctcggtctgcagcttggtgctgtcgatcgcgtagcggcggtcgtggccgggacggtccttgacccagtcgaatgagtcaggatcctggcccatcacggtcaggatgtcgcgcagcaccgtgatgttgttgcgctccccgttcgcgccgatcagatacgtctcacccaagcgtcccttggtcaggatggtccacacgccggtggagtggtcgtccgtgtggatccagtcgcgcacgttctccccgttgccgtacagcttcgggcgcaatccctcgaggatgttcgtgatctggcgggggatgaacttctccacatgctggtatgggccgtagttgttgctgcagttgctgatcgtggcgcggatgccgaacgtgcggtgccaggcgcgcaccagcaggtccgagctcgccttcgtcgacgaatacgggctcgagggatggtacggggtctcctccgtgaacttgttcggatcatccagggccaggtcgccgtacacctcgtccgtgctcacgtggtggtagcgcacatcgtacttgcgggccgcctccaacaggcggaacgtgccctccacattcgtcttcaggaacggctccgggttcgcgatcgagttgtcgttgtgggattccgccgcgtagtgcacgatcgcgtcatgacccggcacgatcttgtcgagcagctcggcgtcgcagatgttcccatgcacgaactccacgcggtcacccaagatgcccttgatgttctccaggttgcccgcatacgtcagcgcgtccagcaccgtgacatgcacgtccggatggttgttgtacacgtaatgaacgaaattcgacccgatgaacccacagccaccggtcacaatgatgttatgaggagtaaacacttcatcagccatgggcactatggtaccgttgcgcccgtacggacgacatcggtgacgtgtagcctctgtggccgttgctccggtcgattcctcacatagagggaacgacgtatcctagacacagcatctgtcagcgaaagaaagtagctcatccatgtctgaagacatcaagctgttcgtctcctgtcataaactggacacgcatattcccgacaatgccctgctgcagcccattcaggtgggagcggctctcgccgcttcccggatgcccaatctgctgcatgatgatgagggcgattccatctccgagaagaaccgctcctactgcgagctgaccggccagtattgggcttggcagaacaccgacgcggattattacggcttcctgcactaccgcaggtacttcaacttctccaaaaccgaatatccgattcatcacgagccgttcattttcggtgatgtgacgttcgaccgcaatgacgatgagacgttgcagcgaatcgacttcaatgaggaagccatgcgcaaggtcatcaccgcccatgatttcatcgcccccgaaccgatcgaagcgttggagaaaaccaccgtctacgaacagtaccgggattccttcggccaccatatcgaagaccttgataccgtgatggataacatccgtctgaagtacccggatatctggccgagcgcgcagaagtatctcaaccagacgaaggtatatgtctgcaatatgttcgtgatgcgtcgcgaactgttccgcgcatactccgcgttcctgttcgacgtgctgtccacgcacgaaaagatgcgcgacttctctcattattctccggtggctcgccgtgtctccggctaccttggagagcgcatttgcggcatgtacctcacgtatctgtatgacaagggctatgacggcatcgatctgcagcgcgtctacttccgcaacaccgatgacggacagcggcctgccactgcaaccggcaccaccggcgaaatcgaaacgctgaattttggcgcgacggtgcgtggaccgggcaaaatctattccgcgattcatgcggaacatctctccgacgattggcagttccgcatcagctcgaccacgtccgacggcaagcaggttcctgcgaaggtcgtacaggccgccagcgacccggtcgcggtgtttcccatcgtcgcgcaatctcagacggtgtccgtgagcgcggtagactcggatggacgcacgcgcgcgcagggttccaaaacgttcaacaggcgagccgcgcagctgatgtcctatgccaataggctgtcgcataacgcggaggcttcgacgattcacaattgcgataaagcgatgctattgggtgattcacatgtcgttgtggatgcgcttatcaataacctcgatgccacagacatcatccacggccatgtctccgttccgctggtaggcgacgaaagcgcgaaggattatgtggatatcatcgcgctcgacggccaaggcaaccagatttccatgggcgattggatttgcatgggcgaagagctcgacaccgatccggctcttcccggattgcgcgtgcgtaagatctcctattcgctgcatatcccccaagtcgatacgttcatcgtctgggtgaagttcccggacagcgaccgtcaggattcgttcctgtgctctttgccgctgcaaacgcacttgatgcaccaccagtgggccacacagacggagccggcctgtgccgctggcgattacgataagtggttccgtacccgccagcgcgcttcggctaacgagctggagattcagcagcgcacggttttcgatgtccagccgaagtattccatcatcgtgccgttgtataagacgccgattcagttcctgcatgccatggccgactccgtcatgaagcagacctaccggaattgggagctgcttctggtgaacgcttctccggaagtcgccgacctcaatcaggccgtggacaaactgtgcgcgaaggaccatcgtattcagcatgtgactttggagaagaaccagggcatcacactgaacaccaatgagggaatcaaaatcgcttcgggtgattttctgtgcttcctggatcatgatgacgtactggagccggatgcgctgttctgctacacgcgagccatcaacgagcatcccgacacggacatgctgtattgcgatgaggacaagctggacaacggcaagtatcgagagccgttcttcaagaccgagtggaatcccgatctgctgttgggcatgaactacgtgtgccatttccttaccgtacgcaagtccatcatggacaagctcgaattgccggacaaggagtatgacggctcgcaggattggcatatgacgttccgtatcggcgagcagtcgcggtacgtgcatcatgagcctcgcgtgctttatcattggcgcgtccacagccagtcgactgccgctcgtgccgaccagaaggactatacgctcgacagcagccgtctttctgtcgaaacgcatttggagcgatgcggcatcaagggcaaggtcgttgattcaccacttatgccgcgtcgtttcaaggtcgattacagcctcgccgaccacccgttggtgtccatcatcatcccgaacaaggatgctgtgccggttctgcacaactgcctgtcctcgattcgtaaattcacgacctacgacaactacgagatcgtaatcgtggagaacaacagcgtggacccgttcaccttcgaatactatgagatggcacaacaggatgacccgcatgtgagggttgtgaagttggaaggtatgacgtccttcaacttctcccgcatcatcaacttcggagccgagcaggcacgaggcgactactacctgctgctcaacaacgataccgaggtcatcactccgaactggattgaggagctgcttggaccttgcatgcgtgaggatgtgggaatcaccggcgccaagctgttgttcccggacaacaccatccagcatgccggcatcagcttcggcccggacggccccggccacctgtactaccagatgtcccgcaactatcccggcaatttcgaagccaccatgctggctcgtgatctgggagcggtcactggcgcatgccttatggtcagcaaggaggccttcgacaaggttcatggcatgaccgaggagcttgcggtgaactacaacgatgtcgacttctgcctgaaggtgattcgtgaacagttgcgcgtggtgttcgtgcccacggccgaactccaccattacgagtccgtgtcccgcggatcggatgcctccggcgagaaggccatccgcttcaagaaggagcgcggcgagttcatgagccgttggccggaagccttcactgtgaaagcgccgtttgagaatccgaatctgcaattcggcattatctatcagacgcttaaccgtgagtataagagggagaaccgttgattctgaaaacaagcaatcagattctttctcaggccaaggcttcactcacgagcatcgatgtcgtagcgtcagccattattggttttgccctcggtatggtgttttccgtaggcaggtccttttatgggtctttaggactgatgtccttcaaagacagttggctttggattcgcggcttttgctatggctgcgccgcagccatagcaattgccgcgatactggttctgtggaattggtatcaagacggccataaaggcatcgaggtacctccgtcaagattctcattgtggttgacgaatctcaccgcatacaaacgcgttgcgctgttcggcatcactatcttcgtcttgtggatacccgcatttcttgcattctatcccggcaactattcgagcgacggcccgattcaggcaacgtatcttctgaatgatggcgttgtcgatctgcattggccggcagcgcatacattgttgcttgtcggtcttatgcagcttggcaatctgttgttcggctcatacaacgcgggagtatcactattctgcctgttgcaggcgttggcccttgctttcgcgatggcgtatgcggccaataaaattatcgaatggggcgctcctatatggctggtcctgctcgcgaatggaatcacggtgttcaatcccgtgattcagacatatgcggtgaccactgccaaggattccctattcgctgtcttcttcatccttacggtgacgttactgattgagatgctccgcactccggaagcactagcttcagtgccatttgccacgaagtgggtactctccgtactcggcatgtgccttatgcgtaagcagggtgtatatgtggccatcatcgtgatgctcattgctctgccattcttgaggcagtggcgccgacgactgaccgcgttgatctctatcgcaatggttttcatcttatcggccgccttctccggtgtggtcgcgaataccgcaaccacgcgcgcggattccgcacgagagatgctgtccgtgccttctcagcaaattgcacgtacctatatgtacgactatgacacgttgacgaacgagcagatacagggcatcggcgcctattatgacttggatgccctcgaggctggacgcaccacagacaagccttgggatcctacccctattggcatgttctacgatacggaaacggggtccggctatttggctccgatttccgaccccgctaaagcggcattgttggatgaggctttcaactcggatcccttgggatacgtcaggatgtacttctctgtgatgaaaggtcacatgtccgattacgtccgtgctttcctttggggtgaaatcgggtacctataccctacgagctcggcagtgaaccgttggaccggattgtctccgtggaatgaattcggcaaaaccattgatgccggcggatcaacgaatcaggtgtccgactacaatgagaccaccaaattgccgggatatcttgcatggctctatgccggaacctggaacatgttccgcggacacccgttgttgacggtttgggtatccccggctctgccgtttttggcattactgctttccgtgattcttctgatcaagcgcaaagggaataaggtcctgctcatcgcttgggctttcccgctcctgtattgggcgacattggctttggcgccagtgatgtgcgtgcgctatgtagtgccgcttttcttcacgctaccgctgattgccaccattcccttacttacgcttaaggaattgtgactagacgatacccgagctttagttcacgacgtcgggggttcttcgtatccattctctacccacaatctccaatggatacggagaattccactctccacatatgcgatgcgggccactgataacgttgtagcgcaccccttttctcggcgtagcaatctgcaagatactccagcatgaaggatatagtggtacccatgcttgaagagaagaatccatccatcgccgttctcctgccctgctataacgaagaggtaactatcggcaaggtggtgcgcgacttccatgcggcgctgcccgacgcggccatctacgtgtacgacaacaactccaccgaccgcaccgccgagatcgccacagcggaaggcgccatcgtacgcaaagagccgcgtcaaggcaagggcaacgtcatccgctccatgttcgaagacatcgacgcggacgtgtacgtgatggccgacggcgacgacacctatcccgccgacgccgcgcccgacatggtcgccaaggtgctcgaaggctacgacatggtgatcggcgaccgcctctcctccacatacttccaggagaacaagcgcccgttccacaacttcggcaaccgtctcgtgcgcggctccatcaaccacctgttccgcgcgcacgtcaccgacatcatgaccgggtaccgcgcgttcagcttcactttcgtcaagacctaccccgtgctttcgcgaggcttcgaggtcgagaccgagatgaccatccactcgctgaacaacaacctgcgactctacgagatgcccatccagtaccgcgacaggccggaaggttccgtctccaagctggacacggtaggcgacggcatcaaggtgatgagcaccatcttccgcatgatccgcgaatacaagccgctgccgttcttcggcaccctcggcctgatcatcggcatcatcggcatcatgttgtgcggatgggtcaccgccgaattcgtaggcaccggcatggtcgtccacttccccacgctgatcggtgccatcatgctcgtcatcgtaggcctcctgctcatcgtcaccggcatcatcctcgacgtgatcgccaagaacgaccgcaaaacctttatagtggatgccaacaggttcgcctatgcaaaaaggcattggccccatcctcttccgcctcgcgatgctgcaccatatcgcaacaaccaataaacgcgatgccatgagttggcttaacacggttcaggttaacggcaatcgaggatttggcagcaatcccaatcagcccttacacaacacgttcccctataagacaacatgataattatacagatgtgaagagcaacattaatgaataaaacgacgcaagaaaacacgcatcttaaaatagaagacattttcaatcgatttatcacactccttgccgcactgattgtcacctgtctaggaattgccgctctatttcatacgatgattttccccttggattactctgaaaagcctacaaattctctcaaatacagcatcgtgggaaccgtaggcttcttcattctcgcgggggcagcctactatacgggcaaacatttaaaattcaagagacttccctcgttgaaaacgttctataggatacagacctatacagctcttttcatcggattgacttggctatcaattgcaaccacatctccagtcgcagatcaaggcacctcaatcacgttatcaatatggctacaaaacaacgatttgggaaatctgcatgcaaatgactacctacaacaatatccattccaatccgggtatatattattctgcactctaatggggcaacttttcggcatgaacaacatgttgccgattcgcctttttaatctcctgatgattatagtttcattgaaaactctatgtaaaatcacggagagaatgttcaagaatgatgccgtcaccaaagcgaccattgtattgtccacggcattcctccccctcattttattcgcgacatttatttacggcaacataccgtcgctcgcgttttgtctccttgcctgcctgctccagatggctgccattcaagcaagcgacgacataagaaaacgtcttgcgtacggcacattgtcagcggcttgtctcttcgttgcactctggtttaagcccaacagtctcatcttccttatcgggatcgaacttatatggcttgtcatcttgtttgcgcataaacgcgttctagtcatcacattcatcatattgggggcagtcgcatatatagcggcttcggcgataccgatcttccttatggaaagtcgaatcaacgttcctttggacaacccgacccccaaaacggcttggattgccatgggcctacaagagtctcgcgagcgtgcgccaggatggtacaacaattatgttgtaaacatttacaaggaagctcctcacgacaataatcaggtagatgcaatggcaaaggaggctatagcccaacgcatccaagcattcacacaggaccccctatatgctgcgcattttttcactcgaaaggtagccactacatgggctgagccaacatttcagtccctatggatttcatatggcggcaccggcggagagcgtgcggacctaacacaatcaaagctagagcatgagataatgcgtggcaggttgcacgccatatatatagtatattgcgacattatacagaatattatctatattggcgcatcctattgtcttatctttagatggaggggcttgaccactaaacaaattactctgattgtgatatttcttggtggattcactttccacctattctgggaaactaaatcggattatgtgctcccctatttcttgctgctgataccttacgcagctgcaggatggcatgatatcatcttcactaatcgcaaaatgatttacagccaacttaagcaagtacaatctaaataattccacttattgcaaggggtttgaaaccgagataacggcccagaaccccttgcacactcctaccgcttcgctccggtcaccgggtcgaagtagtacttttgcccgtcgatatactgcgtgccatacaccatctttccatcggagccatagtatacggtcttgcccccattggaattcagatactgccagcctgtcttacgagcgccggtcaccggattcaggtaataccaagcaccgccaatcttctgctccccatactgcatcttgccctcaggccagctgtaatacacgattttggagccgaggttcttccaaccgtacgtcacacgtccgttcgacttggaggtgccatcatcgaagaagtaccagtaacccgacacctttccttctccgtgcagcatcgcgccatccgaaccgtagtacacccacttatcgccacgatggtcacgcgtagtcacgactcgtcgccatccggcgaaacgtgcaccggtaccaagtttcagataatactgtttcccgtcaatcgtctgttctccgtatgccatctttccgtcggaaccgtaatacacggtcttaccgccgttggatttcagccgctgccagccctgcttgcgagcgccggtcaccggatccaggtaataccaagcaccattaatcttctgctccccataaaccatgtagggggagtagtatacattcctgccgtccggcaatacaacccaaccggtcatcctcgcaccgctaaccgggtttaggtaataccatttgccggcaatcttctgctcgccatacagcatggcaccatcttgatcatagtaggtccacttgttcacgtcacccttgaggtacgtccaccccgtcacgcgcgcccccgtgcccgggtccaggtaataccatttgccggcaatcttctgctcgccatacagcatgtgtccatcggtcggatcgtagtacacccatttgccgccgctcgacgacaaccactgccaaccggtgaccttcttgcccgtcgtcgcgtcgatgtaataccactttccgtcaatgagcacttcccgatatcgtgtggccggagtccggtacccgaacgcgtttaaatccacgttccccgtgattccgctaatctgtccactgctcgtgtactgccagccgcggtcgttcgtggggaacgcggtgtactgcatggtggagccgtactgcgccacccagcgggtcttgccgtggatgttgccgctgttgagcgcactgttcaggtagcttgtgtacgagtagacgctcagattgttgtaaccggccgcctgcagtttgccgtaccaggagttcaccataccgtcgtacacgctcggactcgttgggctcttgtgccccgtgtacgtccagttctccagatcgtagaacaccgggtaactcaggtcgcccggattcacgcctgcctggcgcagcaggtccaccacgtccgcaccctcggatgcgccgtcggccgcactttccgcatacgagaagacgtacacgccgaacgggatgccgagacgcttgcattcgctgatgttgcgcttcgcctgcacgtcgaagccattgccccagccgtagctcagacggatgatcgcgccctcgacgcccgcgttcttcaccgcctgccagtcaatcgtgttctgccacgcggacacgtcgatcacgcccttcgcctgctgggcgaacaggttgttgcgcgcgtcgaagaacgcctgcgtgccgttgtacgtgccccagtgcgcaccgtactcgttgttctgcaacgcggcgagcttcaccgacgcgttgtcggcacgcgtcttcgaggagaccgcgttcacgtcaccgccgttcgcagcgaccttctctttcacatccgcggcgctcaccggaatgaacgactcgccatccgtcttcgccaacggatcgggctgcttgctctccgtgcccacgatcttcggatcggtgaccgtctcgcccgtctcgatgtccttcaactcgccttccggcgtagccgcatattgctcggacaccaccgtcgcgtcatcggagatctcggcggacaccttatccggcagctcggcattcggattgtccggcatcgcgtcggcagccgtctcatcggcgaccgtcacaccgttcgcgaccggacgcgtcgcggaagtcgcggaccgcgcctgcgagcgcgcgtcggatgaggttccgtccgaggcggccgcggaggccgtcacggaggccgcggaccggacgccggacgcgtccgcatcggcgttcacatccgcgagcgcgctggccggagtgacgcacaccgtgcccaacatcgccgccgccgcgacggacgtcaccgccgcgatcacgccgcgccccgcaccggacgccgccgcacgcgcacgcaacgcacgcagcatgcccgtcgcacgcgccgcacccgtcgcgcccttcgaatccgagccgtcgagccacttcttttccaccatgcgtaactccttgacgcacccatcccgcgcacccgtacaccgccacgcgttccgatggtcgaccggactctcacacgcgggaacaggcaggcgggaataggcgtaatcccaacgttttcaaccgcgtctcagtctaatgtgcgcggcggataaggcgggcggagcgaagcggacaaaatcagcggaactccaccgcacattccggcgacggcatcatcctatcttttgagaagatacttcctgtttctgctgcgcggcggcgcagtggcgagaacgactccacgctcaacgagccggctcaacgccttacgcgtcgtaggaaggcctctccccgagcgacggccgatttcgtggacatcaagtggcgtatccgccgacaatacggacagtatcgcggattccgatgccgtaagccccttacggcccccattcggctccccaccatcgaccttctccgctagtgcgtaccgatcagggccgatttcatcggccaaccccgcttggaccaatctatgcagaatcaccctgatgtcgtcggaatccagatacagcgcgacatgcaactgcggaaccgtcatatcgccatgcctcttcaacaagagcaacgccatacgttcatgacgagtcaaggggacgcccacatgatcaagccagtcacggttctcctgctgctccacgccgtagcgtccaagaacgaccgtgaaccgatcgggagtcgcgcggaacacaggttcccccagtgcgtgggatttcatctcgcgaatcaccagagggatgccggagccaccgccttccacggtcacatcattcgcatcgtcatacggtatctgatgaagcagctgcatcaacgtcgcattgcggcagcatgacacgccgctgccgatcgtggccagcgtgaccccaccccataatccgccaggattcgacacctccacccgatcggggtagatgtccacggtcacggattctccgaggaattgcgcatcatattccctgtgaaccacggcattggcgacgacctcgcgcagcacctcctttggaatctcgctatcggtacgggctccgacccccacgacgaacgtgggagcccgcaggtttttggcgatggtctccaccgcctgttcgattgcctccggcatattgccgtcgcattgcacacgatccacgaaacgcggaccctcaaccgccgatttctcgacacccggatgtgcgacgacgtcaatgatcagcttgggatagtactgctgcgggtactgtccggcggccaacagtcccgcaagacgcacctctccaaccttgttcaccatattcaatctggtcatgcgctcaagacgagtatcagtcccgcgcagcgtcttggaattacgatgctcagcaagcaccctgtccaccgcctcggcattcagatcggagacgtcggcttcagggacaaccatacgatccgcggaactgagcgtcagggcatgggtcatttcgaacacttcggttggcgacaatctcaaatccttgtcgtccacacggcggtacccaccggtttgcggccctctcgccgtaagatagcagggtttgtgctgaatgccgttttcatggatgtcgatgaccaggaacgacgagccgttctgctcgcatcgggaaacgtcatactccggaggattcgtcaaccgtgctccttgcggattgccatctcccataccatccatgaactgcgatgcaatatggttggcgtcgaatcccggaacaggcgagaaatccccgtcctcgctgattcccaacaacagcacgccgcccttggtgttggcgaacgcgctcacactctcccacacgctggcgccgatggtccgagcacaggatttcgcctcgaaacgggcatcatcgttgccttggacgcgtagatgttccagcacctcggcgatatcgtcattcgtccacatcatcatcccccttgatcagctcatttgtcttatttgttgcggccacatggatccaagcggtcgcctccaatcgacttcaaacccacgtctgaaatctcatgataacgtgaagataaatactctatgatgagcttatcatgattgcatcatgataagctcatgacatcaagaaccggtttatgacaagcggcacgaacacgcatgccgaacagcaacaggaacctgaacgcaagcatcaacatgtaaataccgaaattgaccgaaccaagaaaatcacgggaaatcacgcacgacattacgcgggtaaactatctatagcacatgagtatgggccgggaccgggatgagacggcttcgaactgagtatgaggatgggaagatgatcttcgagacaaacacgcagaaatcggacatcacgagcgccggtggcgatggttccggcgagcgcgccgaccgccgcgaccagccggtcgtgtatttcgtgcttccctgctacaacgaggcggaagggctcgtgcacacggccgacgtgctggccgccaaagtcgcacatcttaccgaaaccggacggatcagcaaacaaagccgcatcctgttcgtcgatgacggttccaaagacggcacctggagcatcatccgcaatctgcacgaacgcgacgcacacttgttcggcggcgtaaagctctcccacaaccgcggccatcagaacgcgctcctcgccgggctcatgaccgcgcgcgcctacggctgcgacgccgccatctccatggacgccgacctgcaggacgatgtgaacgcggtcgacgggttcatcgacggattctgcaacggcgacgaggttgtctacggagtgcgttccgcacgcaagaaggacacatggttcaagcgcaccaccgccgaagccttctacaaggtgttcgagtggatgggtgccgagacggtacccgaccacgccgattaccgtctcatgagccgcgagacgctcgacgcgctcagcgaataccacgaagtcaacctgttcctacgtggcatcgtgcccacactcggctaccagaccagcaaagtctactacgagcgcggcgagcgcgaagcgggcgaatccaaatacccgttgaagaagatgatcgccttcgcgattcagggcatcagctcgttctccacgaaaccgctgagcttcgtcaccggtgccggactgctgtctatcctggtagcgattggcatgttcgtgtacgtgctcgtctcgctcgggttcggccacgccatcgccggctgggggtccatgatgatctccatctggctcatcggcggactcatcatgctctccctcggcatcgtcggcgaatacgtcggcaaaatttatatggaatccaaacatcgcccccgttaccgcatcgaaaccacactgtaggaggggccggcggccagcggacggcccctcctacagtgcttggattatatctattttgtcctcatcacacgagtcaacgcgtatagcaatgccccctgcttgaggcagaaatgagaccgtcgccgttctcctgccttgctataacgaagaggtgaccattggcaaggtggtgcgcgacttccgtgcggcgctgcccgacgcggccatctacgtgtacgacaacaactccaccgaccgcacggccgaaatcgccgccgcgcccgacatggtcgccaaggtgctcgaaggctacgatatggtcatcggcgaccgcctctcctccacatacttccaggagaacaagcgcccgttccacaacttcggcaaccgcctcgtgcgcggctccatcaaccacctgttccgcgcgcacgtcaccgacatcatgaccggataccgcacgttcagcttcacgttcgtcaaaacctaccccgtgctgtcgcgcggcttcgaggtcgagatggaaatgaccatccactcgctgaacaacaacctgcgactctacgagatgccgatccagtaccgtgaccgcccacgaaggctcagtgtccaagctggacaccgtaggtgacggcatcaaggtcatgagcaccatcttccgcatggtccgcgaatacaagcccctccccttcttcggcggattgggcctaatcatcggcatcgtcggcattgtgctgtgcggcaccgtcaccttcgaattcgccaaggccggcgtggccacgcacttccccacgctgatcggcgcggtgatgctggtcatcacggggctgctgctcatcatcgccggcatcatcctcgacgtcatggccaagaacgaccgcaagaccttcctcattggcaccaacagattcgcatacaacaaaagacactgactaagcgccatatagaaacgtgatggggagcgcaacctacggttgttgtgtccccatcttttagcgtctagctcagactgtgaaaaacaatagaaaagcagaaagaacagcattgtggtatccatgccaccaaaactaccctaccgtcgtcaccgcctaacccgcttcacccacaccaaacagcgaaaggccgatttcttttatgcatcactactaccaccaacacctcacatatagtgggacatatgtctgatgcttccgatgcctctgatgctgtttctgctcctttgactgtgttctcacgagtggcggcgaacgctgcgtggaagcggtgattctgctgatgggtttcgtgctgattgcggtgacgcctgccgggcatattccagacgtatgggcgcacacatatcgcattgacggcatcgttaacggggatgtgctggctcggccggtcgactcgaccagcatcctgcattcgggcagcggcaatgtgggcgggtgcgtgagccgtgattggatccggttctccatcgaccattacgacggttacgatccggctgccgtcaatgccgattttcttgaacggtacggcacgggcagcactgcagcgggcagcggcacgaacagcaccagcaccgcaaacaccacctgcgtggacacgccctacaacaatgcagcggttaattcacccttcgcctatctgccgcaattggccgcctttgccataggagcagactcaacgctcacccctggcaccacatacgtactcgcggaagtaatcatgttgctggtgtacgccggttgtatgttcgccgccgtagccgcactcccccgctggcgcttgcctacggccctactcttggtctcaccgccgttgatcttccgctattcgttcgccatctcggccgattccatggcacaggcgctgtgcctattgttcgcgtgtctgctgttttcctgcatggccgatccgcgtgccggcaacggacgattgaccgcgctcatgaccgtaggcgtgctgatgggcatgtcgaaattcacgttcaccccgcttctgctgctgggattcctggctttgataccgtggcatagcgccgtatccaaatctacagccgtaccttccgcagtagacgctgcacgggcttgagcaccacggtatcggcaatcaccgcaaatagcagcgccgccagcaacgtagcgccaaacatcaacacgctgatacccgcatacgaccatccgtccgtgggcgcgggaatccgcgggccgatcagcaccttggacagcggtgagtgcaccaagtaaatcgtgtaggaatatccggccagccagataatcgccttacgcacccgcgccgacgtgatgtgcacgtcgtaccggaagaacaggaacgtcgccattaccaccatcgcaaacgcaaccgtgaccgtgcggccaacctgcatctgctggccggcgaacaggtacggcgtggcgacggtccaggccaggacgaatggtgccaacgcatacacaccgtgccgtatacgcgcggacggcggatagtattccaacacgaatcccaacagatagtagaccagcagtccccgccaggggaacgactgcaggaacgtcaacgggtatccggcaagattgcagatctgctcggcggcggccacggcggcggccagaccgatcagcagccaggcacccgaccggcctatcgcgcgcatcatcgcggccagaaacggcgtcgccagcacgaaaccggcaagcatgaacacgaaccaatagacggaatcgtcatacccggaaaacagatcaaacaacgttccagacacagcgccgccaaccgaacgatgatcaatcaccaggtaggcgacgaaccccatgccgcccgcatacagcagatacggcacaatcagcgagacgaaacgtttgtagtagtagcgcacgtacggcgcgaggctgctgggatcggcttggccggcaccgccgcctgcccgggcatcagagccagagcccggcagacggcccgctgagtgggtgctcaccggccggtcggcatcgaatgtcaggttgaaccggcccgacaccataatgaacagcggattgcagaccatgaacaacgcgaacagcacggatcgcaccgtttccgcgctgccggcgagggccatcttgacgggcatgtagttgttgatcacgtggacgccgatgaccaggcacatcgccaccacgcgcagcagatcgtagttcacgtcgcgcggcctgccggcgacgccggaaacggtggcgtcggaaacggcgacgccggaaacggaatcgggcatggtcatcacatggatcccgtcagggacttcagatcgaccgggcagctgatctggctcttcagcttgtccaaggtgtccaggccggccgagggatcggaggacgcgcccttatgcgcgtcgttcttgccgccgttcgcaccatcggcgccgttcgcaccatcggcgccgttcgtatcggccgggcactcatccgtcaccttaccgttggagcccgtctcgacgccatccgcattcaccaccggcgtggttaccacgttcagtggatgtgtggcatcgctgctgacccgaacggtataggcaatcgtcaattcttttccgggctcgatccactgctggttgaacataatgtactgacggtcatacaggctcgcggtgttggtaccccatgaatctatatcagcctgcacagcggtgatttcgccaccgtacggggcggtaagcaccacgcggtacagcatgccaccgagcactggattctccgagccgccattaacgaaatcaggcaacgattcggccttagccttagtcagcgtgttcttcatggtgaaggtgaccgtgtattcgtcaccgagctgatcttccgtaaactgacccagctgcgtgttacgcacagctgtcgtgatgcgcttatccagcacgccagaatacagggcgttccggctggccgaggcgtcgccgcaggtttttgtgaccgtggtggaggtcttcagataccaatcctgcttgccttgctgcagctccgaaagatagatgccggtttcaggtacctgactgtcagcagacaactcgccactggccttatcgtcgataagtccggtggcaatcagcgcctcctgctcatccggatcagccatccatagcttgaaatgaccgctagcgctggtatctctgattgccttcaacagcggggatgcggtggaagcattcgcgttgccaagcacatggttcataattgcttgagccgcttcggaaacgaagttgttctgctgctcgaagtccgggtaatccgtgtacaggtctgaagcgaagaacggcaccgtggtggtgccatccagcactcggccgtccgaaagcttgaccttgcctgtggctcccagcaatgcctggaggaatacgggatcgaatgacaatacacccgctacgttctcgtcttcgttgcctttctgatacagccacatgtatttgttcatctgtgccacacgctggaattcggggtcgatggtcgtggtggccgggtactggtcaaaagtgtcgccaaatacctggcgctccttcagcaccgtagcatccattggcttctcaggaatgtcccaaccagaagtggtggcgaaatcaccgatggtaatcgtgcccttatctgccgtgattgcggcgatggtgcccaccatgccgcccgccgaacgcagctcggccgggttctgcaccatcaccagatacgtgcgcttgccgtcctcgccaagcagttgcggtagcaagttaatgaggccatcgtattcgctgagcatcgaatccacggtcttgagcgcagccttttcggattcgagcacggtggccaccttggcgacgctcggagtcggcaccttgttgagcttggtgagctgctgcgagatatccttatgcacctgcttgacgatatccggcatatccatcagggcgctgacgtccaccgagccattcttcagggagaagccctgcaatcgtttggacaggttcagcagatcagtgaacggaccgttgaccagcgtatccacggaagccagcatttcgcgagcagcggtgatgtcgctgccaaatcgcgaatggtcgcggaagaagtcccactgcgggccgttcagctcctcgttgagatcactggtggcattgaccaactcttgggagatgtccgacagactcttatcgctgccgcagccaagtgccgaattggccagactttcggcggatgtcagcacacgctgcgcatccgtggccattctcgagacggatgccgcgtagagcgtgcccacacaggtgacgctggccagcaacgtcagcagcagtacaaccaccactcgcacccatatcggtgtacggctgatcagcgaacggccgtcgccacccacgtgctggggagtcttcaggtttacgggacccgtctgctgatttgcaacgctattcgtagatgcggagcgattggatttcccgttaccggcatggcggcttctcctacgccccacagccttatggctcgaatgccctgaagtgaatcgcatacttatcctacccgaaaatctgctcagctcatactcttatccaacggcgcaaggccacgcttccggatgccggactccgggcgaatccggaatcgcagacatgccggagcacacgtgacgccacgcatatctcatgccagtgtaccgatgccaccgaaatagaccgagggtttatcccataccgggtgcaaatcccctcatgaccaccacatcgctgtcagaatgttctcagacttcattgaggagtataacagtattgcgcaagaaaacggtcactaaacgcaacaatagttaaagccgtattgatttgttcggcttaggagaacgggagaggcaattagatgttcgtcctcagcaacgcctggcgggccctgacacgttctaaaggacgtacggccctgaccgcgttcatcaccttggcggtcaccttcggcacagtcgccggactggccatcattcaagaagataccaacgcacacaccaccgcgtacgatcagcagaaggccacgttggccattcgcccgactgcggctacgtggaagaaggtctccgctacggactcggcttccaccaagcattacatgacgtggacctcatacaccgaatacgccacgctcgtccggtcggccaccaactcgttgaactttacggttaccgaaaccgtgccggcccacgtgagcggtgatttgaaggccctggacggcggatcgctgggctcggcctccgatgatgagaccggcggccagctcatttggcgagccttctggaccgaggatgccgccaaggccagcgacctcggtaccttcgaaatcgtggacggcaaggacctgagctacgacaacaagtcctccaacccgaacaccaccggcgcactggtctctgaagcgtttgcctccgccaacaacctgaaggtgggcgatacgctcaaggtggcggccgcctcggacgcccagaccacggccgagctcaaggtgcgcggcatctacaagtacacatccgaatccgccgtcgccaatccggtgacggccgcccgcaaccgcgagaacgcgatcttcaccaactatcagaccttcgccaaggccggactcgacccacagtccaacgacaagaccgcctccggctgggcggtgccggatctggacgtggtgttcgacaccggtgatcccgctacatacaagtccttggtatccaccctcaagaagtccaagctgcccgccaagggatacgaggtgtcttccccttcgctggaatcctacaacgcttctctggagccgctggatacgctatcctcgcgcgcgaagaccggcaccattgcgttggttgccgtgggcggcgtgctgttgctcatcctcgtgctgtcaggcgtgtgggcgcccaagcgtgacgacgagatcggcatggcactggtgtccggcgtcactcgcgggcgtttgggatggcagttcatgctggaagtgttcatcgtcaccctgcccttctacgtaattggtctggtcggaggcgcgttcgccgccaagccgatcggacctgctctggcatccggccatgccatcccggtgacatcggacctgatttggaccatggtctggtatggactgggttcaatcctgatcctggcgattcttgccgccctgcgccttgcgttcttcagcgcgaacaagctgttcgccgccgatggcgactggggcaccgtgagcgagaccgaggagattgaagcggccgaagccactggcgctgctgagaccgatgaagctgctgaggccaccgctcatgatgctggcgaggccaataagacgaccaccacaaccgacgatgcggaggcacaggcatgagcgacaagaacaacgatcaggaactcgagaagaccactgacgcaacggctgacgaagtgacttctgagactgagacgaacgacgccattgaatccgttccagctgactccgtgcagttcagcgtgaccttcgatgacgttgatgacgaaagcactgttgacgatggtatttacagcgcactggcatctgccgaaaccggagaaaccgacgagaccagtgaggccgaagcagacgccatcgcttcggtcaacgcatccgccgaagtgaccgagcgcaatgccgcccgcgtcaacgaaacactccgactggccaaaaccgatcacaaagacgcattggccgagcatgcggagcctcagggcaaagcggccgaacccaccatgacgctggcctcgcgtatcgatcgcgtgttggtgggcggcggttccgacgacattctgctcaagacctacccgacctttgccctgaacaaggtgacggtcgccggccccaagggcaaggtcaacatcctcgatggcgcgaatttcttctgctactccggacacgcatacgcgctgctgatcagcgacgaccccgattcgggcatcaccgccgacgccaaacgtcgcgcgctgatgggcgtgatgagcggtttggccacgccggtgtctggcacggtgatgaacaagagcgccaacattgttgagctcgagcccgtggaactgcgcggccaccgtctgggcatcgtaccgcagctgcacgccgtgcaaccgaatctcgacgccgaacaaaacgtgctgtacgccatggatgcgtccaaccgcaacttcctgaagcccaagccggtgatcgcccgcgaactgctggccaaggtcggcttctccgaggccaccagcggcgtggccgtcggcacgttgcctttggtgcagcagcgtttggtggccatcgcccgtgcaatcagcaccgaggccgaagtgctgatcctcgacgagccgacacgagggctgaacgcggatgacgaggtgaccgtgttcgccgcgctggccaagctggcgcacaccggcgacccgaagcattgcgttatcgtgctcactgcatcgcgcgagctcgctgaagcagccgacacactcttcaagatctgatctgtccggcagcaatacacaccagacacaccagcacaggctcctgaagctcacgatgttcggatacataccaaacatcgtgagctttttcgatttcgaggggctgatttgcgtgttccgggaggtctacttccgtttcaaggggctggtcatccgccaaaccccgagtataaacggcttcatgccaacgtcattccgccgtttttacaccgcgtatacttgggcaccagccccttgaaacggaagtagacctcaggaggatgccgaatcagccccttgaaacggagataggcatgtcgagatgtccgaatcagctcctgacaatcctgatgcggctcattgccgcgctaatctgaagataaatctgaccgtacgaggcgaaacctgataatcatgaccggatatattcccacactggagcagatcgacgaattgcaccgcaaaatcgcgccgtccaaggcggcgtacgagctggtgcacacgcattgcgtgattgtggcgaccatcggctgccagatcgtgcgccggcagaacgcgctgttcacgcgccgctgcacattaccgaaggacgcggaggtaccgcccaccgcaggcgtcaccggcggtcatgtgccgccgcgtctgctcgacgagcatttagtactcatcggcggactgctgcatgacatcggcacctaccgcgtgttcaagcatgacggctctgacgacgaaccgctcaaattcagcaagaaacgctacattctgcacggtcttaagggctacgagtatctgctcgacgagggcgtggacgagtccatcgcccagttctgccgcaaccataccggcgtgggacttacgcgcgaggatgtggtgcgccaggagctgccattgccaccagccgactatgtgccgatgaatctcgagcaggaagtggtgatgtacgccgacaagttccatagcaagtcagtgccgccgaagttcctgcaggtcgaggcgtatacggcccgagccgagcgatttggcggagagaacaaacaacgatggctggatctggtggccaagtatggcgtgccggatattccggcgttggcggagaagtatgggatgcggatgatttgaggctctaggccccctcgtcagagggagcttatgaagctatttcagatggaacggagacggtaggtgccgttgcggttggaggcgatgatcatctggtcgttctccagcacgttccagccttcctgctcatagccggaagaggagaccaccacaccggcggagtcgccgttgtcgtcgcgcagctcacggtagcgcatcacacggtagtcggcggcctgcgcgccacggccatactcgtcgtagatttccacgatgcgcgggctggtcttctcacgaccggcggcgcacagggcgatgagctggtcctcggactgaatcatgcagttgtagctggacttcgggtaggcttggcgcagttcgcgcacggcctgggccacggcctcgtcgagcggaaagccgaaaccgatgtattccagaatcaccgcgaagaagatagcggagtcggaacggccgccggtggagaggagcacgctgtggttcaccgggtatgagcggttggtgacgatgttgcggccattggcgtccgagatatcgccgttgtggatgaagctcaggccgttcgcatagaacgggtgctggttctccatgatgagcggcagattggagcttgccaagcgcaggtgccagatggcaccgcgagacggttcgtcggccagcgtctcaaacgtgctgtcatgacgggccgcgatggtcgacttgtagattcgggtgccggtttccggagtgggtgcgccgccgtcgcgcacgtgcggcgcttcggcgggatcggaaagctgggctacaccccagccatcattgtggatttcagacagttcacggaaatcctcgacattgtcttgccccaacacggcgttgagactcaggttgaaacctgccgtcgcgtatcccagtaatctgcacatggtatttcaacttaccgaaaccgtgcggcgacgtgcggcgaccgttatagccattctttatagagcgcatcagcgccgctgcaaactggtatgttatcgcttctgtttggcggagcgctgaggcttggcggcgggtttgccgttcttggccttgcccttatcgccctgctcagcgaccgcagcggcggcagcggtctcagcgatcttccgctcctcggccgatacggcggcatcgagctcctgtaccaatcgcccgagcccggacgtggtgtccatcgggtcggggacggcggccgggtcggccactgcacgagtcggcgtgggcgtcgtgatggtcttggccgtatcggtgcgcttcagacgcggtgggcggcgggtggagacgaacagcggctgcacctcgaccagcgggttgtaaggtgccagaccgaaccacttaaccggcgagccggccatgcggcggattgcgtacttggcttgcaacgacagggcaccgcgtgcggaaaccttggattccggcatcagggccttgtgaatcagcacgtaacggatggtgccgatgtccggatcggcgtcgaccttggggtaaatcgacttctgcttaggcagttcgccggttttggacaggtcgtgcatgatctggtggatgtacgccgggatggactgcgaaaccttgaagcccaaacggaagcgcacgcggtagatgtagttcgtgccgaagtcctccaccgagtattcacgggtgaacggctcgtcggtggtttccacgctgactgcccaccaagcacgggcacgcttggggtggtcggcgaagatggagaagaagatgtccgtgtcgagtcgcttggtttccgagtcggaggtcaggtacacgatgttgtccgcaaaatacgggatgcggaaatcaccgtgcagcttgtcgagcgcgggtaggaagtcgttgggccgcatgtgacggcgttgcgcacgttcgagcttggtgccctcattccacgtgtacatgacgaacagaatcgcggcggtcagcaacatggtgaaccaaccaccgtgcaggaatttggccatagacgcgatgaagaacatagcctgaatcgccaagaacagcacggtgaacacgatggcaccgacccgcttgccggaatgccataagtagacgccgagcaacacggtggtggtgatcatcgtaatggtcaacgccaggccgtacgcggcggagatgtgttcggaatccttgaagatggcgagcacggcgagcgtggccacgcacaacacgccgttgaccaccggaatgtacagctggccgcgcgtacgggccgggtaacgcacctgcagatggggcatccagttgaggcgggtggcctcggaaaccatggtgaacgcgcccgtgatcagggcctgggaggcgatcacgccggccgaaacagacagaatcacggccaggtaccgcacgttcggggtcatcatctggaagaacgggttgagcgacttcatcgcggtgtattgcgggttatcgctattggccaacatccacgcgccttggccgaagtagttgagcaccagcgcaaccttgatgaatggccaggtgaagtagatgttgccgcgccccacgtggcccatgtcggagtacagcgcctcggcaccggtggtcgagaggaacacggtgcccatcagggcgatgccggcagcattgtccgggctgaacaggaatttgatgccgtacaccgggttcagggccgcgaacacagaccagtcgttagagagattcgtgacgcctacgatggcgaggaagctgaaccagaccagcaccatcgagccgaatactttgccgatgctttcggtgccgcgcgactgcacggagaagagaatcacgatgatcacgacggtaatcatcagggtcaggcttgggttttcgtcgaacaacccttccaatggcggcagggtctgcaagccttcgactgcggaactgatggaaaccgccggggtaagtaccgaatccgcaaggaatgccgcgccgccgagcatggcgggaatcgcgagccatgcgccgtacttgcgaatcaacgagtacagtgcgaagatgccgccttcgccattgttgtcgatgcgcatggcgatgagcacatatttgacggtggtgatcagcgtaatcgaccagaagaccagcgacagcatgccgagcacggcctctcggtttacgctgccaagccctccctgaccggcaaggaaggtctgcgcggtgtagaggggcgaggtgccgatgtcgccgtacaccacgccgagcgccacgatcgccatgccccaggtaaccttgtctgggctggattgcaagcgggcccaccatcggccgaggccgcctttcgaccatgcgctggcgattttctcggcttccttggtttcggcttccctctgcttggcgagtgcctcgcgctcctccttggtgagagtgcggcgggacaccttgggagcgttggtaaaggtgtcggccctcagcagtgcttcttcttcctgtcgggccttggctttggcggcgccagcctgggctgtctgggcctttgaggctttttgggcgcgtgcggtcctttggttcgactcagccatacgttcagtcctccattgaggtggagatcatccccctcgcttatgtcaggtacatcatggtagacctcgttcacaattctgacaaattttacaagtcaacacatcgccgcgacggccgcacacccggccctcacagtccgtatacggcgcgggcggtatcgcgggtgccgcgcgccacatccgcgatggacaggtcgagcgtatcggccatggcccgcaaggtgtaggggatcatgtacggcgcgttggtgcggccacggtacggcatgggcgtcagatacggcgcgtcggtttcgaccatcgcatggcccagacccacaatccgtagcgattcgcggataccgtcattgcccttgtagctcacggtgccggagaagctcagataccagccatgttcgcgcgcaatctcggccatctcacggtcgccggaatacgagtggaatacggtgcgttcgggcgcgccgtcggccagcagggtttcgatgacctcgcgatgggagtcgcggtcgtgaatctgcatgggcaggcccagttccttggccagggcaatatgcgcgcggaaagcctcgcgctgcagttccttggcaccttcgccggtgcggaagaggtccatgccggtctcgccgatagccaccacttgctcggggtatgtggtggcgaggcgatgtacttcggcgagcgcgtcctcgaaagacgtgtcatggtaaggcttgtatttgagaggcagaccatccggccccggcacaccgcgatgcccgtggagcacggactcattggggtgtattgcgagcgccgcgtgcacgttacctggatgatcgagggccatctggacggcggtcatcaggtgcggcagctcgcaaccgcagtcgatgatacccccaatgccgacagattgcgcctgcgccagcaattggtcgacgtcgtacaccgggacttcgggctgccccttctcctgcgcctcatggctcatagcgcgcgcgaaagggattacggaggccacgtgagtgtggttgtcgatggtctgggcgtcgtccggcaatgcttcaggtgccggggcccagctacggtcgcgatggtggtgcttgctcatggtttctcagtgta

SEQ ID NO: 900 - DNA, 23006 bp, Unknown
  R117_24m  MAG No. k141_1343
cgcagcacctgatcctgcaccagcacgtccaaggcggagacggcctcatcgcacacgatgacgtccggatccagagccatggctcgtgcgatggcgatgcgctgacgctggccgccggaaagctcgttcgggtaacgacccatcacggaagccggcatctcgaccatgtccagcagttccttgacacgattggcacgcgacttcttatcgccaatcttgtggatgcgcagcggctcctcgatggaacggaagatggagtacatcgggtcgagcgaaccgtaggggttctggaacaccggctgcacgtggcggcggaaaccgagcagatccttggccttgaacgtggaggtgtcgcggccttcgtagaacaccttgccggaagtgggattcagcaggtgaagcaccatgttcgccacggtggacttgccggaaccggattcgcccacgatggccagggtggtgccgcgcttgacggagaaggacacgtcgtcgacggccttgaacatctccttcttgcggggcagcttgaattccttggtcaggtggtcgacggtgatgatgtgctcgcttttctcaagcgtgctttcgccggcgatgtggtggtcaagcagggcgtccgcgttctcaccgcgctccttggcggagatgatgcgctgggaggccagcgacggggcggcggccacgagtcgcttggtgtacgggtgctgcgggtgctgcagcacctcgagggacggaccggattcgacgacctgacccttgtacatcacgacaatgtgctgagcgcgctcggcggcaagacccagatcgtgggtgatgaacagcacggcggtgcccagtgagtcggtaagcatgtgcagatggtcgaggatcttcttctgcacggtcacgtcgagggcggaggtcggctcgtcggcgatcagcaggtcagggcggcaggccagaccgatggcgatgagcgcacgctggcgcataccaccggagaactcgtgcgggaactgacgggcgcgcgtggccgcatcgggcagtccggcctcggacagcagacccgcgatgcggtcatccattgtggagccgatgacgtacttcttggcgaggtaccaggcctgatcatcggccacaccggccttgatgaggtcgtcggccacgcgccaacgggtttcggagcccggaacccattcgttggtgaagcgggcgacggccttgtcgaaggcctcgccggacacgccggcttcggtcagggccttcttggcctcggtcatgagctcgggcagttccttggtgccgaggaaggtctcgtcgtcgttgcccttgacttcgacctcgtcgccggccagagccttggcgagggcggagcgcttctcgtgggccacgtccatgttgttggccttcagcgcctccttgacctgggagccgatacgccacaccgggttgaggttgctcatcgggtcctgaggcacgagacccatcttggtaccgcgcagcttgtcgaactcgctctgcttggcgccggcgatctcctggccgtcaagcttgatggaaccgttgaccacgtgaccggtgccgggcagcaggcccagcacagccatggcggaggtggacttgccggagccggattcgcccacgatggccacccactggccggggtagacggtgaagttggcatcgcgcaccgcatgcaccggcttgccggtgtcagtggtgaagtcgatggccagatccttgacctcgagcagcggaccatgctctttctgcatagccagcatcttggcgttggtgttgtcagtcataatgtttctccactcccctcgctcaggccgtacggctcttcgggtcgagggcgtccttgacggcgtcgcccatcatgatgaacgcaagcacggtgatggccagtgcggcggacgggtagaacagcaccatcggatcggtctgcagattggtctgcgcgctggagatgtcgccgccccagctcaccgtggtggtcggcaggccgacgccgaggaagctcagcgtcgcttccgccacgatgtaggaggccagcgaggtggtggcgatgacgatgatcggggccaaggagttcggcaggatgtggcggaacaggtttctggccggcgtggagccgagggccgtggaggcggtgttgaattcgaggttcttcgattccagcacggcgctgcgggcgatgcggcatacgccgacccagccgaagagcgtcagcaccagcacgatcttccagatggacttggaggtcttgaacatctggagcaccacgatggcgccgagcagcatgggcagggcgaagaagatgtcgttgatgcggctcagcaccgcgtcgacccagccgccgaagaagccggcgacggcgccgatcagggtgccgacgatcacgaccagcagcgtggagagcacgccgacagacagtgaggtacgggtgccgtagaccacgcgggtgtacacgtcgcagccctgcaggtcgtagccgaaggggtgtccggcggaggcggggctcaaggagttgcccagatcgcaggcgttcggatcctgcttggtgaacagaccgggggcgatggccaccacgatgatgaacaggatcagcaagccggagatgatgaacagcgggttgcggcgcagggttcgccatgcgtcggcccacatgctggtggccggtgcggattcgtcgacggaatcgacgtcctgcaacggggtctcgtcgagaggagctacgtaacggtcctgaccgggcagggtttccatgaagtattcggttcctggctcgccggtctggttgagctcgttttcagtggtttcgtttgccatgtgactcactcctccctatcacgcgtaacggatacgcggatcgagggccgcgtacagcatgtcgacaacgaggttgcacactacgaaaatcagcatgagcaacgtgacgatggacaccaccaggtttgcctcgcccttcagaatggactggtaggtgaggaagccgatgccgtggatgttgaagatctgctcggtgatcatggcaccacccatcagggcgccgatgtcctggccgaggtaagtgacgactggaatcagggagttgcgcagcacgtggcgcagcatgacctgaccgttcgacatacctttggcacgtgcggtgcgcacgtaatcctcggcgatgttggaggagatttcggagcgggtcagtcggatgatataggccatcgacaccgaaccgagcaccatggccggcatgagcagatcaaggaagccggggtcggcgcctgccgtcaccggcaatatcgcccactgaataccaaagacatattgcatgacgaagccggtgacgaaggtcggcacggaaataagcagcagggagacgatcaggataacggtgtcgtaccacttgcccttcttgaggcccgagataatgccgaagaccacaccgaaaatcgcctcgaacacgaacgccatcaagccgagcctgatggtgaccgggaaggcgcgggtgatttcgtcgagaacgggctggccggcgaaggtatcgccgaagttcagggtcagtgcattcttcaggtagatgaagtactgaacgatgaacggctggtcgagatggtattctgcgcggatctgggctgcgacggcctcattgacaggcttgtctccgaacatggccttgacggggtcgcccggcagggcgaatacaagggcatataccagaagagtcgtaccgagaaccacgggaatcatctgcagaatgcgtcgcagaagatacttacccatacggttgctccttatttcctagaccggccagaaagggtatagtacgcccccgccggtcgataaatactccgacagtttaccgcatgcccggactgtgatatgtaaatttgcgttaacgcaaggtttgagattgggcaatgctggcggatatgtccatggtcgcggtcggatagtggatactttaacttggttcccgctggcgtgagcaagcacccctcacacaacaaaaagggcggggatcttgcgatcctcgccctttatttccgaactacctaacggtatccgttcagtgagtcagactcacttcttggacatctcggtgtaggtcgggaggttctgccaatcgaaggcgtagccggacttcacgttgagggaagccacaccggaggcgttggagtagtacagcgggatggccggaaggtcgttgaggaggatttcctcagcctgctggtacagcttgttggcgtcatcggtgctggaagcggcagcggcctgcttgcacatgtcgtcgaaggccgggttcttgtagtcaccgtcgttggagccgttgccgtcagcagcagcggtggagtacagctgccacaggtagttctcggcggacgggtagtcagactgccagccggtacggaaggcacccttcatctgacggttggtgacggcgtcacggaattcctggaaggtcgggatcgggttggtggccgcgtcgatgcccaagttgttcttgagctggttcacgacggcgtcgtaaatcggcttggcaccaccatcggcgttgtaggagaaggtgagctggccgtcgtacttggagatggcgtcagccttggcccacagttccttggccttggaggcgttgaacttcaggttgtcggcacccttgagggagtcggagtagcccggggtcttcggggaggtgaactcggtggcggcggtggcgttgccgttgagcaccttgtcgatgagctggtcacggttgatggccatggagatggcctgacgacgcagctggccttcctcgtcgttcttgaagtggtcaagggaggacgggatggtgaaggtctggatgacggagccggcctcggagtaagcctggaccttcttgtcggtcttgaaggtcttggtgaaggcagccgggacggattccatcacgtcgaggttgccggcctgaatgtcacggtaggcggcggagtcgtcggtgtagaccttgaaggtcacgccgtcgttcttgacgtcctcgttgcccttgtagtcagggttcttgacgagggcgatttccttgttgtggtcccacttggagaacttgtacgggccgttgcccacaggagcctcgccgaaggccttcggatccttgtagaaggactcgggcagcggggcgaaggccgagtagccgaccttaatcgggaacacggagtcggactggctcaggtcgacggtgaaggtggtgtcgtccacgaccttgaggccggagagctgctcgtcacccttgaggccatccttctgcagatcgtcatagccggcgatggtggagaagaaggaggagcacttctgggcgttcttggcgttggccacgtaggaccaggccttggtgaaggactcagcggtcaccggagtgccgtcggtgaacttccagccagacttgatcttgatggtgtactgggtggcgtcatcgttcggggtgatggactcggccacttcgttggaagccttgccgtccttgtcgaaggagaccagacgggagaacagcaggtcgaccggcttgccgccgccggtttcgttggtgttgcccgggatcagcgggttctgcggttcggagttgtacgcagtgatgatgttggagccagcggtgttaccggaggcagcgttgctgttggagccgccgcaggcgctcagcagcatggccacggagcaagccatggcagcgaaagcaagagctttcttcttcatatgatttctcctattcattaggttgcaggacgtctcagccccgcctcatgcaaacggggctggattccccgtcaccgtgagacttgcatctcacgatgtctcgaacaatccacccccgttgctgattacctgtcatttttgcgcacttgggagacaagcagtgtattttttgttacacccatgtaaaattcaggggttcttgccggctaggttcagtctttgctgagtttgttaaccaatgtccacatagtggtcatgcccgcggaaaggcctgtccgtaacggttcttgagctgctcgatggagacgtgcgtatagcgttgtgtagttttcaaggaggaatgcccgagcatctcctgcacctccctcaaatcggcaccgccgtccagtatgtgcgtggcggcggaatgacgcaacgcatgggggctgatgtccggcacgccggcctctcgggccgctctgtgcacgatgtcacgggctatgcgttggtcgatacggccgcctcgtgcgccgaggaacagggcgttggcagcacgggacttgactgcatccgttgccgtacgggccagtaccggccgcccctgttccagccaagtctccagcgcacgctgggcgggtagtccgaacggcaccacgcgttgcttgttgcctttgccggtgactttgatggtgcgattggagaagtcgatgtcggcgatatccatcgacaccagttcggcgacacggatgccggtggcatacagcagttcgagaatcgcggcgttgcgctgcgattcggcggtgactcgggcgttgtcgcgcttgtctgcacgggcgggtgcctcactgcggtgtacggtatcggccgacttatcagctgtcttgccgctgccggacgcggctgccgctcccccatcgtccttgtactggtttgttgcaacggcatgttcagcgacatccaataattgctcggcctgggattcggtgagcaccgcgggcagcgtgctgggaatcgagggagtcatcagtgtggcggccgggtcggtggtggtcaccccatgctcataggcccacgcgaagaacccgcgcacggccacggttttgcgggccatgctgctgcgggcgtgatcgcgcgattccaccgccatccagctgcgcagatcatccagcgtgatctcgttcagatcggtcacgccgcgcagctcgaacaggtgcaggcatgccgtgagatccgcgcgatacgctttgagcgtattcgctgacaggccgcggttggacttcagataggagacgaaggagtcgatatcgccgtcgaactgcgtagatgacactctcgttctcctccgaattctttatggccttgggttacggccggggtggcgtgttgcgccgctccggcacgggtttcaatgtggcaatctgttcctgatggatggtcacgttctgggccgggcgcgaaccattggcggcggcgtcacgcaccatctccaacgtgtatccatcccaggaaaccacatgccccacatagtcgcggaacttcatacggtggtcgaccgggtcaatgccgtcggtgatgcgcaccaccacgcgggcaccggccggaatctgccttggtaacgtcatacgtcatcatccccttagccatccgccgcatcaacttctatgcgtttcctgaaaaacggtacagactaccttactcctttgggtctttcgaacagcggagccacacggtcttctcacgaaaacaagcgggaacttcatccccctcgcgcagccttcttcgtgacgggcggcgaggggaacctgcacacgggctgcatggcggggcgcagttacatggcggggcgcagttggacgatggcctgacgcggatggatgaaaccggtgatggcttctccccggcgtgcggagaacagcaaggtctgctgccagccggcttcggggacggcgagctcgcgttccgggaatccggcggcagttgtgccggcttgctgcgcggtggccgtaccagcttgtgcagcggtgatgccggctcgcgtcacggcggccttgtaccggcggaaggggtcgccttcggcgaagaatcccatcacatcctgctcgccgtcggcaccagcgtgcagttggtcggccatatcggtcagacgtgccgccatgcggcgcagcagcacttcgacgttcagcgagtcttcctcgaccatcgcgcgcgtgcggtccgggtcggtcagggacacgcgggtcatgtccctccagcagccggcagccagcgcggcggcgatgttgcggtccgggttggcgaccagttcgttgatcagcgcggtggacaccacatgcggcatgtgggagatcatcgccgcggccttgtcatgcgtctcgtcgtccacgacgatgacgcggttgccgacgtccttggtgatcatcgcggcgacgtcgaggaagcggcggtagtccgtggactcgtccacggtgatggcccatagggcaccgtcgtacagatgcgggtcggcggcctgccagccggacagttcgttgccggccatcggatgggcgccgacgtagcacttccccagcgcggcagccttgacctgatcgcggaccatgcccttgactgagcccacgtcggtgagcgtggtgttcggatggtcgcccataagcggggctagggcggcgaggattgagggcatcgccttgagcggattgcacagcacgaccacatccggctcggcatccatgagttcggagagcgtgctcttgcagaaaatgccatcggcttcggcctgggcgtaggggtgcgagcgatggttccacgcgatgacgcgtacgccgcgctcggtcaggcggcgtgcgagcgagccgccaatcaatccgagtccgacgattccgactgtgtctaccacagcagttccttccttgctccctcggcgtactgccagccttccgacgcacgattggtgatgtggacgccgccctcgggcagcatccaggcgtcgaccggcgggttcgggcgttcgcggcgtgggtagacggccaaggtttttgcccagtcgccgtgtccggcgatctcttccagtgcggtgcggaatcttggctcccagggggcggcgtcaagggtggcgatgaagctgtaggttccgtcgtggcctttgatcgggcgcgagatgaagctggtcatgttcagccccgcatcacgcaggacgtccagcaggtcggcgagcacgccggggccggtgaccagcgggatgaaggtgatgatggtttcgaagtcgccggcgtcattgcggtgggcgcgggcgttgaattcctggaccacatcacgcggggcgatgacaaggaattcggtgtgcgcgccatcgaaatcctgcacatgttcggcgagggtgtcgagatcgtagagttcgccgcagatgctggggccgagcgccacgcggccgggcttcaggtcgcggcaggcggcggcgttggaggatgcgggttcgggctgcaaatggtgttcggtgatgaaccgggtgcattgggccaggccgtgcgggtgggcgctgacggggttgccggtgcagtcgcagatgctgtggccgcgcacggtgaaggcgttgaaggccacgtccacactgatccgggcgaagccggccgcgtcgggggcgtcgatcagcgcatcgagattcgggaccacatagccttcgacgttgttttcccatgcgatgacgccccagccttggcgcgactgtacggcctgcatgatcgcgggcacgtcgggcagggcggtgaggtcgaagtcgccgagtgtggcgaactggtcggcggccgtcattgccgcctgatgggtgaaggtgccttccgggcccaagtaaaacagtttcatgcgtgccataaggttctatggtagcggccgtaatcccctacgcccgccgatacgcgacgcattcccggaaatgtgccgccatatatagttacgcgcgcgattcagaatgagtgggaataacgaaccagcgggcgggaagaatgagcaggacgacttggaccagtatcaggccgtacagccagatgtagccggcatgctgggagaagaacggcatgtcgccttggaatccggcgacgatgagcgctttgccggatgtgatggtcagtgccatgccccatgcggtcagcgaggaggcgatgaggtgcagggccagtccgaccgtgcccatgcgcgaacgggcgcaccatgtcgataggccgatcagcagaaatgccagcaccagaccatacggaatactcagttctgcacccatacggtgggcgaacgtgcccacaaaggcggaagccacgcccgccgcaatcgtgatcaacgatttgaccagcgcgttctggcgatacgaccacggacgcagttcagtagtgctcttcacagtcatgcgtttcagtataggtggggatatgacttggcgaggaataaacttggctcccctcagagaggggagccagagagaatggtcggctacagtcgcaccagatcacttaccctgctgggcggcgttctggcggcgctgcttggcgcgccacttgtaccagtcctcacggccgaggatgatcttgcgcacgcggatggactccggggtgacttccacgcactcgtcctcgttggcgaagtccagggactcctcaaggctcatcttgatcggcggggtcagggtttcgagcacgtcagcggtggaggaacgcatgttggtcatgtgcttggccagcgtgatgttcacatccagctcgtcgggcttgttgttcacgcccacgacctgaccctcgtacaccggggactgcggttcgacgaagaagttgccacgggcctgcagacgctgcatggcatacggagtggccacaccctgacgatcggaaaccatggaaccgttctgacgaatggtgatggcaccagcccacggagcatagccagcggagatggaggaggaaatgccggtgccgcgagtggcggacaacagagcagtgcggaagccgatcagaccacgggacggcacggtgaactgcagacgaacccagccggagccgtggttggtcatgccgtccatacggcccttacggtcggccatgagctgggtgacagtacccatgtactcttccggcacgtcgatggtggtattttccatcggctcgttgaccacaccgtcgatcttcttggtgaccacctgcgggcggccgacggtcagctcgtagccttcgcggcgcatctgctcggcgagcacggccagcgccagctcgccacggccctggacttcccaagcgtcggggcggtcggtgggcagcaccttgatggacacgttaccgatgagctcgcggtccagacgatccttgatcatgcgggcggtgagcttgtggtccttgccctcggtgccggccagcggggagtcgttggtgccgaaggtcatggagatggccggatcgtccacgtggatgagcggcagcggcttcgggtcgttggggtcgacgatggtctcgccgatcatgatgtcgttgacgccggcgacggccacgatgtcgccggggcccgcggactcgaccggggtgcgctcgaggccctgcgtgcgcagcagttcggagacgcggaagttctcgagggagccgtccacacgggacaggccgtaggtcttgcccttctcaagggtgccgttgtagatacggaccaaaccgagtcggccgaggaagtcggaggagtcgatgttggccacgtgagcctgcagcggggcgccttcctcgtattcgggggccgggatggtggagatgatggcctcgaacagcggctcgaggttgtcgttgtccggcaggccaccgtcggcgggctggttcacggaggcgtagccggccttggcggcgcagtagatgaccggcatctccagcagctggtcgaggttcaggtcgatgccctcgtgctgcacgtcgtcggccaggccgagcagcaggtcggaggtttcgccgacgacctcttcgatacgggcgtcggggcggtcgaccttgttcacgcacaggatgaccggcagcttggcctccagggccttgcgcagcacgaatcgggtctgcggcagcgggccttcggaggcgtccacgagcagcacgacgccgtcgaccatggagatgccgcgctcgacctcgccgccgaagtcggcgtggccgggggtatcgatgatgttgagggtgatgccctccgggtggccgtacttggcggccagcggaccggtgtattccacggccgtgttcttggcgaggatggtgatacccttctcgcgttccagatcgttggaatccatcacacgatccggcacttcctcacgctcggaaaacacgtgcgactgctgaagcatggcattgaccagggtggtcttgccgtgatcgacgtgagccacaatcgccacattacggatatctccacgaaccgccatcgaaacctctcttaatactgattttcttgcgtaatcgttcggtacttgcgttctcgagtacttgctcttggatatcaacctgtacctacacacaaaccgtcacgatgttactggcacaccttgacacacaacgggcccggctttctgagaattagtcacatgtcatctggcttgcgagactttttgtattccacactctcgactcccctccctgaggggagctgtcgccgtgggcaactgaggggcgccaagtgtatcccctgaatctcccctgaatcatccctgagtacagcaccgtcatgggtagttactgagtaacctgatatccaacgatagttactcagtaaccttcgcccaaggcaaaccgtctatgcaaaggggatgcggtatggcaatcagagaagcgctattagcactgttggagcgaggcccggccagcgcctatcagcttaagaaggacttcgaccgcaccatcggtctgacttggccgctcaatatggggcaagtttccactacgctgcagcggttgaaccgcgacgggcttattgaagagaccgcgccgactactagcggatccaatgatgtcggcaccgcagcggccgcaccattatggcgattgaccaattccggcgcccaagagcttgaccgatggtggcgctcccccattaccccggaacaacgcggacgcgacgaactggtgatgaagctggccgtcgccgtggaaatacccggcctcgatgtttccgaactcatccaacaccaacgccacgctttgcagcaactgctgcacgacatcacccgactgcgccggcaaacaccgcccaccgaactcgccacacgtctagtactcgaccaccatattttcatcactgaagcggaattgcgctggctcgataccgtggatgagacccagctgcgagcacaactggcgcagcaccccgtttcggcacctctcacggcaagctcagccgcactcaccgccaccattcaatagtgcataggagcacatcatgacttctcccgttctttcttctctcccgcaatcttccccatgcgcgctggaattacacgacgtcactcgcgttcacggcaaagatgcacgtcgtgtcaccgcgctcagtcacgccaatctcacgcttcgcccgggtgaattcgtggccatcatgggccccagtggttccggcaaatccactttgctcaatcttgcgggcgggctcgatgtgcccacgcaggggcacgtgctggtcgaaggccgcgatctggccacactgtcaggggccgaacgcgcggccatccgccgcaaatcgataggctacgtgtttcaggatttcaatctgctgccttccctgagcgcagccgagaacgtgtcgttccccttggaattggatggctggaatccccgcaaggcacgtgaggccgcgatgcaatccctcaatgaagtgggagtagccgatatggctgatcgccgacctgaagacatgtccggcggccaggcgcaacgtgtggcgattgcccgcgcactggtcggcccacgccgtctactactggccgacgagccgaccggagctctggattccaatgccggcatgacgattctcgaagtgttgcgcacccgcgcagatcgcggcgcggccgtactgctggtcactcatgagcctcgcttcgccgcctgggccgaccgcacggtgtttttgaaggacggccgtatcatcgatgaaaccggctccagcaatatggatgatttgctcaaccttgaggaaaggggagcatgatggcacgcgcagccctcaataatcttgccaatgccaccgtcggtcgctctgcccaaattccccatgccgctaggccaagccttggcgcacgttgcaaccggtatcgggccgcgctgcgactcggctggcgcgacgcactacggcacaaggcccgcaccctactgtccttgctgctggtaatgctgccaatcgccgcaatggtggcctccatcggtatgaccaccaccataccgcccaccagatcgcgtgcgctggcgacaatcccggctgatacgcaggcggtcatcaccgccaccgccaggccccgcaccggccaaccgttccggcagtcacccgaaagcggcggcacgtggcaggacgatccctcccagcagccggcctcggccgccgagcttgcgaagattctgccgcaacaggatcggctgctcccgtattggcagtcgcccgaactcatcgccatcaccggcaccgcgttgcaacccggcgaacagaccaaggctgggatcgacgtgaaaagcgggaacgacattgatctgaacgcggcctccaccgcgaccatgaccgaggcttcacctgaggcattgcaacgaatgttgccgaagctggtcaagggttcggcgccgcagaataatacgcagattgtcatcagccgcacattggcggataatctcggcgcttctctcggtagcacggtgacgttcgtcgctccgccgttcgatggctggatgagcctggacgggcgcatcggcgaggcggtggccgacactcagcgtgcttggacagtcagcgggctgaccgatgaatccgaagccgcggcatggggcttggaaggctggatgtcagccatattggaatctgatggcgtcggtgtggatggccattatttggtggtcggcccagagccggtcacgtgggcgcacacccgcagcatgaacctgttgcaggccatcgtcatttcccgccatgtgctgactgacggctatccgcccgcatcgcagctctacccgatgcagatcgatgcggctaccatgttgaaccacatggtcactgtggtcatcaccatgctggtgggtatgttgctggtactgtttctggtcacgcccgcgtttacggtgtcggcagatcagtcacgtcgtgtgcttgggctcgcggccgcatccggtgctgcaccacgtgacctcagtcgaatcatttcctcgcaaggtctcgttatcggcgccatcggtggcgtgctgggctcggcattgggattcgcgcttaccttggcggccggccctgcgataggcgcattgcgtggatccacgccgctggagatcctgcacggattctcgtggggctcgctgccgatgggtattgtcacggcaatcatcattggatttgccgcgacgattgcgccggctcggcatgtggcgcgtatgcatccagtcgatgcgttgaaggattgcccgacaagagaggaaatcggctacggtgaatccgcgaatggcgtggatacgaagcttcgccgtaatcctttgagactgctccgtgttgcggttggtccgattctggtcttggtctccatcgtatgcgccgcgctcagtctgacattgccattacccacgctggccgatcacaatccgggcgcggttccggccggaaccgaaacgcatatggctctgcttgttgccacgattttgttggctgtcatagggcttgcgttgtcgattcgcacttttgcacggtggtgcggcaaagcgggttcccaactgaacatcggcgcacgcctggcactcagggatgcagccgagcatcatcgacggttcgttccggcggcatgcgcggtgctgattaccatgtgcatcgcctcgtacacactggtaatcaccggctccatggtggcggaccagcgaaattccacgatgacgatgacgtatggaccgtcggggatggccattggggccgacgtgcatgtcagcaatgagttcgaccgtgctgtggtgtcggatgcgatacaccggcttggcaaagagacgccgatacgcgctcattacccggtgtacaccgaggatgtcaagcgatggtcaaagctcaatgatacgaccgaagtcgattccgacaagttgaacgccgaacacggctacatgtatgccgctgcattgctcccggccggtcacacttgtgataacccaacgatccaagagcaaccggacacgtccacatgggtgggccaggatgccgcttcggccctgtatccaaacgttccgatacgttgtgtgccgatagaccggtcccatcagccaacgtattcgaatatactgccgagtttccgcggcgtgaatctcattatggatggcaatgcgatgcgtttgtccggcttcccgaacgcggatgaggcggcacaggtgcttgatgcgggcggtgtggtggtcggcgatgccggcacaatcgacgcgggaggtatggtgcgtgtggccatttcgccgaatccggcaattgcaaacgaatctcaggccacacatatcgagaagcgcaaggccatctacgtgcgcggcgcgtacccgctggtgatgagcccggcaacagcacaggcgctcggcatcaaacaattgcggtatctgggtgagtatctagacttcgccggtggcaactcccccgttaccgtaaagaaggcctcagcttatgcaatcgaaaatctgccgctggcatccacgagcactgacgggaatcgcctgccgtggggtgacaatatggcattggtgcccattggcctgttggcattgctggcactgatggccacgctcgtttcactgctgctggcccgcacgcaggcccagcgcgacatggccacgatggtcgccgtgggcgcgccaccccgattcctcagacgttacggcctgacgcaggctgcggtgattctgctggccggcgcgccagtgggcgtggtatccggcgtggcgttgggatggctgcatgtggcatggaaccgcaggatcggtgtggacggtcattggctggaaaccgtgccgatctggggattgcaggcggcgctggcattcggcgtagtggtaaccggactgctggtggcgtggctggtcacaaaaccaccgcgcaatctcacccgtcgttccctcgattgatcagtgacatacggcaacccttgccgtgtcattcgggagctataagacaaaaagtggcccacacattggtgtgggccactttagtagcgaaggctgaagtgtaatcagtcttcgagattgaggcctttgcgctcgggcaagcagagggctgctatgcaggcgaggatgaaggcggcggcgaagatgatgaaggccacggccttgttgccgccggacagggtcaggaaccacggcatgaggagcggcgcgatgatggcggcgatgcggcccaccgcggcggcggcaccggcggccgcgccacgcaggcgggtcgggtagatttccggggtcacggcgtacaacacgccccacgcaccgaggttggaggcggacagcagcatgccgaacacgagcacgagggccgctgatccggcctgcgagaacgcgaaggcggccacggcggagacggccaggaagatgctcagcgtcttgcggcggccccagacctccacgagccatgcggccaggaagtaaccgggcagctgggcgatggagatggccagcgtgtagccgaatgacttggtcagggagccgaactggtcggcgagcagcgacggcatccatgtgaacgcgccatagtaggagaagttcacaaagaaccacgtagcccagatggcgatggtgcgggccaggtacttggagccgaacagttcgcgcgtcttgatcttcggtagcggcttgcccttgggagaagcaaccggctgcactcccccggcttcctcgaaatagcgcacggccttttcggcttcgtcttcgcgacccttggcttcgaggaatcgcacggattctgggatgtgtacacgggtgacaatcgcgtagagcagtggcagcgcgccgatggccagcgcccagcgccagccccagtcaccggtgttcgggatgacgaagtagccaatcatggcggcgatgatccagccgacggcccagaaggattccagcagcacggtcatgcggccgcgctgtttggtcggcgaaaactcggagaccagcgtggaggcgaccggtagttccgcgcccaagcccagtccgatgatcagtcgggcgccgagcagcatgccgagcgaccaggacagcgccatggcgccgttggcgatgccgaagatgatcagcgtggcggtgaacacggttttgcggcccacgcggtcggcgatgaagccgcccaccgccgcgccgatggccatgccgacgaagccgatggacagcacccacgacttttcggtcggggtgaggttgaagtgcgggtcggctgcgatggcggcgaccacgaaggaaacgaggccgacgtccatggcgtcgaatgcccagccgatgccggaggcgacgaggagtttacggtgcgccttgttgaagggcagccggtcgaggcgctcgttgcgggtgagctgcgcgggttgcgctggagtggtggtgctcacgtcgtttcctttctggtaagtggcgtcagatttagtgtcgggtcaggtcggtgtaggactcttcgatggccaagctgatgcgttcgacttgttcgcgggtcagcggcttgcggaaggtcatgcgtaatgccgatttggcgacggacggttcgaggcccatcgccagcaacgtggcaggaatctcgtggcgcccgatggcgcaggccgagccggatgaggcagcgatgccacgcgcgtccaggtcgacgagcagcgcttccccggtgacgccggggaagatgaaggaggcgtgaccgggcagacggcgttcggggtcgccggtcaggtcggcgcgaggcgcgacccggcgaaccgcgtcgatgagcgtgtctcgggacgcgaccaactcacggcactgcacctgcatgcgcgcattcgattcgttgagtccgatggcaagcgccacggcgccggccacgttctgtgtgccggagcgcaggccgcgttcctgccctccgccggacagcaccggttcgatgggtgtgcggccgcgtaccagcagtgcgcccagtcctttgggcgtgccgaatttgtgtccggatacggacagggcgtccacatcccagtcacgaaaacgaatcggaatctggccggcggcctgtacggcgtccacatggatgggcacgccgtgcgcgtgggcgatgcggaccagttcctccacgggttccacggtgccgacctcgttgttggccagcatggtggagaccagcgtggtacgttcgccggcctcgccgtcaagctcgcgttcgagcgcgtcaagatcgagatgcgcctgcgcatccacgggaatgcgcacgacttcgaagccgaaccattcgtgcagccatgccgccgattgggccacggccgggtgctcgatggaggagatgatgatgcgcagacgacaatttgccggctgtttgccatcggtttcgtcgagtccgtagaccggccgcaggcccagtttgcgcatgcgcgccatggcgatgcctttgatggccagattgtccgattcggtgccgcctgaggtgaagatcacgtcatccggccgggcgcccaacgccgcggcgaatgatgcgcgggccgcgtccagcgcgcgggccgcggttttaccgggctggtgcacactggccggattggcgtaggcctcagtcaggaacggggtcatggcctcgatgactgccgggctcactggttcggtggcggcggcgtccaggtacagttcaccgggttcaccggatgcgttgggggtatcggccatgactagttccaatccaatccaaggtcgatgctgcgcaccgagtgggtgagcgcgcccacggagatcacgtccacgccggtggcggccacggctggcactcgctccaggctcatgttgccgctggcttccacgatggccttgccgtcgatgagctccacgccgcgacgggtgtcgtcgagcgagaaattgtccagcatgatggtgtccgctccgccggcgagcacggcgggaatctggtcaaggcggtcgacttccacttcgatatgcgtagtgtggcccacctgttcgcgcacgtggcggatcgcgccggccaggtcgatgccgcgcgcggcgagcgccgccagatggttgtccttcatcatgaccgcgtcggacagtccgtagcgatggttgtggccgccgccgcagaccacggcgtatttttcgaacgggcgcaggccgggcgtggttttgcgcgtatcgacgatgcgggtgcgctcgtagcggcgcggccgggtgacgggtccgtcataatcgtcgccgtagatggcgttcaccgcgtccacgaaagcggcggtcatggtggcgatgccgctcatgcgctgggtgaagttgagggcgatgcgctcggcggtgagcaggtcgcgtaccggaccttccacggtggcgagtacctggccacgctggaatcgttcgccgtccttgatggcggcggtgacggtgacggccgggttctgcgcggcgaaggctgcggcgaacacgtcgatgccgctcatcacgccgttttcgcgcgcggtgaggtgggccgagccggtttcgtccgcggggatggtggtctcgcaggtgatgtcgccgtagggcgcgtcttcggcgagcgccgcttcgacggcggtgcggatgatgtgtgatgtgagcatgggtcagtccttgatgtaggcgacggagtgggcccagttgtcgactggctcgctgtagtcggtgcgggcgtgggcgcctctcgactcggtgcgggcgagcgcggcggtggcggccacatagcctacggtgagcatgttgcggttctccaaagcctcaacgctgcttgcagcgccatcggcgtttatatcagcctgggcgtttgcggcggcgaggccttggccgagttcggcgatggcggttttcagtccggcctcgtcgcgcagtacgccgacgccatgccacatggtgttctggatgcgggtacggtcccacaccttgtcggcggcggtatcgtcagcagcagccgtagcggcaggagcggccaacgcgatcggcgcatggtcgaacacggcaccggtggcggagttcaggaacggttcgggtgcccagaccgcgtcgtcaccgtccgcgacggcggcaagaccggcgcggcgtccgtagacaagtccttcgagcagcgagttggaggcaaggcggttggagcccatgacaccggtgcgggcgcattcgccggccgcgtacaggccggggatggaggtccgggcgttcagatcggtgcgaatgcctcccatgtagtagtgcgcggcgggcgccaccgggatcggctccttgctccagtcgaagccaagcgaacgcgtataggcgtcgatggtcgggaatcggtgggccaggaagctggccaggtcggggttctcgcgggtcatcggcgagacgtcgagcatcacgggcttgccaccttgcgcctgcatcacacggaagttctcgcgggccacgacgtcgcgcggtgcgagttcggcgcgcggatcgatgtccttcatataccggtggccgtgttcgtccagcagcaccgcgccttcgccgcgcacggcttcggagacgaggaagtgctcgcccacggccatggcggtgggatggaactggtagaactccagatcggcgacctgggcgcccgcacgccatgcggcggcgaggccgtccgcggtggcgaccggcggattggtggtgtatgggtacatacggcctgctccaccggcggccaagatcacccggtcggcggccagatccttgtcctgcccgtcgatcagcaggcggacgccggcgatgtggccgtcccgcacgatgagatctttgaggaatgcgttctcgatgatgtggatgcgcgggttcttgcgcaccatggcggagacgtccagttcgagcactttgccggtggcgtctcccccggcatgcaccacgcgggcgcgcgaatgagccgcttccaggccgcgcagcatgcgtccctgcgcgtcgcggtcgaagtggacgccggccgcggcgaactcgcggacgcgctccgcaccctcacgggtgaggatgtccacggccttcgggtcgcacaggccgtggcccgcggccatggtgtcggcggcgtgcagcttcgggtcgtcgtcggagaagatggccgcggcgatgccgccctgcgcatgataggtgttcgattccaccagtccggccttggttaccaaggtcacatcgtgtccggtgccggccacggccagtgccgcggacagtccggcgacacctgcgcccacgacgacgatttcagtgttgctcattgtgttgctttcctctgtttttgcgtcatctgctccccctcagtcacctacggtgacagctcccctcagggaggggagctagaagcatgtcacgggtgaacgcgcagcatgcgctccagtgccaccttggcttcgcgggcggtgtcttcgtccacggtgatgcgattgaccacgttgccggcttcgaggttctccaaagcccaagccaggtaagccgggtggatgcggtacatcgtggagcacgggcagaccaccgggtccaggcagaacacggtcttgtccgggtactgagcggccagacggttcaccaggttgatttcggtgcccacggcaatggcggatccggcgggtgcgttggcgatctccttgacgatgtacgcggtggagccagtaccgtcggcggcgtcgaccacctgcatcgagcactcggggtgcacgatcaccttgacgcccgggtatgccttacgggcacgttcgacctgttcgacggtgaaacgctggtgcacggagcagaagcccttccacagaatcatcttggcgcgggcgtaatcggccggatcggcggcgccgccctgtgccttgaacgggtcccacagcgacatctcgctcagcggaatgcccatcgcgcgggcggtattgcggcccagatgctggtccgggaagaacagcacgcgcttgccgcgggcgaacgcccattccagcacggcgtgcgcattggacgaggtgcatacgatgccgccgttgcgtc

SEQ ID NO: 901 - DNA, 13948 bp, Unknown
  R117_24m  MAG No. k141_1424
cctgacgatcaggagacggcggtgctgcagcctgtggccgccgatgggctgttcgcagccgcggccacaggtaccgccacgccacagcaaagcgacaatggcaccaataaccatgccgacaatacagcctatgtgggtgaacatgttatggcatctaccaccgctaaatcacatggcaaggccgcacggattgccatcataaccatatttgcagtgttgcttgccgcattaatagcctatttcttcgtcggacgttggtacttccaagacaaggctgcgcccggtgttcatttgggcaatgtctctgtcatgggccagacccgcgaagaacttgcgaatactgtgaagcagcagctgaataacaccacagtgacgttcaccgccgaaggcaacagcgtcaaagcctcgctgaaggaccttggcgtcaccgtcgacacggataaaaccgtagatgcgctgttgaacgcgaagaccggcgacgtggccaagctcaatattttcgatcagccgcatatcgctctgaccgccaccagagacaaagagactgccgaacaattcgtcaccgccggcctggtcgatgaggccgaccgagcgcagattgccaccgttgtctacaacaagagcaccaagcagttcgattacaccgcgggtcaggatggcaagggcccggatatcaatgttgtcaatgctgcagtcaaggaggccgtcgcgaccccgggcgaaaatgcgacggtgccggtcaagctacagactgcaaagaatccgattgatgacgcgagcgcacagcaaacacagtttgacgccaatgccaagcttggcctcaaactgaccgtggacaacggcgtgaacaagagcgtcaccatcccggccgataccattgcctcattcctcaagcccacggtgaataaggcgggtggcaccatgagtctggtagtcgaccgcgatgccatcaccaagtacgtcaccagtgacagcgtaaccaaggaactgactgttcccaaggtgacacgcgaggtctacatcacgccgaaagacgaaggcggcgtggaaattggtgccgataagacactcggtgtggatggtattgaagtgactggtgccggggacgcccccgaacgtctggctaccgccatcgagcagaaccagtccactgattccactgtggctgtgaaagacagcccatatgatgtcaagcaggtcgaggtgcctcataacttcgatacggcaaatggcgataagtgggttcatgttgatctgacgaaccagactgccactgcatatcagggcaccacggtggtcaagaagttcaacatcgcttctggcaagcccaccgccgatggttccatgctgtccgataccggcacgttctacgtgtatctcaagtacgaatcgcagaccatggttggcgaaggctacaaccagccaggcacgccgtgggtttcctactataacggcggcgaggccctgcacggtgttcctgcatacatgtggggcgagcaccccatctatgtgcagcagggtatcccaggctcgcacggctgcatcaacatgcaggtggccgacgccaagtggatgtacgactttgccaccatcggcactcgtgtggtcgttgatggcaccacaccgacttccggtcaggcgttgcgcccggctggtgcggatgccaccggatggcagggcggcaacgccagctgattcgatccatgtttaatcgataacggaaaatccccgacccttgtgggccggggattttttgtaggtaccaatcgatagcgagtccgccgataagcgtggtggcaccgtcaatacggtgccaccagtaccgtcagtacggtcagatacgatccaatgcctgcttgagatcggcgataaggtcgtcggcgttctcgataccgaccgaaatacgcaccagattggcgggcacctgcagggtggtgccggccacggaggcgtgggtcatggcggcgggcacctcgatgaggctttccacaccgccgagcgattcggccagtgtgaagatctgcgtgtggtccacgaagtgcttggccgcctcggcaccggccgcgagctgcacggagacgatgccgccgaagccgccgtgcatctggcgggcggcgatttcatgacccgggtgggactcgaggcccgggtaccagacgcgctcaatcacatcagagggctgggattcgagccattcggccaccttcagggcgttggcactgtggcgcttgacgcgcagatccagggtcttcaggccgcggatgtccagccaggagtcgaacggggagggcactgcgccggcggcgttctgcaggaaggcgaccttctcacgggtctcctcgtcgttgaccaccacggcaccgccgaccacgtcggagtggccgccgatgtacttggtggtggagtagaccaccacatcggcgccatcggccagcgggtgctgaagggcgggcgaggcgaaggtgttgtcgaccgcgaccttggtgccgtactcgtgggcaacttcggcggtggccgcgatgtcggtgatgttgagcagcgggttggacggggtctcgacccacacatactggtagtgcttggaggccaatgcggtttccacggctttcagatcggtgatgtccaccacgtcgaggcccacaccccacggcacgaacaccttggagagcaggcggtaggtgccaccgtacacatcgttgccgagcaggatgttgtcgccgggcttgatggtggagcgcagcagcacgtcgatggcggccaagcccgaggagaagctcagcgcgtacttgccgccttccacggcggcgagctgctcgtcgaagctggtgcgagtggggttgatggagcgagagtagtcgtggcctcccctgaggcccaacacgccatcctgcttgaaagtggaggtggcgaagatcggcgtgacgaccgcaccggtggtcgggtcgggctcctggccggcgtggatggcgcgagtggcgatgtcggtattggcgaacttggcgttgtattcagcggacatgatattgggttcctttcgggattgttccgtattcgaaggtaaaacaggtgcggttagttagtgcggatgttggtattgattcttttgatagctagttatggagtccatccgcagctccctcatcagagggagttccgttaaggtactgctcggcgagggagggcttgctggtgcgttccacgatgtcgccgtagccgttggcacgcatccagtcgtcattgaagatcttctccagataactgcggccggaatcaggggcgagcaccaccacaatctggttctcgtccaaatcattggcaagcgcgtacttgatggcgctggccacggccatgccggacgagccgccgaccagcaacgcctcctcgccggccagacggcgggtcatttcaaaggcttcggcgtcggatacgcgcacgatgtcgtcggtgatgttccggtcgaaagccttggggtagaagtcctcccccacgccctcgatgtcgtactggtggacttcgtcgcgtgaggaagcggagtagatggagccttccgggtcggagccgatgaccttgaccgcgccgttggaggcttccttgaggtacttgccggtgccggagatggtgccgccggtgccaatgccggccacgaagtgcgtgaccttgtggtccgtagcctcccagatctcggggccggtggtgtagtagtggctcagcgggccgttcgggttgtcgtactggttcgggcggaagccgccgggaatcgtgttggccagtcgttcggcgacctggtagtaggagcgcgggtcgtccgggccggcgtcggtcggtgtgacgatgacttcggcaccgtaggcgcgcagcaccgcgcgcttggattcggaaaccttgtccggcagggtgaaaatcgtgcggtagccgcgctgctgggcgaccagggccaggccgacgccggtgttgcccgaggtgggctcgacgatcacgccgccgggcttcagctggccggactgttcggcggcgtcgatgatgcgctcggcgatgcggtccttggaggagccgccggggttgaagtattcgactttgacggcgatggtggctttgacgccggccgcctgcgggatgtggttgagcttgacgagcggggtgttgccgatgagttctgcgaggctgttgtggatggtcatgtgaagtccttcgttgctggggttgtgggggttttgctgcgttgcgttcgtgaaccgacgttcccagacgaatggactgtggctttggtttgaaaatcgagtattcccgctcactgtacggtgaatccgaaaagtgaaccggtttttcatgttaaccacggctcgcgcattacacgattacgcttgtgccatcggatacatgaaaagtatgcggcagattcgccgcgattcgaatgctccatctcaagttatgcgtcactgaccgctcgcccaggggcgtcggttagcgacaacaacatgagataatctgcatgcctcacaccatagcacaacccgcgacaagcgcgtgtcgccggcggactgaggggagtacgacggcacccgtaactcccctcagcctcactgcattcgacagctcccctcagggaggggagccaaaaagatctataacgaggctgcctcgatgagctgacgggtgtaatcggattgggggttgccgagcacttcggcggtgggacccgtctcttcgacgcgcccgtcgtgaagcacgaggatgcggttggcgatgtgctgcaccacgccgagatcgtgggagaccatgatgatggcggtgctcggccgggcctcacggatagcggcgaaggtgtcgaggatctggatgcgcgcggccacgtcgatggcgctcattggttcgtcggcgaggattaccttgggctcgttgatgatggcgcgggcgatgaccacgcgctgcgcctggccaccagacaggtcgattgggtaccggttcaggaagtccgccggttcaagacccgccatggtcagagccgcgaccacccgctcgtcgatatcggtgttgttcagatcacgtcgctgcagactcagcggttcagccaccgatttggcgacttgccaacgcgggtcgagtgatgagaacgggtcctggaacaccagtcccgattcgcggcgcagggtcgcgaatcccggcgattttcggccgccgacaatggattggctctcgtattccacgctgccggagtccgcggattccaagcccagcataatgcgggtcagcgtggatttgccggatccggagccgccgatcacggccagacattcgccggcgtggacgtcggcggagacgtcgaagaggacttggtggcgtgcggtgcgcggtccgaaggatttggtgatggagtgggcggagaggagtggcacactgctgttactcatgcgaatcctccttgggggtgtggagggtgagggtttgggcggcggcgaccaagcgttgggcttgcggcgtggtcggtgcagcaagcaggtcggcggtgggtccggattcgacgatgcggccggcgtccagcacgtagcagcgggtggtggcacgcgcgagtacggagaaatcatgggtgatgaacagcatggatgcgccggcgtcgtccaccaacgaggtcagcaggtccacgatctgacgttgcgtgatggagtcgagcgcggtggtgggttcgtccgcgatgatgaatcgcggtgaggtgatcagcgccgtggcgatgcccacgcgctgctgttggccgccggacagttcgtgcgggtatgtgccggccacgtcacggtccagtccgaccttgtccagcatggtattcactcgctcagcacgttcggccttggtcagatcgtaatgcagtctcaacggcaacgcaatctgctgcgccacggtcatcaccgggttcagcgcatgggccggattctggaataccgtacccacataccggccgcgcagatcggcaagcgtatgctcgtcggcgtacgcagcggaatcgtggcccgaggtggcaaccctgcgttcaccggcaacatggtgcctatctgccgcgccgcgttcttcgtcagatcctgagtcatcttcctgcccatgccgcgactcggcggtttctccggacaggatggcggtttctcccatcgtgatggtgccggacagcacggcctcgcgcggcaacaggccgagcaatgacttggcgatcatcgatttgccggagccggaggaaccgatcaggccgacccgttcgccgtccgcgatggacagatcgacatccgtgacaatcggtttgccgccgatagcaatattcagcccgtgaatttcaacgctcatcatccgtctccttcggcgctgccactgcggactgcgccgcagtgtcaccggctcccctagccaccggcacaaccgcaccgggcacagtcatctgccgcaacgcgggattagccaccgggtcggtggcgtcgcgcaacgcgtcgccgaacaggttcagcgcgaccaccaccagggtgacgatcagaccgggccacaccaccgtcaacggaaacacgttgatgagtttgaccgaggtggccagcgaatggccccagctcggcacccccgcgccgacgcccacgcccagataggtcaggcccgcctcggccagcaccgaggtgcccgccgacatcgacgattgcaccatcagcaccggcgtgatgttcggcacgatgtgtctgaccagtacgccgaacccgctggcgccgttcgcccgggccgactgcacgtatcccgagcgggcggcgagcagggcggccggacgggcgacgcgcgccagatgcagcccgtagccgatggagcacgcgccgatcaccacggccgcggatgcgccgaacggcacggcgagcagcagggcgatgagcacggtggggatggagatcagcgcgtcgaccacggcgaccgacgccgaagcgagcgccgaagaacgggcgaccatcagcccgaccagtaggatgccgatggcagccgagcagacaacggtcagcagggcgatggcaaggttcgtacgcgatccggccatcagccagctcagcacgtccgcgccggtgccgtcggtgcccagccaatgcgcggacgacggcttgtcccacacgtggtagccgtcggtggccagcagcgactgcggggtccagaacaacgacaccagggcgacgaccatccacaaccccagcacgatcagcgagtagcggccggtgccacgggaccagatggtgcccagaaccacgcccgaacgacgccatcgaccattgcgatcaaccatcattcctcctttccggcggccagacgcgggtcaagcagcgcgtgcagcagatccaccgccaggccgatcagcaggaagaacgcggcgagcaggaacagctcgctttgcacggccaccagatcgcggttgccgacatcgcccaccagcagggcgcccagaccgggcagggcgaacaggttctccaccaccatcacgccggtgatcatcgaggcgaacgccagccccaccaccgagacgagttgcggagccgccaaccgcaatcccacgcgcaccaacgcctgggtgcgggtcatgccgcaggacatggccatatcgatcggacctccctcatcggcgatgccttccagaatggagcgcgtgtaacgcatgatgcccgcaccggacacgaatccggtggcaagcgccggcaggatcagggacgagaccgcccgcccgggagcgccccacccagcggcggggaacccctgcgagggcagcagaccgacaaggcccacgccccgtgcgaacaggaggatgagcagcaggccgctccacagggccggcacggcgccgcccacgatggacagcacgcgcaggaaaccgcgcacggccggcgaccgggagatcacggcggcggcgcccatggacaagccgagggtgagcgcgatggccaggctcatcacgatcagcgggaacgtgatcgtcgcacgttggccgacctgggaggtcaccgcccgcccggtcagcgccgacacgccgaggtcgccgtgcaacagccctccggcccagtcgagatactgcacgacatacggccgatcaaggccgaattcggcgcgcagggccgccacacgcgccggcgatgcgttcatgccggccatcacgaccgccacgtcgcccggcaggatgcgcagcatcgcgaacaccagcaccgaaatgccgaacagcgccgccgcgaacagcagcaagcgttgcatcaagaaccgcataacgcctcccttatcgattccctcgccaccgcccgtggcgtcaccggccggatgggccgtccacggtcgggcgcgcagcggaatcgctcccgcgccgcgcccgagcgatgggttccgggactacttggtgtaggtgatccgccagaggggcagcacggtctggctcaggttctgcgggaagccgtccacgcccttggcgtaggcgatggtgaccttccagctgaacagccagtcggccggcgcgtcctcggagacgatcttcgcggccttggccagatacttcgaggcctcgtcatcggaggtggcctccagcgccttggcgtacagggcctgcacgtccttgttgtcgtagtggaagtagtagctcggcgtggtccatccgtagaagtcgtggctttcggcatggtccacgagcgaaagatcgtagttgccgttggcgtgcacgtcctgcagccaagtggagaactccacgtagttgatcttcaggtcgatgccgatgggcttgagctggctcttgagctggtcgccgagctcggtgccgtacacgttggcgtaggtgagggtcaggtccagcggcttcgactcggagtatccggcctgctccatgagcttcttggccttggccacgtcatgcgggtacaggccgctcagatcctcgtaaccgggatcgaccttggggatcggaccgccgaggggggcgtccacgccgccgcgcgaggcgatgatctgcttatggtcgatggcgtatcggatggcctggcggacgcgcttgtcggagagcttgtcgttggccatgttgaaggcgagcacgaacttgtcggaaccatcaccggacttgaccacatagttcggatccttgcggaacggatcggcaagggtggcggagatgggcgaaagcacctgcacgtcgccgctcttgagggcgttgatgctggcgttctcgtccggcaggaaccggacgatcacgttctcggtcctcgccttgtgctcggtgccccaatacttggggttcgccttgagcacgatcttgtcgttcgggtcgaaggagaccacggtgtacggacccgagcccaacgcgccgttcttctgatcccaggtggcgtccttgtcgtagaccaggccgggacggctggtgaggtaccacagcatgttcgagttgggcgcggagagggtgagcctgaccgtgttggcgtccacggcctcggccttgtccaggctcttgacctgctcgtagtcgtagtacttctgggccttgagctcgttgatggaccacgccacgtcctcggcgtcgagcttgtcgccgttggagaagttcatcttctcgttgaggtggaacgtgtaggtcaggccatccttggagatctcccagctcttggccagaccggggtggaccttgttgtccgagccgcgcgagacgaggccctcgtacacgttgccgatgaggatctgctcaagggccgaacccgactggtggcggatgtcaagattgaccggggcgagtttgaggccgacggccacggtgtcggatcggctggccgagacggaggcgttcgcgtccttgcccttgcctttcccgccgaagacggtgacgcccacgatgagcgccgcggccacgacgaccgcgatcagcgtccacagccaccatttcgggccgccgttcttcttgttgtttgatgatttcgcgcgcgcgttcaggctcgcgtcggtgctggcggcttgattcgcgccgtcgatgttcctgtcttcggttgcgccagactcgccgtgcacaccattgttctgggacatggatactccctgatgcattcgggcatgcttacgcccgaatatggtttcgttgttatcttgcgtggttgaccgcccattcgggtcgatcaccacgttctactatatccccggacacgccggaggcaatggctatactggattgcggcgccgacggagggtccgcggcgaccacaacacgcggcgcatcgtcgggcaacgacgcgggaagcgctggcgtgggcacacgtgcggccttggcataaggccgggaggcagctatggcacatattcttctgggcgtcaccggcagcatcgccgcattcaaggcctgtcatctggcatccgattggaccaaggccggccacgaggtgcgggttatcgaaaccacagcggccgaaggcttcgtcactcccctgacattcacctcactgacccatcaacccacccgtaccacgatgttccccgcttatccggccgcgcacggcgacgtgacggccaatccgaccgtgccaacgaccatcaatcatgtggccgatgcggcctgggccaatctgctggtggtggccccggcgagcgccgacgtcatcgcccgcatcgcctgtggattggcgaacgatacgctgacgtccaccattctggcctatgaggggccgaagatcctatgcccggcgatgaacgtgcatatgtacaacaatccggccacgcagcgcaatctgaaaacctgcgccgaattgggctggcagattgtggagccggaggaaggcaatctggcttgcggcgacgtgggacgaggccgtatggaagagccggcgcgcatcgaggaagtggccgctcggctgctggcggatgcgcaggatgaccaggctccctcatcttccccgctcaaggggctgcgcgtgctggtcactgccgggccaacgcaggagccgctagacccggtccgctatctgacgaaccattccaccggcaagatggggtatgcgattgcctcggccgcagccgaatttggtgccgacgtaacgctggtctccggtccagtcgccttgaccgcgcccgatgcggtggatgtggtgcgcgtcacgaccgcgcaggatatgttcgatgcggtggccgacgccttcccggcggcggatatcacgattatggccgccgccgtgggcgatttccgcgtgaccgagattgcgccggagaaaatcaagaaggccggccgcagcagcatcaccgtggagctggtttccaacccggatattctggcgtgggccggcgaacgcaagcgcgacgacggctcgcagatcctgtgcggattcgcgatggagaccgagcatctgattcgtaatgcggagaagaagctgacgtccaagcattgcgacatgctggtggccaacaatctgcgcgacgccggtgccgggttcggcaccgacaccaacgttgtcaccgtgctcacgtccggagcggaggatgccggcaccccgaagatcgagcattgggacaagatggacaaaaccgtgcttgcgcaacgactgttgctgcggctcgcagcgttgcgttccggcggcgcgagcaatgtcgatgacgagaacaaggaggcctgacccatgctgatggcggtcgatatcggcaatacgaatatcgtgatcggttttctggaggtcgaccgcatcgtcggctcctaccgcatcaccaccaaggcgacgcacacctcagacgaatacggtctgatgatcacgcagttcctggctttgagcgattacacggccgacgatgtggacgatgtgatcgtctgctcggtggtgccgaaggtgatgtattccttccgcgcctcgctgatcaaattcctcggattggaaccgatggtggtgggccctggcgtcaagaccggcatgaacattcgtctcgacgaccccaaaaccttgggctctgactgcatcgccgactgcgccggcgcctaccacacctatggcggcccggtgctggtggccgacttcggcaccgccaccacgttcaactatgtggacggttccggcacgattcgctccggcttcatcaccacgggcatccgcaccggggccgaggcgttgtgggggcagaccgcccagctgccggaagtggagatcacgcaaccgcagtcgattctggccaccaatacgcgcactgctatgcaggccggactgtattacacgttcctcggtggcattgagcgcacgattcagcagttccgcaaggaaatcgatgagccgttccaagtggtagccacgggagggctcagccgcattttcaagaacgacaccgacatgatcgacgtctacgattcagacctgatcttcaaaggcatggcatacatctactcgcgcaatgtgaagtaacgcggtgtgcaggcatcggccgcgcatagcgcagtcgattccgtccctccccgaaaaacctactcaaaaccctacttaatcgtaaagccctgattgaggccgtattctcggaggtctttctgccattgggccaggccgtcggagagactgactttcttgccgggcttctccaatggttcgagcgggttgccttcctcgtccttcatgcccatctcaatggcttcctgtcgctgctgataggcgtggaaactgccggaccactcgtatgcctggcccaccgtcgatttgaagtcactgcgcgcatacacttcgaatggcagatactggtatccgaccgacacatcctcggcggcctccgacagtacccggttgaacttctgcccgccgaaatacgggatttcaatgccacggtcattggtaatcgtggttttatccagaaaatcagcggaattcagggtggcgtaatcggccgggaaggcaccgccgtctacacgcgcgctaatgccttgggcgtcatgcgccacaaagtccacgaaacgataggccgcatccggcttacgggtcagttgcaacacggtcagcgccgagccgccattttcggcgttggcaggctgcccaccataggtgggcatgggagccacgcgccacagaccggccgcgcccggcacattggacagcagcaacgacggcatccaagccccagagaacacggaggcgatggtgccggtgcccactctgcttttccaccgatccgaccatgtggcggaggtagtgtcaacaagcccctcatcgatcattttctgccagaattcggtgaaccgttgggtgccggcatcctcatccaaatcgatggtcacggttttgccgtcggccgacgtgtggaacggctgaccaccggcgagccagaccatcgcgtcatagaaactgccgtcgcccgagtcggcggcgatatacgcgccgatctccttgagcttttcggcggcctcgtaatagtcatcccaagtcttgatcttggtggcgtccacgccggcttggcggaacacgtcttcgttgtagaagaagcccatcgggcccgaatccatgggcagtccataggtacggccggcgagctgcacggacgaccatgtgccgagggtaaagaagttggaataatccgagccgattttgtcggtcagatcaagcaattggccggagaccgcgtactgcaacagtgcatagtattcgatttgagccacgtccggcgtgccgtaaccgtcttgaatggcggtattaagattgccgtagccggagatattggtccatttcacgcggatgtccggattggctttttcgaaacggcggatgacctcccccatgctcggttcccagctccatacgctgatctccgtacggttgtcgtccgtggcctgcccgcacgaggccagggatacggaaaggatggcagtcactgctatggttgccattcttttgattcgctgtccgatcactcgcatggtgacgagtgtactaggcggggcttaaaacggtaaaagccccgtgacgggattcgtcacggggctttgtgtatc

SEQ ID NO: 902 - DNA, 15130 bp, Unknown
  R117_24m  MAG No. k141_1602
cgacgatgggcgcacgtttgcgagatagttcaggttgatgcccgcatctgcaggattgctcattatattgctcctattcggttattagcgaatgacgccttttctgatgatgatgttcgcatactgcgattgttcgccggtggcgacgatgcaataggacctgccggcctcctcgtagaaggcgaaccgttccagcatcccgatgcccgcttgcttgccgggctcgtgcctgtcgatgacctgacggtaccggtcccatatcggggtgtccacggtgtctccgggaaccttgtccatcagcagcaccgggtgttccgtgtattggtccagcggtatcagctgcagcactgcatcgagaagtggttcgatgggctgaccgtcatatctgatcacatgggaatgaatccccaatgattcagcgggaaagtgggcgtccgcgaggactatagtatcgccatggcccatttcactgagaatcttcaataaatcgggctgtatgatcgacggtatccctttcagcatagctgctcctgcttgtcttcagacttatttgattgttacttgcctagaatgctctggatattgcggtactgttcatcggtcagctgcacggcgggctcgtggacggacgtgtcgatgggcagtcccttggccttgaccgcgcccttgatggcgctgatgaacaggtcggcggtgtcgtacaggcgcatcagataggaaatgcgctcagccgacttgatggccgtggcgtaatcaccggactgccatgcacgatgcaggctgacgaaagtctccggctccacattggtcaatccgcacagcacgccattgccgccgctgattcggttgacggtgtagtactcgtcgaatccggacagcacgctgaacgatggattcaccttacgaacggcagcgatgaccttcctggtgtggctgatggtgtcgacggtgtctttgatgccgatgatgttctggttctccgctgcgaggtccgccaccagctcaggggtgaggtcgttgcccgtcctggctgggaagttgtacagaatgaccggcagcgtcgtcgccttggccaccgcagagaagtagcgcttcgcgcaatccggtgatggtccgaaatagtacggggatactgcaaccaatgcatcggctccggctgtttcgctttccgccgccaatgttctcacattgtccaagttggtgtctcccacgccaacgagcaccttcatgcgtccagcgactttcgagacggcgaaacgcaccgcttctgccttcgtcttgacgtcgatggcgtagaattctccgatactgccgaacagcaacacaccgtcgatgcctgcgtcgacgaggtggtcgaggtgcttgccccagttgtcgtaatctatggttccgtccgcgttcatgatggtgatggaagggcagaacacgccttcgaacatggcgttgctggtcatgatattttcctttcgacgatatggtaggagttccgcgtgcggtggcgaatatgtccgcgggccgagcggtgttggagcgatgaatcgaaaacaggggatccggacgcgcgaacgcgaaccgatgatcccccgtgcggtatctcctagccgagtgcccgatcgaggtggacgtatccgccgtcggggaagacccattgtccggtggtgtgcgacgacctgtcggacagcaggaacgccacggtgtcggcgatctccgacgtctcggtcatgcggtggccgagcgggatcttgctggtgatcttctcaagctgcgcgcgctgtgcctgctcatcgccgaacgtcttgatccactgtgcgtacagcggtgtccatgcttcggccacaacgacggcattgacccggacctcgtccggggcgagggcggcggcccattcgcgggtcagtcccagaatcgcgcccttcgcggcggcgtaggcgctggtcttgccctgaccggtcaatgcggtcttggaaccgatattgaccaccgagcccttgctggccttgagcgccggcacgcactgatggaccagctcgtagtagtgggtcaggttgccgtgaatcgactcctcgaactgacgccacgacgtggtctcgagcgcgaggttgtcatttcttccggcgttgttgaccacgccatcgatatggccgtgcttctccatgaccgacttgacgatgggggcgatgtcgtcggtgttgttcaggtcgatcagatacgtgtcatacgagtcggtgatccgttcaatgtcctgtcggaattcgtcgccggcgccgtcatcacggttcagcaccacaggaatggcgccctcctcggccaagcgcagcgttatgcccttgccgatgcctttgaagcctccggtgacaatgatcaccttgtctttaagatgcaggtccatctcaggtcctcccgaccggtcagtccttgtgcaggtacttcatgcattcgtcgatcttcatctccgtgccgttgcccggagtgagcggagcgacgtatcgtccgttcttgatgacggtcggatgcacgaagtattcatgctggttgtccacgtattcgacgacgcggtcctccatctcgccggagacggacacatagtcgaacatcgcgagctggctgacggcttcgcacaggccgacgccgcccgcgtgagggcagaccttgacgccgaacttcttggcgagcaggtattcgaggacgatctcctggggaccggcgactcgggtggcgtcgatctgcatgaccttgaagctgccggcctgcaggtactgcttgtacatgactcggttctgcatctgttcgccggtggccaccggaatcggatcgatggccttctggattgcggcatgtccaagcacgtcatccgggcaggtcggttcctcaacccatgcgaggtcgtagtccttgaatttgccgatccattcgatggcctgcggcacatcccagacctggttggcgtcgacggcgatggcgatgtccgggccgaccgcttcacgggcgagcttgagcctgcgcaggtcatcctcgaggttctggccgaccttgagcttgatctgcttgaagcccatgacctcggtctcctgcttggccaggcggaccatcttctcgtcggaatagccaagccatccggcggcggtcgaatatcccggataaccgacttccttgaggtgggcgatacgctccgccttgccttcctgggcggcgcgcaggatatcgatggcctcctgcggagtgagggcgtcggtcaggtaacggaagtcaagcgtcgcaacgagctcttcaggctccatctcggaaaggagcagccagagcggcttgccggcgcgcttggctttgaggtcccacagagccgagagcacggcgccaatggccatatgctcgacgcccttctcagggccgagccagcgcagctgcgaatcgcgcacgaacagatcccatgcgagacgcatgttgtcgagcagttcctcgacgttacgtccgataagggtttcggacatggagtcgatggctcggacgacgacatcattgccgcggccgatggtgaagacgaatccgttgccggaatcaccggcatccgtgctgatgacaacataggcggaggaataatccggatcagggttcatggcgtcggagccggagaaggtggccgacgtcgggaatcggaaatcataggtggtgactttggtaataacgctcacgatgcgcttccttctttggaaaatggttaatctcaaaaagggaggacggccattcggccgccctccctagcagtggcgggccggatgtcagtcggcgtcggtggtgaccttgaagccgttgtcctttgcgtaggtcttgagcttctgctgagccttggccatagcgccgaccatgtcaccgccaaccttcatttcaggagtgatgacatccttgtatacgactccaacctgagacatgaacggaagatactcccaatcagtattgaccttgtccatggactcgaagtagacggagttcacgtcagtattgacaaagtatccatctgtttccttcatattgcggatgtcttcgctattttggtaagcagaagctgccatgaagtagttgccgtggttgttatcctgccaagactgaattgcttccttgtcggaatcaagccaattgatgaaggcaagggctgcagcctgcttgtccttagggcatgccgcggaaacactcatcatggagccgacggaagaagacttgaaatcatcggcagaatcaccgaatgcaggtggcagcgttacctgaatcagacccttaagagatggattctgtcccttgtaggagttaccttgccagttctgagaaatataagtggcataggtgccctcattcgtggcgcggttgaacgcatcggtccagcctggagcggcctccatgaccccatcctgaaggcacttttgcaggaattcaatgaactccttggtagtgccagaagtcatgctcaagctgatgtcatcgacagaattgaccttccaagggcgcgcaccagccgaacgcagcaaatccgtaaagcaggagatatcgttattgatgaggacgcccatgtacttgctgggatcttccttgtgaagtttgacgccttcttcatagaattcctgccaagtggttggcaccttgagattatgctcgtcgagaatgtccttacgcacatacatggccaaaggagtggcgtcagtcggcacgccccacaggccaccagcataatgcacctggctccaagcggtctttgcataaagcttgctccacgccttttcgatatcatcgttggcgaaattcagcagagctccagaaatagcgtactgttcgaatcggtcagcactcatctgcacgacatccggaacatctttattggcagcaacgacattctggaacttggtgaaatggtcgcttgccgcgccggtgttggtgaatttaattttgatgtgcgggtacttcttctggaaagcttcaatcggtcctgccatctgcttcccggagaatccccatacgttcagctcgatttttttggaagtatcggtgagagcgttgttaatgtcttctacagtgactgcagttttagtgtccttggcaccagtacttgagccacaagctgcaacgctggctaccatagtaagcgccgccagcgcactgacgattttggtcatcttcttcatgattactcctttgtgtgtcatgaatcactgtcttattgttgttcttcaaatggatgtggatgccgcacggtcattagagcaacgaatgggtgatcgccaataaccgtgcggcgaggattcactgcttgactgcaccagccgaaaggccagactgccagtacttctgcaggaacatgaatgcgatgatcaacggggcaactgcaatgaggcatccggtgacaatgtagttgttcggaatctgaccgtccgcggtaccttcggcacccatcttcaaccacatgttcaaaccgaccgtcatcgggtagtcgttggtgtccgagagcatgatcagcggcaggaagtagttgttccagacaccgaccagcgtgaacagcagtacggtgacgaaacctggagacagcagcgggaaggcaaccttccagaagatggtccacgaatttgcaccatcgagcttagccgcttcaaggagagaagtaggcaccgatgtctgcgcataaataatcatcaggtacagtccgaacggcgtggccagctgtggaataatcactgcccatggggtaccgaccagaccaatcttcgagtacatgaggaacagcgggacagagatgaccgtggccggaatggacatgaatgccaaggtgatcgccaacagactattacgtccggggaaccgcattgtggcaatggcgtagcctgcaagtgtggcgatgatagtggcaccaaatccggcgacaactgcatacatcactgtgttaagcaaccaccgtgcgtatgtaccatgctgatatgcaagagtttcctgaacattctgccagaacacattcttgtcatcgaaccacagaccaaaggagctaaacatgccctcgttggtctttgtcgcagagaagaacacccacagcaacggcacgagacagtagatgaccatcaggcccatgataatgtgcagcagccagttaagcacacgctgcttgccggtcagctttggagctgcctcacgctgctgcatacgcttatagcgttggctcgccttgagcgccagcttggcgtctctgcgctgcagcgacttggaacgtggttttgcgattgcttcactcatcacttgttctcccacttattgccaatgaccttcacgactgcgacaagacccataacgatgacaccaatcaccaaggagaccgctgcagcatagttgaggttctggccgttgaacgcaaggttatatgcgtagagattcggcgtgtagttactggtgatcacattcggcgcggaattcatcaagatgctcggttcgttgaacaactgaagcgtgccgatcaccgagaagagcacggtcatcataatggatcccttaatctgcggaatctttaccgaccatgcgatacgcagctcggatgcgccatcgatacgagcggattcgtacagctcgttcggaataccgatcagtgcagaataataaatcagcatgttgtagccaagagaacaccaagtgcagatgtttgcgatggcgaacagcatgagcttttcagaaagcatgttcggcgcagtggccccgatcatagacgcaatctggccgacaaggccatacttgtcgccatagatatatccccacatcagtgctgcgatgacgcctgggacggcataaggcaggaacagcaggattcgcggcactgcgatatggcggattctctgggaatccagaatgagcgccgccacaagggaaaggatcaaattgagaggaatctgaatcgccgcataaatcagcactcttctgaaaccgctccacagcgcttcatccttaaatgcagctatgaagttgtcgaagcctgcgaatgtggtgccgccaagaagggactgcttgaagaagctgagataaagcgcgtagaacatcgggatgatcatgccgaataggaagaccaccacgtatggaagacaatataacatgcctatgtactcgcgcttcggcttgcgcatcccggaagtatccggtttcgccgttgcatttgtcatagtttttctctttcttcttaacccgtctgaatgagcccgccaacaacatcgttgccattgccgtttcattcatcggtacgttcaatatacaaggttttacaaaaaagagcaaataaaacttcgttgcgcgtggcgaaattttctttatcttgttttttcgccttaaaagggctttattgcaacgatatgcacaaatcgtactcatcgaagaaacagcagccaatccatgtctacaacacccatttccgctatatagacagcaatacgccgataaaaaagctgttttagagtagcgaaaatttcgctactctatatataacgcttttttgcagcgtcgcatacgaaaagagaagagtcatggccacaatcaaaacaacaaacagaccgaaggtctccgacatcgcccaagcggcgggagtatcccccgctaccgtgtccaaggtcatcaacggccgtgatggagtctccgacgagacccgcgatagggtggaactgctcctcgaagaagccggattccgcaaaaaacttcccacaacaaaaaccatacggtcaatcgaactggtcgtcagcgaaatgaccaacaacggcaccgtggaaatggtcaaggagacagcttcatacgccagagattttggcctcggcatcaccgtaagctgcgccggaccggattccggagaatacgcaacaagaaacgaggccagcagctgcctccgtaacgccatcgaacgcaacccactaggcgtcatacttctcttatcgaatatctcatcggccgaggaatcgctgctgcagacgaggaacatcccatatgtgattgtcgatccggtcggccaggtctccgctgacgcattgggagtgggcattgataactggaccgggggaatgctcgccacgcaatatttcatatcattggggcatcgacgaatcgccgtcatcactggccctactaattcacagtcctcgcaggcgcgactgagcggatacatggcggcgctgcagaaaaacggcatcagcgcggatccgcatctcatcaaggttggcgactacgtatctgacaaggcatacaaggcggcatgcgatctcctggaaatgagggagcaggaccgaccgaccgccatcttcgcgttcaacgatctcggcgcgatcaacgtctatcgcgccgcccgacagcacggcatcagtctgcccgaacaattatcgatcatcggtttcgacgatgtctatcctgcggcaagcatgtgtccatccctgacgaccatcaggcagccattcgacctcatcgccagacaatgcatcaacctgattctcgaagcgcgggaaggaaaggtggaacagaattacttcatttttcccacgcagcttgtcgaacgcgaaagctgcgtatcgccagcacgtccgtaactcagcaacggaacacagaatcagcttccacgaagcacccatgcatatgcaatccgtctctggcacaagcatttacttctgtttaccagatgaaaatacaatatcgtgcgattacggggggcgcagccctagcctcagctggaggtcaggaaggtttcgttgcctcgggtgaagtcgaggacggaaccggcgagttggacctcgtctgccagttcggggtcggcagccagaagctgctcggcacgggtgcgggcgtcggcgatcatgtcggcgtccttgaccacgcgcaggagcttcaggctggacttgccgccggattgggcgtcgccgagcacatcgccggcaccgcggaattccaagtcggcttgggcgatttcggcaccgtcgagcgagtggtgaatcacttcgagccgttgctcggccggggagccgggttccgcacgggaaacaaggaacgcccacgagttggtgccgccacgccccacgcggccgcgcagctgatgcaactgagagaggccgtatcggtcggcatcaaagatcacgatgcagctggcctgtttcacatccacaccgacttcgatcaccgtggtggacaccagaatcggagtctcgccgccggcaaaatcggccatgacctgggttttgacgtcatccttgtcgcggccggtcagagtcgcaaaccgaatgccttggaattgcgggagtttctgcaaccggtcggcgatttcggccaccgcatgcaatggcgggcgagccacggtttcgccgttctcgtcgaaggtttcgtaggggtcgtcgatgccgatggcgtcggccgccgcgcgcgttgcacggccgcccgcagctgtgcgggcactggaaccagatgctgcggcgcgtccgcgggcagaaccggctgctgccgaaacgccggaaccgccttcgttcccctcatcatccgcatcaatgcgcgggcacacgatataggcccgctcccccgcgtcgactcgcgcgcgaatgtgcgcgaacatacgccccatggtggcggcgtcggcctcattgaccaccacggtgcgaatcggtttgcggccgccgggcaattcggtgagccaggaaatatcgagatcaccgaaccaagtcatggcggcggtgcgcgggatgggcgtggcggtcatcaccaatagatgcggcgtggtgccgtcgtcggttttggcgttgagactttcgcgctgttccacaccgaaccggtgctgctcgtcgattaccaccaaggccaagtgcggggcttggaaggtcttggaaaacgccgcgtgcgtggccacgataatgcccggctcgccactggacgccgcagcaagtgctttacgtcgcgcagcaagcttcatgccgcccgtcaacaacgtgactggaatcgctggcttaagttgctccaccatccggccaatggtttcggcatgctgctcggccagcacctgagtcggggcaacaagcacggcctgatagccggcgtctacggcttggagcatggcagcgagcgccactacggttttgccggagcccacctcgccttgcagcagacgctgcattggccagtcatgagccaaatcggcggcaatatcatgaataacctgctgctgccctgcagtgagggagaacggcagggatgcgatgaactgatcgcgcagactgtcggttaccaacgggcaagagtgagccgcggatttatgggcgtgcgacctggctttaagcagcgaggtctgcgaaacgaaagcctcctcatagcgcagggtttcgatggcctccttgaaccgggtcgtggaggccggatcatgaatggacaggaacgcctcagcccgatgcatgaggttcttggccttgcgcaccgattcgggcagcacatctgggatggattgggagagcgcctcagcaccggattcggcggtcgtgccggaattctcttccccgttttggacggcgatggtgtcggtcgtgggagccacaatgccggctgacccagcgccagcgagttgcccgtcaggcgtggatgacgtgcgggcccccatcatccacagcaatcccagaatcgtctcatgaatatgttcggacgagatacgcgaactggcgtgatataccgggcggggccggcagacgcgggtaagcgcctcttgcacggtatcggcgtcgtatttcagcgcggccccggaagaggcagccgcggccggcggatacgcggactgcacactggcatacggatcggtacttcccgcaaacgcaccattgccggatgccgcaccccgagcgtaaccctcaagccccgctcctgctccggccgacccgggcgcgacagtgaggatttcggggtgcgtgaattgcagctgccccatgtattcgctgggcataccggagaccaccacagacgtgccggcgcgcagccgcatgctgacccaatccacatacgatttacgatacgaaaagaacgtgagccgggccgtgctgccgggtacgcgacgcgaacgggcaaagtcggcgtcgtcaaccgtcgcctcgagtcggtagccgcggcgagcgttcatcggcaccacgcgcatgtctcgtatcacggcggcaaatgccatctgctggccgggtgcggcctcgcggatggcgcgaagcggcaccggttcggtgacgcggaagggatagtaggtcagggcgtcgccgacagtgacgattcccagcgatttgagcgcggacacgcgacgcttgttggtgaccagcgaagcgagagtggtgtccatagtgatgctcatattggcctattctattcgcacggcctctttaggccgcagaaacaacaaaacccgctgagccgaagctcaaacgggttttgctccacgttagtacgcgattcacgcggccacgcgctgaaccttgccggccttgaggcacttgacgcacacgcgcagacgagtgttctcgccatcaatcgtggtgcgtacagactgcaggttcgggcggaagctacgcttggtacgacggtgcgaatgggaaacggtgaaaccggtctgcggtcccttgccgcacactgcgcaacgagctgccatgatggactcccttaaccttgatgtgtcaagtctttcacgcattcgaccgccggtttcacccgacatgccgaacacacaacttcacaaatatatagcccaataccgacaaccgcaactcttgcgtgtatcatgggcgaacttcggcggttcatgcgcggttcgagcgtaacttgcgagtgggccatcagcggttcgcgagcggttcggcattggttcgccagcggtccgcaagtagttcgccagcagttcgccagcggcgaattacgctgcaaatcgtagcgtttacccgataaaacacgccggactgcctattccgcatccaacaaactctcatataatctcggtataagagacggcaagggacgaaggggtcctcgtgcaacttacgacgaaggaggctgtcatgttgaatctcaggcgaggtatcggcactcacgagcccagcgtgatttcactgggtcaagtctgggtggacattatgctcaatgtggacgaggtgccggcacagggcggattcgccgtggccgatcatccgaagccttccattggcggcagctatcgcgtgctgcaggcggccagccgcatgggcgtgccgaccgagcacgccggcattctgggcaacggcctgtgggcgcatttcatccgccagtcattccaggacaacggcatcacgcatatcggccaggatcgtcttgatgaggattccggtttccgcgtggtgctgagctccggcgcgccgaagaagacgttcatcgcttcctatggcgccgaggctcatggcgacgcggacacgttcaacacgctggagccgcagcccaaagacgtggtgcacatcagcggcaacacactgatggaccacacggccaccggcgtggacggattcctactcaaggccggtaccgacccggctgcacgcgactacacgctggtgatcaatcccaccaatacgttgcgtctggtcaatgaccacatgctcgaggatctggtgcttgcgcgcccggtctggtcctgcaaccgtcaggaggccatgacgctggccgagcgtctgggcgcgccgatcgacgacagcaaggtcaccatcggcggtggactcgacgacttcatgcaccagttgtgtgacggcttgggcactacactgcgcgcgccgctggtggtgcgtgtcggcgcccgcggcgcttggattcgtgagccaggtggcgagacgattcatatcgagggatacccgaccaaggccgtacacacccgttcggcgggcggttgccacaccggcgtgatgtgcgcgatgctggcaaagggccatagtctggccgaatcggtaaagatcgccaacgcggcggcatccatcgccatccagcgcagcctcaacggcgtgccgcaatgccccgattacgacgaggccatcgcgctgatcggcgaatagtttccggacgattgagtggatttcctcatctgggggaatccacgatcggctcccttcagtccgcttcgcggccagctcccctcagcgaggggagctatttttttgctctggctccccttagaaaggggcccggcattattcacccgccgttcaactttggcggttttctaccctagtccgcgcttctacgatagattgagttgaatactgtcgaggagtgcatatgactgatcccgcaaatgtccacgaaccggtgccgcaaagcgccaaactgaccgcccgcgagaagaagtggatcatctacgacgtcggcaactcggcattcgtgctgctgtccaccgccgtcatccccatttacgccaaatcgctgatgccggcggacggcaacatcgtgtccgcctggggctacgcgcaaaccattgcctccttggtcatcgcgctgctcatgccgttgcttggctccatcgccgatgtacagggcatgaagatcaagttcttcctgggcttcttcggcaccggcgtggtcacctgctgcgcaatggccctgcccctgacctggctgccgttcctggtcgtctacattctggcgaccatcggcctgaacggctcgctgacgttctatgattcgatgctcatcgacaccacctcgaacgagcgcatggacaaggtctcctcgcacggctacggctggggctacatcggctccaccgtgccgttcatcttctgcatcgcgctgatcttcggcggcccgtcgctcttcgactggtccacggtggcttgcacgcgcgcctcgttcatcatcaccgccatctggtgggtggcgttcaccatcccgctgcttaccagctaccgccaggtgcactaccgtgccacccgcgaccagctgggctcggccgtgcgcggcacgttcagcgaactggcgggcacgttcggcaaaatcgtgaagaacaagccgttgtggatgttcatgatcgcgttcttcttctacatcgacgccgtgaacacggtgatttcgatgagtacctcctacggtgccgagcttggcatcgactccacccagctggtggtggcactgctcgtcacgcagttcgtggccttcccctgcgcgattctctacggtcgtctggccggccggctcggctgcaaagtgatgatcactgcggcggtcgtggcgtacatgtgcatcgtgttcttcgccgcgttcttcatgaaatcggccgtggagttctggattctggcgattctggtcggcatgttccaaggcggcatccaggcgctctcccgctcgtactacggcaagatcatccccaaggatcacgccaacgagtactacggcttctacgatatcttcggcaagaccgcctcaatcatcggcaccttcctggtggccaccaccacgtccctgaccggcaacgcctcgttcggcgtgctctccatcgccgtcctgctcgtcgtggcgctcgtcttcctgctcctgcaaaaggacccgacgcgggagtgatttgccggccctcggcaactctgcgccgcgggcgacatctcgcaacccctgcaacgggccctaatagcaatggaccatcgccacttgatcacttacgctcgcgataatccttgatcagctgaatggcaacggccgcaacgccgcacagcacaccgccaatcggccacggcagccagaacatcgccccgtccgcggcgctcgacccgacggccgaccaatcgccgcgcaatgccgcagggttcaaaaacagcaggcacaagccagtcgccgtggctatcagcataatgatgccgcacaccgcgccggtcagtctggcatagaaatcctgttcgcccgcatgctccttgcggtcgtcctcggccgctttgttgtatgcgttgatattgagcagactgtatctcatgccgcagtagacaaacccgaaaacaccggacgcacagagcagcagaaaaattgcgttgggccagccatcggagacgccgagcatgtcatcggcatacaccgtcaccgcaatgccaatcagaatagccgagatgccaccgacgatgccgattaccagcagccgcaattctcg

SEQ ID NO: 903 - DNA, 25194 bp, Unknown
  R117_24m  MAG No. k141_1730
aaggtggtgatcggcacccgtgcggtgatgtatgcgccggttgaaggcccggcgctgttcgccattctggaggatgccgcctatcagaacatggacggtatgatgccatatccacaggcccgtggcgtgatgcggctgcgctccaagtcccatggcggcgtgttcgtggccatggccaatgcgcgcaccccgcaaagccagtgggaaaacaccggcccggatacggtggagaccccggtgagcggctattccaccgcgattcacccgctcgcctcgccgctgaaggatgcgacgccttgggtacgttggctcaatcgcgatgagcttgcgcgtcttgccgacccgtccatcggcgcacgtgtgccgcatacggctgtccgcgtgctatctaaggctttggagagcggccccgtgctgctgtccattccgcaagacagcgtcagtgagactctgagttgtgcgaaatgccatcgtcaggtgcgctgcgccaagtgttccggaccattgcaactaccggccgaccgccgggactccacaccgcgatgccgctggtgcggggctgccgccatcaactggaagtgtccgggctgtggacatgaacgtatgcgcgtggtgcgcgtgggtgctgcaggcactgcggcggagctggccggattgttccgtggcgtgccagtagttttgtccagcaagacgcagggtctggtgcgcgatgtggcttgccagccgatgattgtcatcgccactcccggtttcgaaccgcgcgtgcgtccgatcagtgccgagcagggatcggctggccatgagtatcgtgccgtggccgtgctcgacgcttggaccagcctgtatgcgttgggcgtggatgctcggttggatacgttgaccgcgtggatgcgtgcggtgtcgttgtgcgcgccgcgttcccgtggcggccaagcgttgattctcggcgaaaccgacccggccatcgcccaatcgctgatgctctgggattcgaggattcttgcaaccaaggatcttgaggagcgtgtggagaccggtatgccgccggccgtggccgccgcctgcgtgtggggccgccgtgatgcggtgatgatgctgatgcagcgtatcggcgccctgggcggcgattggacggcctgcggcgagctgcccggcatgttgggcccggtgccgatcgcgcaaccggacacggtcgacgcccgggagctcgaagccacggccgaccgggtgaaggcagtaatccgtgtgccgcagagtcggcgagccgagctggcggcccgactgcaccgggaaaccgctcgtcatgtggcgtcccgcgaacccggcgagcttcgcttccgagtagatcccaaggacctgatctaatcgtcttcaacacgtgaaacgataattacagaatgaacatcgctagaaggaggacactatgaagggttggcctggagagccggatatggattacgacgtgctggtcgcggatggcgaggccgctgcgaacgccggcaagccgatcaccgacgtgatcttcgatttcggcaacgtgctgatttactgggatccggtcgccgtactcatcccccgctacagccagaagaccatcgacgaattcctcgacaacgacatctccggcttctacgatgtcaacgacctgatggacggcggcaccagcaccgacgaggccatcgccatcatgcgccgtgacaagggcgataagtgggcggacatcctcgactactacatcaagaacttccgcgactccctgaccggcatcgtgccgggcgcgcgcgtgctggtcaatgacctgaaggctgccggcatcggcgtgtggggcctgagcaactgggaatccagtctgttccacgtggccgaggaacagtgcgatattctgcagcagcttgatggcaagctcgtctccggttttgtcaagctgcgcaagccacacaaggaaatctacgaggccgcgttgaaccagttcggcatcaaggccgatggcgcgttgttcatcgacgacaaggccatgaacatcgtcggctcgaatgcggccggcatccgtggcgtacgtttccaggatccggtcaagctgcgtgaactgctcatcgccaatggcgtgaacattccggccgtgcagtgagcatcgacatttcaaggaggaccatgctcaaactcgtgttcgccggcacccccgacgtggcggtgccctcgctcaaggcctttgccaccgatccacgttttgatgtggtcggcgtcattacccgccccgatgcgcctaccggtcgcggccgcaagctcacgcccagcccggtcaaggctacggctctggagctcgggttgcccgtcatcgatctcaaaccccgctcccccgaattcatggaggcgttgaacgacctgcatgcggatatcgccgctgtcatcgcctatggcaatatcctgcccaagaacgtgcttgatgcggtgcccatgggctggtacaacctgcatttctccaacctgccgaagtggcgtggcgccgctcccgcccagcgtgcgatttgggcgggcgacccgaccaccggcgccgacgtgttcaaggtgggcgagggtttggatgatggcccgatcgtcgcttccctgaccatcgaactgaccggccgtgagacttccggcgaactgcttgaccgtctggccgaggaaggcgcgcccatgtatgtggatgcgctggccgccgtaggtgaaggcaccgccacattcaccgcgcagccggccgagagcctggaatacgcgcacaagatcacggtgaaggacgcccgcatcagttggacggacgaggccgaggccatcgaccgtcagattcgcgcctgcacgccacatcccggggcatggaccgaactgtttgcggaagggccaatcgccgataatgacgagtcaaccgctaaatccctcgccctgcatattctcgccgcacaaccggccgaccagtccaatcccaacactccggccgagcttcagcccggcgagctgaaggtgggcaagaagaacgtgtgggttggtaccggcagcacgccgctggaactcacccaagtcaaggcgcaaggcaagaaggccatgcgcgccgccgactgggcccgaggcgcacgcctctcccccgccgcctgcgtgcgataacaagcaatatcgctcccgccttcggaagcacagtaaaggcccggcatcttcataaagaagatgccgggcctttcagctatgcaatcggcgatcagttgagaccggagagcttgttgatcagctccgggtcacgcgtcgcacccttgtcggccgagcgggcgaaggcggcgtacgccttcagcgcctgggagacgtggcggttgcggtgagccacgtagccgtcgccagcctcaagctcgcgacgacgctcgtccagctgctcgtcagtcagttcgacgttcacggaacgggcttcgatatcgatatcgatgatgtcgccgttcttgatgagcgccaccgggcccttgttggcagcctcaggcgccatgtggccgatggccagaccggaggaaccgccggagtagcgaccgtcggtgagcatggcgacctgtttgccgatgcccttgcccttgacgaaggaggtcgggtacagcatttcctgcatacccgggccgcccttcggaccctcgtaacgaatcacaagcgccatgccaggcttcagggtgtcgttcagaatgacctcgatggcctgctcctgggagtcgaccaccagagccggtccacggaacttccagatctccggcggaacaccggcggtcttgaccacgcagccgtcgggggccaggttgccgcgcagcacggcgaggccgccttcgtgaatctccgggtggttgatgtcgtggatggcgccgttggtgcggtcgcggtcgagcgagtcgaacagggtggtgtgcgtccacggctccggggagatgatgtggccaggagcggccttgtacatctgctgggcttcctcggtgcaggtcgggcgcatgatgtcccaatcggccagcttggcttccagcgtcgggtagtcgatggaatgcacgttggtgtgcagcttgccggcgcggtcgagctcgccgaggatgccggtgatgccaccggcgcgatgcacgtcggaaatctcccacttgccggacggcgaggccttgcagatgcacggcacggtgtgggaaatacgctcgatgtcgtccagggtgaagtccacgtcggcggactgggccatggcgaggatgtgcagcacggtgttggtggaaccgcccatggccacatccatggtcatggcgttctcgaaggcttccttggtggcgatggagcgcggcagcacggaatcgtcggaatcgtcgtagtactggtgagcgatcttgacgacttgcttggcggcacgcttgaacaggtccttgcggtaggagtgggaggcgaggatggtgccgttgccgggcagagccaggccgatggcctcggtcaggcagttcatcgagttggcggtgaacatgccggcgcaggagccgcaggtcgggcagacggtcttctcatagttgagcagttcctcatcggagacgctgtcgtcagcggtggcgtacatcacgtcgataaggtcggtgctcttgactgtgccgtcggcgagcaccgtggtgccggcctccatcgggccaccggagacgaacacggtcggaatgttgaggcgcagggctgccatcagcatgcccggcacgaccttgtcgcagttcgggatgcagatgagggcgtcggcgcagtgcgcgttgcactgatattcgacggtgtcggcgatgatgtcgcgggaaggcagggagtagagcatgccagtgtggcccatggcgatgccgtcatccacggccatcgtgttgaactcgcgcggaatgccgccggcttccttgatagcctcggaaacgatgcggccgaccttgttgaggtggacatggccgggcaggaactcatcgaacgagttggcgatggcgatgatgggcttcttgcccatgtcgtctccgctgacgcccgcagcacggtagagggctcgggcgcctgcaaagacgcgccctgacataatttttgcagatcgcatttcagtcatggttctattcaagcctttgcgagggacacgccatttgtcaagagtcgaataatggaatttgcaaaaacgtaatgtttctcacacatttttttggaatacattcctctggcgagagtccggtatagggctgacagaagtccccccaaacggctacacttgcttcggttgagatagattttccaatgtttggagataagaacaatggcttttggtactgacccgacacccgacggtcttgcgaacccgccgatcgacgatctgatgaagcacgccgattccaagtacgcgctggccattttcgccgctaagcgcgcacgccagatcaactcctacttcacgcagctcaacgagggcctgctgcagaacgtcggcccactggtcgaataccagaacaacgagaagcctctgtccatcgccttccgcgagatcgacgagggtctgcttgaggagaccttgggcgaggacgacgccaacgagggcaactgatcgattcagacgattcgtttggattgtttggacagttcgtcgccgaatgatggtgtgagagttctctcacaactgattttgagcgacacgcttgcctgagttatcgcaatcagctataactcatcatcaggagcgaacaagacgtaaggctcgagccaccgcgctggttggcacgagcctttatttatgcccgtttccgcagtgacaagtaaaaattgacaccgtatcattgtgcctcgcatcccgcggggcgataagtcctgaagaaagggatgatatgacagaagaacatcggcttatttccgccgaatccgtgaccgaaggccaccctgacaaggtctgcgatcaaatctccgacgccattcttgatgatctgctggcccaggatccgtccagccatgtggccgtggagacctccgccgccaccggcgtgttcctggtcttcggcgaagtcacgtccaaggggtactgcgacgtgcagtccaaggtccgcgaaaccctgcgcaacatcggctacacctcctccgaagtcggccttgacgccgattcctgcggcgttgtggtggccatcaccgagcaaagcgccgaaatcaaccagggcgttgcccgtctgactggcgatcaggagaccgccgccagccgcgaagaacgttacgaagcacagggtgccggcgatcagggcgtgatgttcggctacgccaccgacgagactccgacgctgatgccgcttccgatctatttggcacatcgcctcgccttccgtctgaccgaggtccgcaagtccggtgaagtgccgcacctgcgcccggacggcaagacccaggtaaccattgagtatgacgataacgataagcccgttcgtctggacaccgtgctgatctccacccagcacgatcctgaggttacgcaggattggcttgctgttgagctgaagaagcacgtgattgacccggtgcttgatgaggtgctgggttccaaggtgccgcatgacaactaccgccagctggtcaacccgaccggttcgttcatcctgggcggcccggcggccgacgccggtctgaccggccgcaagatcatcgtcgacacctacggtggcgccgcccaccacggcggtggcgcgttctccggcaaggacccgtccaaggtcgatcgttccgccgcgtacgccacccgttgggttgcgaagaacatcgtagctgccggcttggctcacaaagtcgagatccagatcgcctacgctattggcgttgccgacccggtgtccgtcaacgtggagaccttcggcaccgagcaaggcgtgacgcgcggccagatcgccgccgccgtgcgcaaggtcttcgatctgcgccccgctgcgattatcgacgagctggatctgaaacgtccgatttatctgaagaccgccgcgtatggtcacttcggccgcacggacgttgagttcccgtgggagaagaccgacaaggtcgaggagctcaaggccgcgattgctgcggagtgaggtgctctaattaggacagagagatcataagaataccataagaatagggtgctttccgctgttgatggcggaaagcaccctatttgtttttcgcagtgtcctacgaatctgttcttatttcaatccacgcaccccagtggggtgcgaccttgcgcttgtcgaccaacaggcgtgtgatatcgatttcaatccacgcaccccagtggggtgcgaccgcgagaatgggcatagcattccataatatggaagctccgtctgttctcaaaactgattttatcgcgaaaatccatgtacatcgctcaatacacaaattctcgaaccaaaaacatcaacagaccatccacttttgagttatcaaacgacgaggagaacataatcagtctccaagcattcattaatctcagtgcgaaagaacaagtatttcatgagaactcagagttcgcgctggtcacatggctgcagcatcaagcatcgatgctcagccacgattttaatcgtatcgtcctatactgtcctacctcgttttatccgccttggtcttcatcacagtaaggttttgcattgcccagtcatcatggaaaaccgtcacacgaaccgacattagagcatcatcacgtcatcgattggcaggtgccgctgtcttccgcgatgctcaatcttcgaagaatacttcgcccctaaattgtagtaacgcaggctatcttgcgattcgtccattatttccgccaaatcatgtttcaaaatcagatagtcagacggtgacaccgaacattcaaagacgctattctgcacgcgttggccgtatttcatgcaggttttagccacgttccgtagtctgcgtttgccttcaggcgactccgtattgacgtcataggccacgacaaccatcattccaacacctcatcccggtttccatctctagttggctcaaactccaatgcccctcggcaagaccaaagtaccctcccaagaagaactacttccacatgaacggcgggtaagcgtccaaatcgccacgaatcgcacggttgagcagcaacgcctgtgcatggggcaccaatccccacggtatcttctcattgaagaacgggtgggtgattgtctcctgcttgcgtttctgccaagcagcaagcacggttttgcgcccgccctcggaaagaaacacgccgccattctctcggatctcgaactgggaaggcttgaccgctccagtgttgatgagcgtcagcacgaaacggtcggcgatagccggacggaattcttcaaccagatccaaggccagggaagcacgtcccggtcggtcagtgtgcaggaatcccacatagggatcgagcccgactccctgcaaggcagcgatgcaatcgctggtcagaatcgagtacacgaatgacatcaacgcattcgtccgatccaatggcgatctgcggctacgctgctggaagaagaaatcgtccttgttgcgcagaatcaagtcgtcgaaagcgaagaaatagtctttggctgccagcccttccacgccgcgcagctcatcgatggacgtgcagtcgcgcgcgttcagcagagcctgccgcagtttctcgctttgctccgcgatacgctcgctgttgacgcgcagcgcatggtcgcgcttggtccgctcaagaacccaacggcagttgtagatctttcctataatgaacgactgcgcaaaaggcagggccgcgtcttcgtcgtccgcgaaacggaactgctcgcgacgaagtagtacgtttcgattcttctcaccaagtatcgagcagtagtaacggccgtgtggagagaagaacgaaaggccgacgccaaattccgaacacttgcccatcaacgccggcgacgagcccttataagaaaaactcatgatgccttctagggagcgcagtggaatcctcccgagcgtggtatctccttgctggacaatgacattgtcgttcttcaacgataggtaagcgtcatcgctggtgacatacagtgtgttaagtaactgcttcatatgtggtctgacttctccccgatttccacttccccacgcacggcttcctcaatgaactgtctcgccgaacgcgtcctgaccagtttcggtagacagacatcgcgcagggagcacgcccgacaggccttcgacggtctgaccttcggcgtatgacctcgagcgaataagtcgtgcatctcccccgtcatcgtgacgattcgattgcgcaaagattcgtcaaaactgacccgctcccggtgtctggtctgttggtagaacaaagcgccttctggaatcgcacaggccagcatctcctccagacacatggcctccgcgcaaagttgaaggcgatccacatccgtctgcttgggcgcaccatgtttgtattccacggggtaaggaagccaagtgccggatcgtccatgcaacggtacgccagcctccgattgccggaactcgaccacatcgcatgctccggtaatgcccaatcgtcgtgagaacacacggagatcacgcataataagcagattgccccttgtttccgattcgctgtaatcatgcgctcgatcgtgttcgagggagcccgcagtagtgagatagttgtcctgccactgctgctcgatatgaatcagagcccactgccgcctgcaaaacgcgaaatgttggaggccggaaagagccagccaatcgtcctctggataatctgttggctctttcacagttgctcctttatgccgacaatactgacgggattgattcagcgaccttcgagtacctcataatggagaccgggaatatgcgcggtatccacggtgatgacaccttcttcatcaaccttggcagtgcggtggaccttcgctgacgaatattggcccgctttgctgttgtgcgtaaaccacgccagattcaccacttccatggagcctgcaggtcgtgctgaactttcgtcattctcaaacagagtcagcaaagcttctttgattttctctgcatctttctcagtgaaaccagtcttttctgccaattgagggctgatactgccatgggtcacatatacagcacgtccggagacacggtgcttcatacccatggtgtcggaggatttcttattcgtgtctgtagtttcgccattcactgacttggtgatttgtacgtcgtcaatagcgatgggttcaagagagaatgcagattgtatggtgaacggaccgcgcactggaatggagacggaagcatcgccttccttttcctttcctttgaacgcaaacacttgtccaaaggagcggacatcaatccactgttcgcaagccctgtaggatagagcttctcggtccttctggtcttccttgcttagggtcttggtaaaagctttccaacgatctgacagagatttttctccatcatcagtacggtctgtggactgtacaaagattcgctcgcctgcgtcttgtaggcgattgcggatcttgcgcttttctgccacatccgacatttcacccaagccttcagcagtggtacgtggacggtttccattcagcggatcgccgttagggttggcgttttcaacagcgaacgtcagtacgaaatcaattttgtgctgcaagctagtcatgattcattctcctttattttcaatgttctgttctttgagttgtttggcggcatcggccctctggataagctgtctgcgtttgtgggaataaccgagcaagaatagtgatgacaatggcttattgctttcgaagtctccttctttgaatttgctcatgacctcgtcaacttcgttctggaagaacatcccattggtggaggagatgatatatggattcagttgctgccttaatgtcagccacgtggtcgatggtttggctacgaaattattcatcagttttacggcattagtggtgcggtccggtgtccttccaccgctctgccttaataaaactctgtattcgtaattgtcagcgagcgccagcaactggccgaataaataatctcggtccgttcgcttctcgtctaaatccatggtgatgttgttcctttcatctaagggaatttttttatcttgatcgatgtagtactttttccacatactgcaggcgacttcgaaatcgtgctgccagacagataaactgtcataggacaatggccgaataaccttgtggaaagccggctgcaggagcgatgcaggaaggccagcgttgctgaacatgcactctacgagttgtttttttacatatttggcaaagcgtctgtaactatcactgctgtgatcgtcagtgctgtacacacagttgataacatccgcgaatgacggcgcgccgatgtatggaattggcttcggtttatcggaagacttcttggacccgcgcggagcctcgtcatcggtagatgcgctgtttttgttatcaaaacaagtgaggtaccacgcagcatcttcgtgccattgaagaacgctttcaatgtactcgttttgggataattcacggtagagggtaacgctaagacgccccgacctcgaagtggcggcatcgaagatagtcacgactattcgtctgctatgctgctgcatttgttgcagtaccttttcgttgccataaccgcgcaacaatttaccgaattgctttgcataattcgcgtaagtttgaacgtttgcgtctataagtttttcagaatcagtacggtcatcgacctgttcggccacatcgcgggaatttccagtgggatcaagaacattgtccgtcggatggccgtcaattgcccaaatcacaatatcctgactaccggtaagcgtgccattattggctacaagccagcgcagcgttgtatggattttctgtgaagtcagggtatcaatactcagcgcttcatcgcgattagcgaaacgcccacggaaagtgaaatacgtgttgtcattggcggatatcaatttggcgttaccgtttacattgacaatcttctttgggaagttagtggaaggcttgtacagtgtctcgccgaacagatcagttccaagactggcaccgtgccgcacctgctcctcatgggctatccacaaatcccgtattgcatgatccgcccaaacattcggttcataatcaccatggcgaacatgtaccgcaaagcggactccgattttactatctttcttgggatcgatcccaataccttgtgctcgagcttcttcgattacgctatgctgcgaaagatattggtaaatagcatttaacttcgcattatcacctttccaactggcaagctggctgagatatgattcatgcttgaccgggtcataattggtgtcgatgtattgcaactgatcgcataacgggtgcggaggcagcacctttccggagcgccccatggattgctcagtacaagggacgataatttcaatgtcggcattatctcgcttgatagtggggtatccgttttcatcaagtgtgacctgtagctgagtcttcaacgtagtgtggtaaagaggcaacaaggttttattcacgtcttcattgagaggtgtgattcctgctgaactgttcactgcatcataggtctgcagcagactggaccataaactcatgtctactcctccgccatgctaaaattgcgaccctcaataaaatctttgacatgctgattgcgccggataatgcgttgatctaattgtgtggaatcggggcgttcaaactgaatgatgccatcgtgcattattggacgccagaactgggcgataaagtcatgttccgggttttcatctggataaataaaactatgaaactcaaagccgaactgccaatcaccataaccgtcgtagaatccttcgccagaaccgaactcgcatggttccacatatccttggcactctctggtgccgaggaaaatgtctcttcggcctccaagattgactgatctcttggcgatattgtggtgtttgttctcgttgcggtctacacgcaagtcttcgcgttgctcattccactcaaaatgagcaagtacttgatacttgactttcttcaaataggtgtaatacgacagatcattcccgccactcatcttgattggccggatacctttgccttcggtctgaatcttgttcatcacgcgtactgcgtcaatgacccacacgattgttggtttccaatagatgctctcagtaatacccttcagagcttgatacgttggaatctgatatgagtttttttctccgcccgtgcgggtggcaacttctgagaacaaggcgtagtcgccatatatcacatattcaatcgagttgcgatgcttttccataatcacctacttcatcagaagcggcatctccgctttcaagaggaatccgaagtcttgactgtagttttcttcgttgagcactaatatgccgaaatctccattcgcttcgctaatcgatttcgacttgtcaagtgccttgaattcgtaatcgaagagagaaaccgtatactcctgcaatgagcgcagtatcttaatcttggatgcaaaatccccctcaccgttaagttggtcaatcagttccatcgcttgtccataatgtaccacaacatccgtggtacctccgggaatgacatgaaagctatctcccacagtttggaaagcctgggcaaatgcgtatgggtattgctctccgacgcggttacagtacaacccacgacggcgacggttgaacgacaataggtcgtatacggtttcttcgcctccgagaattgagtaatccatggttccaatgttccgtgatttggagtccactaattttgaataccggataaggtaagcgcggtaatattcttcgatcataaatgcagagagcaagtcttgttccggataatcatggatgagttggtccgtgatctctttccctaattggatttcaggaagatatctcagtcctgactcatccttaatgggatatacataaacgtttctcggcatctgcgattcgccattgcgattgcagcgacccgctgcttgcaagatactgtcgagtcccgccattgcacgaataacacaagagaacgaaatgtccacgccggcttcaatgagctgagtactgatacaaatcactggttggcccgagtctccagtttttttcggcaggcatttcttcagcacggcaagttggtctttgcgatgtgcactgcacatcgcagtactcagatgcaccaatgtaaaccggtggtcaacgtctagttccttgacgagttgatatagctgtttggcttcgcctttcagattaaccacagccaaacagttaccgttatccaacgctttgctataaatttctgctgcaaaatcatcgagggtcagaccctgcgatgaagcgacaatattggtccgacgaagttgctcggcataatcattgtcgggatcaattagatcaggcttatctgaaagcaacagatttctgcggtcggtttgttccaaaagtggctgagtggccgaacagagcaaaatcgtggaacccagaatcttggagaggaaactcacgacttcgttgaacacgttaatggtattggtgggcagtgcctgtacttcatcaaagacgataacgctatcagccaagttgtggaacttgcgtagtcttgttgctttcgcagacatcacagtttccaggaactgcaccatcgtagtcacgatgataggcttatcccatcgctctgcagcgagacgtcgttgctgctccttttcgtcatctttatccggaaccacgctcgaataatgctcgagaagaatctcgtcgtctttgtcgagatcgaggacattgcggaatacctgcacggtttgctctgtaattgacaaataaggggtgatgtaaatgatatggtgttttcctgtttcctgggcatgatggagcgcaaaacgtagagaggccaaagtttttccaccgcccgtgggcacacctaaacggtatattcctgtatcgcgtgtgctggctgcaagacaattttcagagatacgcatcctgattttgctgatcttcgacgatgtatcaaaaccactgatcgcattttctagtcgacgagtcagttcttcccaattgggagtctgcgaagtatatggttgatgagccgtgaagtttgccgcatcgactcgatccgcatctacgagccgcgaatagatgtattttgcatacaggcccaagaagaagctgcgagaattccttgtgttgcgcggtgaaataccacaggaatcgactgtttctagcagtctattggtctcagcgacactgttggcgaaattggtgtttatatctaggtttaaggaagaaacatggctctgtacttcttgatagtggtactgctcggcttttttgttctcgcctgtcaacttcctaaagtaagcagttcctccacaagcgtccaggcaatccggcagatgaccatgatgattagcgattgccagctcaagtacttctgcggttatcatactggctgctgatgatggaaaatcggcagcacaatcatcaacaatgaacgcgccttgcttggcatgaacgacttcccctcgcttgcggttgccggtcagcagatatcgtttgaagtcatccgtagctttgccggaatcgtgcagcaatcctgcggcaaacgccgtaacagaacttcttttttcaaagcccgctgccagttccgctgtgttgtgcaaatggtcatacagcgtctgcgtattgccgtcatcatctttacgcgctaataataaatccttaggcatcaatgcctgtcccattgcgcaccctttctgaataattgaaacatctgcgtgccccccattatcgccgaatcttttatgtgcggtaaatttttaccgaacgcgacgtaattatgcggaaaattagaggtccagtgctgaaaaagccgtggaatatggattgcgtcgtctgtgcctccgctttgaatcggaggcacagacgacgcatttttgagatacctatactatctgcatcattttttcaatccacaccttgctgagatgacacgggcagccgatggtgcgccctgcaggatatcaggtgaatggtgtcgcaactgacataacatcattcatctgctaccctctaatagcgaagaaagactcatactcctggatcgggaggatgagaatgacaatgatggcgattagtttcatcttcatcacgtgcacctttcccgtgaaacaaaggccagtatttctggtctctaggtgagtacgacttgtccggcctgctcgcctagaaggaatcatatcttcaatgaagtagatagtaaaaaccatgttcgatcggcgtgtcgatgtgcattgttcgacaaagtcaagattggcgtctttccgggcatcctaaatagcacagctggcatcacggagtgcatacgaaaaaacggctcttcgggtgtttgtgtgggtgtgggtccctggtctggcttacgggttattggcgtccggggagttggaggttgaggccgccgcatctgagcatgaccagggcgatgaggttgccgaggttcctgtagccgtagccgatcttgatggtggtcttgatcttgttgttgacggcccccaggcgagcgttggatagtccggaccggatggtgcgcaggatgtcgaagcggcggcggtcgatcttctcgccgagcctcgagaactcctcgatgcccgagagggacgcgtctgcagaatcgggcccacgctcttccagttgacgcgcatcagcgccgacacggcgctcctgggcgcgtgcacgctcagccatgcgacctgccgctcgaagtcacgcatgtacgcgctcttgcgtctcgccacggcaccatcgcgacggtcaccccgtgctccgcgcaatcgaccctccggggcgcgtgctccagaaggagcctggcgcagccgatgtcgagatgccgccagcggcgcacgcccagccggtcgtacggccggccacgctccccacatctggcgcaccggtccatgtctccctcgcgtacgggcgcaccgggacgatgacgacgtcccctccgcgcgggtccttctcgacgcgcggcacgccggccacgacgttcgcgggcaggcccggcatgcgcttgagcgcgccggctaatatggtgggcacaggcgttcctctgttcctcggttctatttcttggcggaaacaaatctaacaggagaacgcccctcccatacccgcacacgaaaaagccccggcaatggacgccggggctttcccaccacacaaactggcgaagacacaaaaaacttgtcgttgtggctggaatccacacaatcccaaccacaacgacaagctcatatcaattggcgtatcgagtttactgggctgtccacaacgttcaatattgacaactcagcaaactcaattcagcgatctcacgccttggcgacctccacacccagctcggcgccttccttcacttcgaaggaggtagccagcgtctcgtgggcgatcagatccttgaactgctcgaccttggccacatcaacagccggcacggtcagcaccagcgagatacggtccgcgatgtccagatcggcagccttacgtgcgtcctgcacagaacgaatcacgtcgcgggcgtagccttcggccagcagatcggcatccagcgcggtgtcgaggatcacgaagccaccggtcggcagagcggcggagaccgaagcggcggcctcggtggcgttctcctcctccacgcggttgatcagctcgtactcgccttcgaccagcgcaaggtcgccggacggcgtggagaccaccggcgcaccggacgcagcatcgacatgccagtcgccggacttggaggccttgatggcgaactgcacctgcttgccgaggcgcggacccgccgcacgggcattcacacgcagctcgtgaacaatcttcagaccgtgggcggaggcgtcctccagagtcgagaactcaatattcttgatattaagttcggacttcagcagatcgtcgtacgccttgacggcgtccacgttctcgaccaccacggtgagcttggaaagcggctggcgcacgcggatcttggcggccttgcgcagggacagggtgccggagacgacctcacgcaccttctccatcgcgtccaccaaggccggatcgtcgaccagcacgcggccgagttcggtgtcttcaccggtcttctcgtccaccacgaacggccaatcggccaggtgcacggactcgccaccggtcagaccacgccacacggactcggcttccatcggggccagcggcgcaagcacgcgcatgaacgcctcaagcacggtgtacagcgtgttgaacgcggaagcgtcctcattccagaaacggtcacgggtgttgcggatataccagttggtgagcacgtcgatgaagtcggagaccgcatcgcaggcgtcggagattgcgaactcgttcagcgacttctcggcggccagcaccagacgacgggtacgggccagcaggtagcggtccatctccggcagatcggcgacctcgtccgcgcgcagctggcgagcgtcgaagccagccccaccgttggccgcattggcgtacagggtgaagaagtagtaggagctccacaccggcagcatgacctggcgcacggtgtcgcgaatgccttcggcggtgacgatcaggttgccgccacgcaggatcggcgaagacatgaggaaccagcgcatggcgtcggaaccgtacttgtcgaacacgccgttcacgtccgggtagttgcgcaggtgcttggacatcttctggccgtcggagccgagcacgatgccgtggcagatcacgttcttgaacgccgggcgatcgaacagggcggtcgccatcacgtgcagcaggtagaaccagccgcgggtctggccgatgtattccacgatgtagtcggccgggaagtgctgttcgaacttctccttgttctcgaacgggtagtggaactgcgcgaacgacatggaaccggactcgaaccagcagtcgagcacatcggaaatacggtgcatgtgcgacttgccggtcgggtcgtccgggttgacgcggaccaggttgtcgatccacggacggtgcatgttgatgttgccgtccttgtcgcgcggatagtcgccgaagtcggccttgagctcttcgagcgaaccgtagacgtccacacgcgggtacttcggatcgtcgctcacccacaccgggatcggggaaccccagaagcggttgcgggagatggaccagtcgcgcgcgttggcgagccacttgccgaactgaccgtccttgacattgcccgggatccagttgatctgctggttcaattccagtagacgcggcttgatcttggtcacggacacgaaccaggaggagaccggcttgtagatcagcggggtggcgcagcgccagcagtgcgggtaggagtgcacgtagctcttctcctggaagaggatcgcgcggcgctcttccggaatctcggcgagcgggccgtcgccggcgcgcaggttgcgcaggatcggcaggttggcgtcgaacacgaaatcgccctcgtagtcagggcactgcgcggtgaagcggcagccatcgtcgagcacgtcggtgctcttgatgccgtgcgcgttcagcgtattcatatcgtcctcaccgtagggagcctggtgaaccaggccggtaccttcgacggtgtcgacgtagtcggcggtgaagatcgtgtagccgttcgggccgggcacgtggccttcggattcggcctcgtcacccgcgaagtacgggaagaccgggtagtagcgtcggcctgccagctcgttgcccttgagttcgcgcacgacctcgtaattctcgccgagttccttctcatagtgcggcagcaaatccttgccgaggtagaacttcttgccagcgaacttgccttcggtcgggcggacctcgacgtagtcgatgtcggcgccgaccacgatggcgaagttggtgggcacggtccacggggtggtggtccagaagacggcgtaggcgtcgtcctcatcgcgcatcttgacggccacggatacggtggtgtcctggcggtcctggtacacgtcggcgtccatgcgcagctcgtgcgcactcaacggcgtgcggtccttcgggcagtacggcagcacgcggtagccctggtaggccaggcccttgtcgtagagctgcttgaaggcccacatcacggattccatgtacgggatgttcagggtcttgtagccgtgctcgaagtccacccaacgggcctgacgatgcacgtagttctgccattcgttggtgtacttcagcacagaagcgcggcaggcgtcgttgaacttgtcgatgcccatcttctcgatctggtcgaccgagtcgatgccgagctccttctgcgcctcaagctcggcgggcaggccgtgggtgtcccagccgaacacgcggttgaccttgcggcccttcatggtctggtagcgcgggatcacgtccttggcgtagccggtcagcaggtggccgtagtgcggcaggccattggcgaacggcgggccatcgaagaacacgaattcgttctggctgtggtcgccggaagggttgcgttcaacggactgctggaaggtgtcgtccttgtcccagtagtcgagaacggtctcctccatgtcggggaagctggggttcggcgcgacgtgcgcggtctcgccgccctcgctcgccttgggatatacgttttcgctcaccgtaaatctcctgttagtactgtgcactggtcctacaggagcgtcattgatggcgattgccgggcgccgacgtgtgccggctggtttcacgaatgtcacgtaccgaaccgtgggccgattagtcaatcgcctcgcagccggaaccgactgtgttccgcccggaacagccatgtctgccgttcctgcctacgaggacgatgacgagcgctggtatgcgctccgcaccgcggtaccacctcgcttatcgcaccggttgcgccgctccgaactgttgcactcggagccgcgagcctgcgcgaccgcttgtgttcggctgtctcgggccgatcccgtcggttctactgggcgattgccgccgttcttccgaagactccccgctgataacggatcactgcctcacaacggtgcatatcctaacacgccacgcggtcaaatcgccgcccacggccacggcaccgtcaggagcccgatttagattgggaccggccaccacggaccgagaaaggattgtcggacaatgacgtatgatttcacgtccatcatgaacaggcatggcatggattcgatcgcggtcgacggactgggcaccgacccgggattcgcgccggacccgccacgcgagggtttcgacgtcatccccatgtgggtggcggacatgaacttcccgaccgtgcccacgatcccgcaggccatcatcgaacgggcgaagcatcccgcctacgggtacttctcccccaccgacgactattacagctccatcatcgactggcagtccacgcgcaacggggtcaccggattgacccgggaggcgatcggctacgagaacggggtcctgggcggtgtgatcagtgcgctgaccgcgttcgccgcccccggcgacggcgtgctgctgcacagcccgacctatatcgggttcacccggagcatcgaaaacaacggctaccgcatcgtccacagtccgctcacgctggacgagcgcggcgtatggcgcatggattacgaggatatggacaggaagctcaaggagcatcacatccacgtggccgtgttctgcagccctcacaatccttgcgggcgcgtgtgggaacgttgggaaatcgagaaggccatggaagtgtacaaggccaacgattgcgtggtcatttccgacgagatttggtccgatttgactctggggaaccaccagcacatccccacccaatcggtcagcgaggacgcacgcaacaggaccgtggcgttctacgcgcccagcaagaccttcaatctcgccggactggtgggaagctaccacatcatctacaatcccacactccgggaccgcatcgtggccaaaagctcgaaatgccactacaacgacatgaacgtgctttccatgcacgcgctgatcggcgcctaccggcccgaaggccatgagtggctcgacgaactgaaggcggtgctcaccggcaacgtcgattacgcctacgactacatcaccaagcatttccaaggagtgagtctggccaaaccggaaggcacctacatgctgctgctcgactgcgagcagtggtgcgaacgccacggcctgagcctgcccgagttggagaaacgcggctgggatgtgggcgtcgcatggcaggacggcagcatgttccaggccccctacagcatccgcgtcaatctcgcattgcccttgagccgcgtcaaggaggccatgcgccgccttgaccaatacgtattcaacgcgtaaacggcatgcatccgcgattgcggtgtcctggaaagacgaatgccgtcaacgaggttggtgcccgttggcggcattcgtcatacgttggccgaaccgggcgaaacccaagttgccgtgcgctatgaggtggatgccgccagcggacgtgtacatctgaccgcccgatatgccggtgccaccgatgcgccgacgctgccggcattcggattggaatggacacttcccaagcagtacgagaacctgcgcttctacggccttggccccgaggaaacctatcacgaccgtctgcacggtggcaagctcggcattttcgagcgcaccgcggccgaagacaatgcaccgtatctggtgccgcaggagaccggcaaccatgaagacttgcgttgggccgaagtgcttgacgcccaaggacacggcatgcgtatcagccaggccggcagcgaacatttcgcggcgagcctgttgccgtacagctcgctcatgctggaagaggcgacccaccagaacgagttgccgccggtccgtcacacgttcctgcgcctgttggccgcgcaaatgggcgtgggcggagacgattcatggggcgcgcccgtccatgagcagtaccagctgcccgccgatcgcgcctacacgctcgacgtgaatctggaactgttctaacagcgataaagaagctccctctgacgagggagcttctttatcgcacagagggagcttctttatcgtgctggtacgaaactgtcacgcaccactagggtggtggagatgaaggtatggtggtgcagcgtgcgccgactggagatggcctcggcaagcatcgtaatcgcagtatcggccagctcattctggtcgatatcgtaactggtcaatgtcggcgaagtgtactgggcgatggcctggttattgatactgatcacactggtatcgcgaggcaccagcactcccgcagcggtaaacgcctgcagtacgccgactgcaatcgagtccgcagccacgatgaacgcatccggcatgtcatctcgatgatcgttaaccgcttcctcccctagagtgcgcccggtgtccacagtgaacgcgccttgcgcgtaaatcaggccttccgcatccagccccaaacgctcggtccaattgcggaatgcggttaatcggccgtcttccggatattcgtgcaaacccatcgtgaagccagtaccgccgatatagccgatgcgtcgtttgcccgaggacaccaacatatccaatgcgtccaaaatggtttggcttaaatccggttgtaccgaatcgaacaggctgggcgcaggattggtgtcgatgaatacgccatagggcaataccagatggagcttcaacagtctatccgaagagagtacggacggtccgatggagatgaagccgtcgaaatcaccggcgtcggcaatcagatcgtcgatatgggaaaacgacgtgagttccatgtgctgggctctggcattgtcgccgagcacggaccgtagttcatcgaaataggcgtccgccagttcttcctcgcgggtggcgttgtcgagtacggccacacggcgtggcaatgcgatacggcgtgatccggtagcgtagccaagctgctcgctgacctcgatgatgcgacgtcgcgtctcctctttgacagacaatgtcgggtccccattgagcagccgggataccgtggcctgcgagaagcctgatttctgtgcgatttccttcatcgtgaccatagttgagccttccacgcctcagtacgtaacaatacgcagtatttcagtaaataactttactacatagtgtaactcacgtcatgcgggtatgacgccgtatggttgcagcatcgtcgatccgcagcgctgatgagaacgtgcatgtttcaggccctccgataattatcgggcaggcgggaatccccagaccgtggagtcaatgcgctggattttcccggacttgtcaaagacaacggtgatgtccggcgcagtaaaactgccggtcgaatccccgaatcggtacggatcactccagtcgataacggcatgcatcgtcacggtccgagttttcgcgtcataggactcattcgagtactcgatactgttatgcgtggccgtagtcccgcccagaccgccgccattgccttgatgcatttgctgacaatacttcgtaaaatccgcaccgagaacattcgacactgcatagcgcctaaatgaacgtgttaggtctgcaccaattcacggccggcaatactccacacttctcagtaatcaattcgtaccaaaccgctcacgaatctgagcagcagtaccataagaggcttgcgcaccgaccccagtcgcggcgtacgcggaaacgtacgaggccaactgcgcactgtccgccaacgcatgacccgaggcaagtccggccagaaccgtgcccataaaggcatctccgcacccggtagtgtcgatggccgcaaccgcaactggcgcaatacgatagatatcatcaccatcgatgaccaccgacccatccccgccaagcgtaattaccgcctgattaaagccgaagtcatgcatctgccgcgccacatcagaccagtccagtccatcccaatcgtcatcgtcaggctcggcgatgtccagcagctgtgccatttcatgttcattgaccagcagaatgtccgaagcctcgataagttcagcgggtagttcagcaacgaatggcgaatcgttgagcaataccttgagcccggcatcatg

SEQ ID NO: 904 - DNA, 7300 bp, Unknown
  R117_24m  MAG No. k141_1858
ataccagattgcctgcgccggtccgatctgcggcacccgtacccggaaacaacgcgcgttatggtacgagaactcacccgactccgacagcgacttgcacgctacgtggtatctcaaccccggctcaccctcgtggtactcagtcagacgatcaacgaaggtctcataaccgccgtaactgcccggaatccccttcgaccccacaacgaacacatgctgaacagccgacaccccactcacgccacaacccccacaaaactgacatgacggcccttatcggacatcatgttgctaccgttcttgctgatctcatactgcgatttcatgtgctcagtccttcgtcttttcagactttttgtgctggatttggcgcttcctgccgttgtcgtcagactcgtcgccgtaatagtaatagccacccttctggggcttctccgtctcgccgtaattcatggccaagcccacgggatcgatgctcagtgtgctcagttcgcgcccggtctgcttcagcagtttcttctccgtaacgcccaagccggcaaccaacaacagttccggaccatccttagcgaatacggcggcatcattggccacctgcatgggggcggtatcgataatcacatagtcataggctccggaaacctgctcaaccagtgccttcatagcgcgggaattcagcagaatgctggggttcatggtttgttttccagcaggaagcacgtggaagttcggcttccagtagcgttgaatcgcatcatgcgacgatacacggttggtaatcagatgggtcaagcccactgcgccctcaatgccgagagccttgctcaccgaggggttgcgcacatcggcgtcgatcagcagtaccttgctgccgttttcggcgaatgcggtcgccagattcgtgctcagcatggtcttgccttcggacgggccggtggaagtcaccacaatcacattggataacggctcatcgggcagcacgaacatcacattggtgcgcaggcgtcgaatctcttctgcctcgcgggaggccgggcgggagataatcaccggcgacgtaccggcataagcctcattgcggctcagcgagcccagcacgggggcgtcgataacagcggtaacatcagaatcgcggcgaacacgggtgtccagcaaatccttgataagggcaaccacgatgccgagaatgacaccgaccgcaagacctgccgccagattgagcttgacgttgggtgagctgggggaagccggagcgtacgcctgctgcaccacagtcaggttgacgggagagatgatcttatcgccctcatcgctgtaaatcgtggaagtaacctgttttctcaggttttcggcaaccgaattggcaatactggacgcctgcttcgggtctggattattaaccgaaatatccaccagcatggtgtcctccgggttggaagcggtaacgctcgcagccaatccctttaccgtggtgtcaagccccagatcatcaataaccggctgcaatacagactcggtttttaccaactgcggatacgtttgaatctggctattgatgtaattggcgccagagctcagctcgcctgcattgctggatgcgcccgctgcagccgctgaactgcgataagtggccaagagttcggaagtcgcggtgtattgcggagtgcgggtaaaggtgtacgcgcagattgccaccatcacaataaccagtgtgaccactgcggtaatcacatgctttcttaccgcattgaataaatcgagaatggtgactccattaccatcttgcacctgttcagcttcatccacagccatactccgttcttccttattcatgattccaccttaatgtataggggttgcccctttaatcaaccaagggggtctgtctcaaaatcatttcattctcatcggccgcaggactggccagcacatgcaccgtggtctcgaaactttcccccggccgcaatgtcacggttttcacacccaccgtcagtccatcgtgcacagcgaactgatcgaaatcctgggtccaatccacaatgcgcccttcatcgggggcgtagacgtacagtaccgtttcgatctcccctgtacgggggttgccgttatggtcatagccgcgcaacagatccggagcggcattcaccttggcggcatcggccgtattcgtcagtttgatgtgaatggtgtattgcttggcgccactgggataggttttgtcatatgtactggtcacttcacgcttcaggtaccagtccatcttgcccatggtggcgtcgttgaagtacacgcccgtaaccgaatgagccgggttcgactgcaattcgccggcgatggtcgtacccgagatacgctgctgctcgccctcatgagcactccatacatacagatggccgtcggatacggacttctggaacgtttgcaccagctgctgattcttgccgtccacattcttgagcacatgagtgaagatctcactggccgccatcgtgaagaagtcggtttgctccgcctgcgtatcggtatcaatataaatctggttcagaattcgctgctcggcattgtcgccgctcatcaccgtgccgtcggagagcgtcacggggccggcaaccttcaataaccgctgcaggaacaccgggtccacgctgatgacgccatccacaccgtcatgaccggctcgatgccagatctgacgcgcgatatcagcaacgcgcgggaaatcgggagtgaaattgatgtccggatagtctgtggccatcttggtggagaagagattgcgttcttccgccgtcagtacgctcgcggcttcatcctggctgaacagaccattccgaggcggatcgccgaacgtactcatgctgattttgcctgcatcgatggtgagcgtggcccacgcagtcggaatgcctcccgtggcacgcagctcagcattgttctgtgccagcactaggtaggttcgcgggccactgctactgccctcgccgctatccaagtcgaacatcttgggcagcacatccgccagccgactggccgcatccgtcaggctggcaagctccttgaacttgctacgcccctgctgcaccgcctcggtaatctgcggaatatgcgtatcgccaatcttgcccatgtctacgctggcatccgccactactccattggcggcggcaagatcctgagccacactggccatatcccccagctgaatcgtgccgtctttgataccgatgctgttgaaatccaaggcctgtgccgccttggcaagcttcggcaatgcgttgttcgacacgtcttccaaaatgtgcaccatgtctcgcgcggccttcacgtcagaaccgtaatagggcaccaatgtggccagtttccataccggctgcttggtctgcgcatacgtagcgtcgatatgctgggagaatgcttcaatgctggcttgcgctttgtcggtgtcgccggcttgaacttgtgattggatgcggcttgcggcctgaatcgctgcttccacttcatttttcgctttgagcgcggaaaggccgagccacgccgcgagcgcggcaatagtcaacagcagtgcgccgattacaatcagcaccatccgaatgcgctttttgcgcttgatccgcctgatatgttcatggctcatacgccggcggtgcttacgccgttccgccgctcgggcgtcttcagcaagtacctcggggtcaacatacggctgtatcacttggcgatcatccgcgttttccgaccgctcggagggtgccggcggctgaggtatttctggtgtgttcgaatcagtcatagatatatcgacttatctttctggaatcacgttcaagggcggggcggcaagggcgcggcaagactgaagcagcgaaacggaaaggaatcaatacgctcccttgtgactcagcacggcaccgaccgtgcggaagagaagcacaatgtctcccataatcgaccagttctgcacgtaagccacatcaagggcctcactctcttcggcagacaaatcggagcgaccggacacttgccacggaccggtgatgccgggcttgaccagcatgcgggtggcgtacagacggttgtaacgggcgtattcctcaggcagcggcgggcgcggccccactacggacatatcgcccatccacacgttgaggaactgcggcaactcgtcaatggagaagcggcgaatgaaatgccccaccttggtgatgcgtgggtcgttcttcatcttgaagatgaagcggtcggtctggccggtttcttttgcgagctccttcttgagcgcgtcggcgttcaccaccatcgaacggaacttgtacatctggaacggcttgccgcgcaggcccatacgggtctgcttgtagaacaccggtccgccatccgtgactttgatggcgatcgccaccgggatggtgataatcaacgaacagatgatcgctagcgaagaaatcaccaagtcaaacaggcgcttagccatacggcgggctggcgtgtactgcgcaagacattgcgtgataatcgtggtgccctgtatggatcgaacctgaatctcatggttagaagtgtcagcggcggaagccagcacggcaatctccagaccgaacgattccatgcgcacggagaagatatcgtaattatccgaatagcgatgcagctcgtcagccaccataacggtctgcgcgttcatgtcaataatctgttcagcaagattatgatcgctgtactcgagtacgggtagctggcagccctcgttcttttgcatctcctcacggagtgtctcatggtcggtgctctgttcaatcaatccggtatcgggattgagatgaatcgggcatactgccaccgggcggtagttgagttgccgacgctgaccgaggaattttagcgtgcgaccaatgccgtgcggggaaccgatgatcaccgtgccgtaagcgtaggcgcccttgcgacgactacgcgtaatgaatgcacggctggcaatgcgttccaccatggtgagcaaccatccggcaatcaccaccaagcagagcgaggtaagggtcagacccagatcgaagaagtagttgaacgcgcactgcaccacccagcacacgaccatgcctttgaccagcagcacattgagctggtaaccgtcacccataacatggcgatgataaatgccggcgacatagagcgaccacacccagaagcaggccacaatcataaagtaaacggtggagtcaatcgtgaaattgaatctgctcgaatagaacggcgttgcctcatgacgcagattgagcaccgtggctccggtgatgatgtacatggcggcgtcgataagcatgagggcgagattgacgaagaatcgccagtacagcacgtggctgagctgcttttggcggatatcactgagctgagcggtggttcggtcaccgctattggcctgtctgctgcgtgtagacggctgaccgttactgctcagagatgacatctcaaacaccaattcttccttttcaaccgtataccgcaggtctcgcggctctcactcctctggattcccctgtgtacgggtgtatacggggttaccccttcaacatggtacagacatcacacccctaaccgctaggggggggggtgttggaaaaccacatagcgaacgtgatcggatagtaactacgttcattttgacgtctcgaataacgggactaatttgctctgcaaccgggcggccagtcatctcggcattgcatctcgacggactacccctgggtgtagcgtgttggggttgctttgagagactgcctgatgcgttgttgcggtcgatcagcgagagtggagtatgcacgtgagtggaatgaacggagctcggggaatcaagaatcgtcgcggcgaactgcagcgggtgctgagccgcgaggaatcatatgtagacggcaaactcagccgggcggcgttcatctccatcgcgatattgacctttattaccttcgtgggcaacttcacgcagttgcagctgagttccgcgctgccgattatcgtttccgaattccacatctccgtaaccaccgggcagtggctcacctccgtgttccagctggtcatgggcgtcatggtgccgctgaccgcgttcctgacccgtcgtttctccacccgccagattgtaatctgctcgatggcggtgttcacggtcggctccctgctggcatggttggggccaaacttcgtatgggtgctggtcgggcgcgtgctcgaagctgccggcacgggcgtgatgtggccggtgctgcagatcaccgtgttctcgatctacccgctgtcccgacgcggctttgccatgggcacggtgggcatggccatgagcgtggctccggcaatcggccccaccttgggcggctggcagaccgacgccaatggctggcgttccatcttcctgaccatgaccgtgattggcgtggtctcgctggtggcggccatgttcggactgcataatttcggctcgcatgacccgtctgcccgcgcggactttttctcggtgagcctgtcggtgattggctttggtgggctgatgttcggcttcaccaattcggagacctatggatttgcggcaccggtcacgtgggggccgatggttgtgggactggtcggcatcgtgtggtttgtgatgcgcaacctgcgtcacggtcggcggtatcgcgaagccaaggcggcgcagtcgggagcggagccggccgcactcccccagcctccgctgctggaccttgaggtgttgaagaatcggtcctttaccgtcggcaccatcacggcgtctttggcgttctttgcgttcagctcgattctggtcatcatgccgctgtacatccagaccgaccgtggttactcggccaccatgagcggcctgatcatgctgccgggcgccataggccagtgtgtttcccaattctttggcggtcgtgcgatggatcgtttcggcgcgcggcccgtggcgttgtgcggctcgattgtgctgaccgtcggtacgatcggcatgtctttggtgtctatggatacatggatttggtgggtgtcgatctgccagttcacgcgccagatcggcatgggattcctgcttatgccgattaccacatggtcgctgaactgcctgaacgggccggatgaggtgtctgccggatcgtcggtcacgaacaccgcgcgtcagattgcgggcgctgtgggcgcacccgtgttggtgattctgatggaaacgtttgccgctttgcataagcagggcggcgcctccgccgtcgccgcttcgatttttggcattcaatgggcgctgcgcatctcc

SEQ ID NO: 905 - DNA, 8365 bp, Unknown
  R117_24m  MAG No. k141_2243
aatgccgattgaggtttccacctgtccgccgggctcgagagaaacggcgacgccggaacggccgagacccaccagatggccgttctcccagtattccttctcctcgtcgtagtacggagccaagcgtttgagcaatgcctcgatgccattcggctcgtagtagcttacggcggtgtcgtcgctgttgtgcacgggcaggtgctcgatctccacgccgaagccgccggtgccacgctgggagcgaccgttctcaaagaacttgagcaggctttcgacgtgcttggggttcggcttggcgagcaggtgcgcgtaactgattcggggagtaaccatgctttgtatcgtattcgagccggccggtgcgcgtgcccgaaagcccgtaatacgctatacgaaaaaccgatagcaggctccggcccggtttctcgctctagagactcccctcagtcgctgcgcgacagctcccctcacagaggccgagccgtaaagcggacagccctgtggactgtccgtaggcgagggtgagccgataggcgaaccagcatgtcgcgagcgaagctcgtccttaattgcggacgagccagagcataaatcagtccgcggaggtgaagccctgcggctcgccggcctcggcgaacttggcgttgtgagccttcttggcggcggcgatcatcagcttgatacgattgagctggttcgcctcggaggcacccggatcgtaatcgatggagacgatgttggcttccggatgcaggcggcggatcttgccgaacatgccgcggccggtcacatggttgggcaggcaggcgaacggctgcgcgcagatcacgttcgggcaaccctgttcgatgagttccagaatctcggccgtcagcagccagccttcaccggcctgcacgccgatggaggtgacttcagcagccttcttgaccagttcgggcatcggctcgtcctgcttgaacttgccgttcgatgtggccagcgcggccttgatcggcgcgttgtacaggtcgaggcccttgcgcatcagggcgtaaaccgtcttgttgccgcccatgccgaggttcttctcgttccagtcggtgatgtaggggcgggtggtcatgaattccatgatgccgggcaccacggcctcgcaatcctgggattcgatgacgtcgaccacgtggttgttcgcgtccggctggtacttgacaagaatctcgccgaccacgccgacacgcaccttgcgcgggatgtcgcgcagcggcaatgcatcaaaggatttcacgatctccttggccagcacgttatacggcagatagcccttcttgatgctcggcgccttggctgcggtcttggaatagccgtgatgctcgatggtctcacgcacgatggtgtcccacagctcgtacagcttgttggccgaacctttctccacctcatacgggcgtacgcggtagaggcacttcatgagcaagtcgcccagaatcagcgccttgatggcacggtgcagcaggggcagggtggccttgaagccggggttatcttcgagcccctgggtagaaatggcgatgaccggaatctgcggatagccggcatcgaccaaagccttgcggatcaggccgaagtagttggtcgcacggcacatgccgccggtctgggtgatggcgagcgctacatggtcgggatcgtatttgccttccagaatcgcgtcgatgagctggccgacgaccatgatggccgggtagcaggcgtcgttgttcacgtatttgaggccggtttccacatcgccacggctcgcgtgcttcaggatgtcgaacttgtacccaccggaacgaatcaccgcttcgaccaaggacatgtggatcgggctcatctgagggccaacaatcgtatagttcttcttcatgtccttgacgaacttctcgcgatgcgcgtatcgggacatggtggcgttgttgtggccggacttcttggcgttcttggcgttcgtcacgccggtggtgccgtccgaagtgccgttcttgctggcgactgcggcctgcaggtcgcgttcggcggcacgcttggaggcggcgcgcatggccttggtgagcttcgggttggcggccatggtgctgtcaagcagaatctggcggccgggggttggcgcggtggagccggtcttgcggaatccggcggacttggggccttgcacggccttggccgcggcggcttcgcgggccttgttggcttcgcgttcctcgacggcggccttgagcgagcgcagtcgaatcttggcggcacccaggttggagacctcgtcaatcttcagcagcgtgtacacgtccgccttgtctgccaggatttcggccacctgatcggtggtgatggcgtcaaggccacagccgaaggaattgagctgcacgagttcgaggcccgggtaggaggccacgaagtgtgcggccgcgtacagacgggagtggtaggcccactggttggtgacgcgcaacggcatcttggtgactgtgcggtctcccacgtggcggaatccggcggcgttcttggagcgcgggtcggcttcgccttccgagaggaattcggtgaggttgagcttctcccccggctgcagttcgcagatggaatcctcggagagcaccaccatgccgagcgagcagatggtttcggggatgccgtggttgatttcggggtcgatgtggtagggacggccggcgagcacgatgcctcggcagttgtgctctttcatataggcgagcgcggtcaaaccttcctgctgcacgtcatgcttgaagaccttgtcttcggcataggcggccttgaccgcggtttcggcctcttcgcgggtcacgttggcccacgcaaactcttcgacgatgcggccaaccatgagctcatggttggcgaggttgaagtacgggtgcatgtagcgcacgccgtcctcacgcagctcaggaacgttggcgccgacgacgagcggatagttggccacaaccgggcagttgtaatgattgtccgtgttgggcacgaggttctcctcgtagctcacgcacgggtagaagatggtcttgatgcccttgttgatcagccacttgatatggccatgcaccagcttggccggatagcagatgttttcggaggcgatggattcgatgccagtctcgaacagctcgtgggagctgcggccggaaatcatcaccttgaagcccagcgtggtgagcagcgtgaaccagaacgggtagttctcgtacatgttgagggcgcgcgggatgccgatttcgccacgggtggcctttttatcggtgagcctgcggtaggcgaagcaacgcttgtacttgtagtcgtacaggttcgggcggtcggaacgcttctttttggcgtcgccgccgcgttcgcagcggttgccggtcacgaagcgcgagccgtcggagaatgtggtgatggtgagcttgcagtggttctggcacagcttgcacacgtcacgctcggcggtcatgctcatgttgtcgagcgcttcgccggtcagaatggagctggcggtgtgagtcacaccgtccacgacaacgacatgggcttcgggcttggccggctcggtcttcttgaaggctgcggccttgggctcggacttgggtgcgggctcggcctcggactgttcctcggacccatcggccttaaccaccacgtccaagtggtcggcctcatcctgatagtgcatgcgggcggtcagggcggcgccgaacgcgcccatgaggccggcgatgttcgggcgggtgacctgacgttcggtgagcagctcgaaggcgcgcagcacggcgtcgttgaggaacgtaccgccctggaccaccacagtgtcgccgagttcgccggaatcacgcaacttgatgaccttgtacagggcgttgcgcaccacggagtagcacaggccggcagcgatgtcctcgatggaggcgccttccttctgcgcctgcttgaccgaggagttcatgaacacggtgcaacgcgaaccgaggtccaccggatgggtggaagccagagccttttgcgtgaattcctgaatcgtcaggcccatggacatggcgaaggtctgcaggaacgagccgcagccggacgagcaggcttcgttgacggcgatcgagtcgatgacgccgtcagtgatggccagatatttcatatcctggccgccgatgtcgatgacggcggtgacgccggggctgaccatttcggcaccacgatagtgggccatggtctccaccacgccctcgtccaggtgcaggccggtggtgatgaggccttcgccgtaaccggtggcgcaggagcgtgcgatccatgcgccttcgggcagctcggattggatcttcttgacgatgttgatggcggcggtcagcgggctgccttcgttgttggcgtagctggaccagacgatttcacggtcgtcattgacgagcgtggccttgatggtggtggaaccggcgtcgatgcccaggaagtgcgggccatgcgcgccttcgagggtgccgatgtggatgtgttccttgtggtggcgcttgttgaagtcctcgcgatcggcctcggtggggaacagcggcggcatggtgggcgtgttggagggcaggttcttcagctcgtccagacgcttgaggatctcatcgcaggtgtgggcctcgaaatggtggccctgatcgtcggaatccatgtcggcctgcaatgccgaaccgtaggccacatacaggtgggcgtcggtcggcacgatgaactcgtcgaccttgccttcaagggcacgctggaaggcggcgcgcagttcggacatgaagaacagcgggccaccgaggaagatgacggtaccgtggatcgggcggccagcagccaggccggcaatggtctgcgtggccactgcggtgaagatggaggcggcgagatcaggcttggccgcgccgtcgttgatcagcggctgcagatcggttttggcgaacacgccgcaacgcgaggcgatcggatacaggttctcgtagctcttggccatctcgttgaggcctgcggcgtcggtgtcaagcagcgtggacatctggtcgatgaacgcgccggtaccgcctgcgcacgaaccattcatacgctgttcgggcgtgggcttcaggtaggtgatcttggcgtcctcgccgccgagctcgatgatgacgtcggcctgcgggtattccttgtcgatcgcctcggtttcggcgatgacctcctgaatgaaaggcacatgcagattgtcagcaagcgccagaccgccggaaccggtgatagacaggcgaatcggctcatcgcctcgacctagttccacaagctctttacggatgtcgaccaacaggccggccacggtggcacgcacgttggcgtggtggcgtcggtaatcggagaagagggtgtctttcagggaatcggactgatcaagcaccacggccttgacggtggtggaaccgatgtccaatcccacacgcaggggcttcgggtgtgaagcgggctttacgctcgcgtcagtgacgatgtcaaccatgtgttcctcttaattccgacttccgggtatgtgcgccttcaggcatcatgagccgtttcgggacggctggcagatacctgcggacggcttcgcccggctacttcttctggaatattagtccgaccacctgcccaacgtgacgccgggcatggtgatttcgctcacgggaagggcgttccccaacagttccgacgatattgctgagtgcggcattccggacctgctactacgaggcctgttggccttcgccggcttcgcggtctctcaaatagatttcggggatatctcgttcttgatcgtggagcttggcccagatgaccggttcgccggcttctagggacttggacacatcgaggatgcgctggtttctggagccacggaattgcagcagcgagtccttctggtctttgaggtagcggccgtcgacgaggatgtcgataagatgcagcaattcaagcttgtctggtgtttctccgaggcgcatgagctcttcccatgtgtagccggtccacgaccagatatctttggtatgaccgaattcctggcggatacgttgtgcgagcggcaccagcacgggagtgttgaggaatggctcgccgccaaggaacgtaatgccttgcacccatggcgctttcaggtcttcgatgatcttgtcttcaagtttttgcgtgtattcgtggcctgcttggaagtcccagatggaggcgttgaagcagtcgacgcagtggaaggggcacccggagacgtaaagggagttgcgcacgccttctccgtcggtgacgatgaaggttttgtagtcggcaatcatccgcttggacatgcgccggccatcccattgaccggctttcggatcgttggcaagaccgttggagggtacggaggggccacgcccggtctcgctggccgcaaagtcatggcgcttgggttcgggcttggtcgtatgcaactccggcatgattccctccttgcggaaagcattagctcccctctttgagggggagctgtcgtcgtaggcgactgaggggagcttcggaatagctcttcggactcccctcagtcagctttgctgacagctcccctcagagaggggagcctactcacgaataaccctacttggcctcttcgaaccactcgcgggtggtgccgtcatccagcgtcacacgaccggtttcgccgctcatgtgcttgactcggtgggcgatctcctcgtgacggccgtgcaccatcgggcgctggaccgggctgccgaggtagccgcaggtgcgcttggtgacgttgcacttgtccgggttggagttaccgcactccgggcacttgaagccttcctcggtcggctcgaagtcgccctggaagccgcacacgaagcagtggtcgatcggggtgttggtgcccaggtagccgatgccgatgttgtaggcgtaatcccacacggcttcgagcgccttcgggttgtcctgcaggcacgggtactcgcagtagttgatgaagccgccggaagcgtagtacgggaagtccttctcgtagctgagcttctccatcggggtgggctgcaaccacaccgggtagtggaaggagttggtgtagaagtcgtggtcagtcacgccttcgatacggccgaacttttcacggtccatgcggttgaagcggtcggtcagggattcagccggagtggagtacacggaatagtggtagccctccgctttgctccactgcttgcacagctcgttcatgcgcttgacgatggacagcgcgaactccttgccttccggatcccagccgtggtcgcgaatccagttcttgccgtagaagaccgcggtggtctcggcaaggccgatgtagccgagcgacacggtggcacgctcgttcttgaacagctggtccacgttgtcgttggcaccaagacgaccaaacgcaccgaagcggaacagggtcggggcgttgaccggggtggcttccttgcaacgcatgatgcggaactggagggcctggtgggcgacttccatacgctcctcgaacagcttccagaagcgagccttgtcaccgtgggattcgatggcgatacgcggcacattgacggtgaccacgccgaggttcatacggccatcctcctcgtccttgccggtctccgggttgatccaaccctgcaggaaggagcggcaacccatcggagccttgaaggagcctgtgatcttgacgatgttctcgtagaacaccacatccgggtacatgcgcttggtggcggactcgagggcgagctgcttcaaatcgtagttcgggtcacccgggtcggcgttcacgccgtgctgcacagtaaagacgagcttcgggaagatggcggtgtggtgttccttgccgaggccgcgaatacggttcagcaggatcgcgcgctgcacctcgcgggagaaccagtcggtgccgagaccaaagccgacagtcacgaacggggtctggccgttggacacacggttggagttgatctggtattccatggtctgcatggcatcatagatggccttgcgggtacgaatcttggcgaggatttcacgctcctgctcaagttcgtcaacgtcggtgtggaacggggtgtccatcggcagcggttcgcgggaaccgaaatgcagcttggcgggctcgttcctcttggcgctctcgacctgacgacgggcgaattcaaccggcatgccgtcggggatggtctcacgagcttcctcgaggaacttctcgtaatccttcttggcatactgggcaagatgctcgtcggcacggttggcggtctggccaccatactggctggaggccacgtccttcatgatctgggtaatctgggtggccgcaatggcgatggacttcggg

SEQ ID NO: 906 - DNA, 71802 bp, Unknown
  R117_24m  MAG No. k141_2373
cctgagcctcgcgttcgccaccgccttggtcttgccttgggccgtgagccgccgcctgcgcccggtggccctgtcgggctctatgtctatcgcggcgtgccagattccatcggcgcttctgtatgtcgagccgccgccacccattgccatcgttggtctcccgtcgtgtgaaatgcgtagccacaacgggccacccagaggcatccacagttacctgtgcgaaatgaagaccgttgaaattaagccgtttctaagattcccgaatagttagccgataatgtacgttatgtcagattagttatccttgacgaggattcagtcgcctgtatcaactagtccacgcataccaggccgacagccaaaaggccgacagccaaaggagcaccggagcgaccaccgcaattgcaagaatcgccgtgcctttcagccaatccttgtcatttcgtttccagtggaatgctcgccaaatgaaccatatcagcatgggaatctcatacagcgacagcaacggcaaaccgatgaaaaccaggtcgaagcccgcggcgcaggctccatcgcatcccatcatgaagaagtcctcgccgttgtgtttcagtgcgtttggaaataacggtttacggcgtcttcgagctgctcaggttgctcaataatttcgtaggcaccgtgttcctccatctcaccggccggagcgtagccccagcggcagccgatggcgtccaaattgcaggcgtgggcgccgtcaatgtcggtgtagcggtcgccgatcatcacggccctgtcccccgctgcagcatcaaaaccgattttgtcgaagcagtaccgaatcacctgatctttgtccagacgggaattgtctttggaagcaccatagatgccgtccaacagttcggtcaggtggaaatggtcgcagataggcatgcactggtattcgggcttgcagctggccagtgccaggtagtaaccgtcggcatgcagtttgagcagctgttcacggatgcctgggaatacgacgttcaccagtcgtccgggcaccttgttgccgggctcgttcggatcgtcgaacacggcacggtctccgtagtagctgcggtagatgtccacggcccgatccagatcttccgcaggcacatgattgcgacgcagagattcaataatcgccggtccgatgaagcgtcgcagttcggcggcgtccggaaccggtcgaccgatctcttcgaaggtcttgatgacggagccgataatgccgccgtcggacttggtaagcgtgccgtcaagatccaacaggaccactttcatcggatgctgtgccattgagattccactcccccttgttcatgtcgactgctttgaatggtcgtcaaacaatgcgacttgttccaacaatgattatgcccagtcgggatgactgggcatcaagttcacgtgttgttcagtaggagatcactcgtagtcgggaatccaaccgtcacggtgcatttgcaggcgcttttcgagcagggtggccagttcctcttcgctacggcgttccagcagcatgtcccagtgggtgcgggtgggtttgctgatttcgtcgccctcacggtcggcgtcgccctcacggtgggccacggaaccacaacggcactcccactcgtccgggatttcggcaccctcggcaaacggcaggatggtgcggtggcccttcgggcatacatacgccacatcgtttcgcgcggcgaaatcgacgttgtcgtcggactccagcgatttcgctccgatgctcatgcccctgaggctacgttctgccatatcggcatcctccttgaaagatctttagccctactaatttacgcaaccgttcggacttggccgctattccaagcttccgacgtcggctgacaaactcccgtcaaacagccccgtcagtccacgccggagtaggccaccacgccacgattgacccggtcggccgcttcgtgggcgaggcctgccagccgctctcccccgtcgaacggcagcggctgggcgacagcaatctgctgcagcacgtcagccagtcgtttggcagtgcgcacgaagtcgccgccggtcatgtcggtgccgtacaggcacgatcccagcgaaccgccatccgcccattcatacatgatgtcgagaatgccgaaatccggccgctgcatctcgtccagaccgtgatcctcgcacaggatatcgatgtcttcacaaatgcccttgagcttggacgaagcgatggcaatgggcccggagatgccgcccgggtagtgcctcggttcgccgtctcccccgcgtctggcctcgtataccagtgaagagagcacagcggccagtccgttggcgtcgagcttgtcgaacgtgccggcgagcagcgcctcgcacagttccaggtcatgttcactgtagatgcggcgcagcagcagacctttttcagtcaacgtcatgtcaatgtggccggccgcattgacatgacgttcgaggtaaccaagcccggtgagaatatcgcagatgcaatcgaactggcgtgccacggacccggtgcgggagtcgtagcgatcggtgacgcgctgcagttctcgagtctcgcgggcccagcggtggccccatttgaggtgttgctggaggtccgggcagttgcggcatggatgctcgtgttccgccttgcgcaaatcgcgaatgcgctggtcgaggttctggaaagcgcgtgaacgctcctgatcggtcaggaacacttcgtgcttcagtttgcggcggccttccttttcgatgtcgctcagctccatacgcagggtcatgaactgtttgaagtcgccgtgttcgcatgcgaacgcctgttcgtatccggccagcgcgttcttcagtgtgttaatctgcgattccagctgccaggccgattcgttggcctcccactgggcaaacgactggtccagggtgacgcgcgcggtctcgtagtcgctggagttgagcaggttcacggccatgttgaacgtgggtcggaagctcgagtgcagcgggtagacacgtttggatgacagcgaggcggccgtggcgggcacaaaaccgtgatggtcgaccacgatggcgtggccgatggtgtcgatgccgcgccgaccggcacgaccggtgagctgcgtgaattcgccgggcgtcaggcccacatgaccggtaccgtcgaacttttcgagtttctctaccaccacgcagcgggccggcatattgatgcccaatgccagtgtttccgtggcgaacaccattttgaccagaccttcttcgaacaatcgttcgactatctgacggaacagggcaatcatgccggcatgatgcgaagcgaagccttcttccaatgcaaagcggaacttggagaactgcagggctttcaggtcttcctgagtgagttgcccctccaccatctcatccacgatgcggcgaatcctggtcacttcctcatcggtggtgagctccagtccagcgttgatacactgttccacggcctggtcacagccgttgcgcgagaagatgaagtagatgccgggcaacattcccaggaagttaagctcgtccaccacggcccagcggcgcggggtgtggcgttccgctttcggggcacggtctttggcgcctttgccgccgcggcctctgccgaagcccttgcgcttatcggggcgttcctcgccgcgccggcgtgcggccttgcggtccaactggtcgagccggttgatgagttcggcgttgagtttggtggtctgctcgccgttgccgtcgcggcgatagaggtccagcacctcgggctcggtgtgttcgtccgcctgcacgatgacgtgctgttccaaaggcacggggcggtgttcgctgatcaccagttttgtgtcgcctcgcaccgaggcaatccagttggagaaatcctccacgttggacacggtggcggacaggccgacgatcttgaccgtcttgggcaggtggatgatgacttcctcccacacgggcccgcggaatcggtcggccagatagtgcacttcgtcgagaatcacgtagcgcagtgcgttcagcgtggtggaacgctcgtagagcatgttgcgcagcacttcggtggtcatgaccacgatgtccgcctcggaattgatcgaggtgtcgccggtgagcaggcctaccttgtccgggccgtacacgtcgaccagatcatggtatttctgattgctcaacgccttgatcggtgtggtgtagaaggctttgacgttgcgttcctgggcgaggtaaatggcaaaatccgccactacggttttgccggcaccggttggggccgcgaccagtacgttgctgccggcttcgagcgcgtcattggcttcggtctggaagtcgtccagttcgaaaggcagggattcggcgaatcgcgctgctgcggacgcccgatagcgttggaccttttggaatgatgcgtaccgttgcgaagggctcagcgtctgggaatcggcattgcccttatggtgttggtgacgtgccattgctgctttccgttagttgttgaatcgcttccagcgggcccatgcctgggtgtggcgttcgcgcttggcggccttgctgcgaatcacgttcgcatgggcctcggcataacgattctgtgccacgctgagcggctgagtgaacagaggcggctcgctggtgtcggcagaggtgccgggctcccccatcgcggccacgcgttcaccgagttggccgccgatgtcggacatgtctttcaaggcacggagtccatgaagggctgcatagatgagtccggcaacaatcatggccagcatgaacagggccagaatcagccatatccaccaaggcatgaaaggctccttacttgttctcgctgatgctcagttcgcgttcggcgcgtgccacgatcatggtgcgcaacgtttccggggcgaccgccgtgatatgacgcgcgtgggcgatgcagaaggccacgaaccaggaatcggaggaaacggtcagatgcaccttttcaccggcaccgcattgttcgacggtagcgcccggcaatgtcttgatgaatgccagatcgcgctgatcggtgatgaacaccgcgtcggtaccgttgtcgaaactccacttgcgcagttcgctcaccggcatgttcgggatgttgatctgcttggtgggcttgaccagttccgccttttcgatacgggccaatcgcagtacctgccagatgcgcggcttgccgttggccttgtcgagggtcttgtctttggagacgtaggcctttttgtccttgggtgcggcggaaccaacgtccgtgtagacggcggcataatacacgccttcgtcaatgaagatcttggcgggggccaccagcttgcggcgggtacgacctgtaccgtcggtgtactccatgtccaacagcgaatcggtgttgatcgcacgcttgacgatggagaagcttcggggctccagctcatagccggtcaggctcagccacggggtctgaccgggactgacatgacggcgcaaacgctcatacagggattcggcctgcccacgctgcttgtccggcagcaacggcgaatgcgccaggtagctgaccgaggcggtgagcatgctgaggtattgcggcgaaatgccggcaagacgttcaaggcccagcgaattggtggcggaaacaataccctcggcatccagcagcggccagtcaatatcgaagaactggctgccggccatctcaccatcgtcggaaacggtggtcagggtgttgatgtccttatggatgatgttgacgaatttcttgagttcatcatcgttctttggcttgccgataaagcgttcgcccagctcgctcatcgagaattcctcacccagatgagcggagaggaacagcatcagacgcaggcgacgatcaacctcactgcccgtttggaaagcggagccgttcttcttgttctgagccttgatagactcgggatcacccggctctcgcacatcgcgactaatcgacggggaaaccaccgaagcgctcacaggactggcggattcgtcggccagagtgaaccggctggcggcgtgcaaacggcgatgataagcgtccacagcctcttgcgggctgacaatcgtggcccccggatgctcaagcacaaacatggccaaatcgtcggaatcggtgtatgccacgttcaggtgttcgccatccacgtcaacggtggcggcgaaacgacgcgaatcaataaccttgaccagtgaatccggaatgggctgcgtccccaagccaggcgcaatcgaatccaagccaagcccgggaatcggggtctgcggcacacgcggcgtagtgcgcgacacatgctgggtgagctgggactgatccggctcggaagaaatcgacatcgaacgagccagatagttggcggcggcaagcaccggcatatcttccggctcgaacatcaggcggatgcgcggttcgtcgcccaactgcagacgataggacgcgaagtcctggccttccgacttggacgagtactcaggctgccgtgattcgatggcaatgcccatcgcagcgagcttggcgcgatcacgctggaactgcttggcgaacgcggccttggcggcctgatctgccagctctccatacgagtcggcgtaagccttgacgcgctgcgcaatttggcgggatgtgagccattgcgggaacgcggatgacaacacagccagtacgtccagctcgtgcttgccccatttgtcggaaaaacgccgacgtccgcttgtgccctctgccattagtcctcacgtatagttattgtttcgttataagtgcgtatgagtttccccacactcactctatcttagaggctttttccacagttgagcgccatttcacaaaaataatatcttttttatcgttcgaccgtgttgtaaatcacacccaatcgtccggttcgatgccttgcgggccaacgtattcgccgttcggcacgtagctcggctcacccttatcttcaagtttggcgtcggcgaacatcatgacgtcacgtccgaatgtccagtcgccctgaatggaaaccgagttggctgcggccaaagatggcacggcgtaggggaaccgttcgtcgaaatcgcggatgttcttgtagtatcgcggatcaagttcgacgttcgggaagatgtaattgccgtcttccatctcatacgtgtccgtcaggtggaagcgatcggaacgcataatgaacaaatcattggtggttttcaccggaaggaagcgcatacgatccacttggacgcagatagaaccgttgaacagaccgattgcggcacccatggcggtttccagctgaatcacctgttcggagttcgggtccgtgggattcacggtctttttgttacgaatcaccggcaacggcaacacaccatcgcattcggcgagcttgtctttcaaagcgtcgatgcgaatccagatcgagttggtgttgaagtaaggatgcttggcgatgtcttgggccgcttccttatcatccggatggacctggctcatttcacgcagtatcaggcgaccagtggccttgtctcgcacgatatggcctcccttgcgatcggccttggtgcggatagccacttcggccatgaacggggcacctgtgttttcgaagtgctgggccaacgtacgcgaggggcgtgcaccgagattgtcggaattggagatgaacaggtacttgaagccgcgctcctccaatacgtcaagcaggccggactcccagatggtggagaacaggtcgccgtggccgggcgggcaccattccagctccgggttcatggggtagctcaccggttcgccggtggcggccacgagtttgggttcctgatgctggatgatttccatcggcacgtcatgctggctgaacttgcgatgatgcttgagcgccttcatcgtgtccgccgaagtgcggaaagaattcatgaacgtcagcggcagttcgacgttcaggcgggtgcgagcggtaagcacctgaccgatgatgatgtcgatgaagcgcatctgcttggccttgtgcctacgcaccggcaacagcgacttggccttgtccaatcccatggaggtgcccagaccgccattgagcttgaggaatgcggtcttggcgaaggcgtccacggccttgtcgtggttgatggtctcatagacgtcgtggaagctgggcacgtggccaagcggctcgatgtcgtcctcacgaatccagctggaggcttcttcatggcgccatacgtcatacaaatggcggaactggttgatggcggtttcgctcatgccgtgctcgcgcatcttggcggccgaaagctcgaaagtctcatccacttcgggggtgtttacggtttcttcggggatatccgaggtgacggcgtcggtgtcgtcagcggcggcgatatccagttgggccttatcgtttatttcggtcaattcgggtccctttcatcaaatcaataggaaccagtctagcccctgtttggggcaaacacatacgacggggggcggaagcggtgaattgtcggtgataattccaataacacgccaagatgaagtccgtgtttaatccattacgaatggcttacaaaggtaagtccgtcgtcatgttgtctcatgttgtctgaaaacggaaaagccccggaaagcaaccactcagaagcggcggaattccggggctaatcggtcgggccggcgggatttgaacccgcgaccccttgacccccagtcaagtgcgctaccaaactgcgctacggcccgatggtgcaaaagcaccgagtagataatctaccagatatatgaaatctggcaaattacgcgcgtgtcacttccgcttcttcttctcacggatgttcacggagatctgaatcggcgtgccttcgaagccgaattcctcgcgcagggagcgttcgatgtagcggcggtagccgtgctcgaggaagccggtggcgaagatcacgaaacgcggcgggcgcgtggacgcctgcgtggcgaagaggattcgcggctgcttgccaccacgcaacgggtgcgggtgggcggcctggatcttgccgaggaaggcgttgagcttgcctgtaggaatacgctgatcccaggattccaaggccttatccatggctcgcgtcagacggttggtgtgccagccggtcttggcggacaggttcacacgctcggcccacatcacacggtcgaattcggtgttccacaggcgttcgagacgctgcttgtcgaactcgtccatcgcatcccacttgttgaatacgagcacgattgcacggcccgcatccacggcggtggacatgaccttcaaatcctgatcggataccggctgcgaggcatcaaacagaatcagcgccaattcacagcgctcgatggcggcctgcgtgcgcagagaggaataatattccgcgcctgtgagcttgtgctggcgtcgcttgatgccggcggtgtcgatgaacagccagtcctcgccatcgatgttgacgatttcgtcgacggggtcgcgcgtggtgccggccaaatcgttgacgacggcacgttcttcgcgcgccagctgattgagcagagacgacttgcccacgttcgggcggcccaccagagccacgcggcgcaggccggaaggcgtgaggtagccggaagtcttctcggcctgcttgagcttgtcgagcgcgacgtccagcaggtcgcccactcccctgccgtgcatggcggaaatcgagtatggttcgccgaggccgagtttccagaattcggcggcaaggtattcgctggcctggtcgtcgatcttgttgacggccagcacgacaggcttgccggcggcacgcagcatcttgacgatgcgctcatcggtggtggtcatgcccacttgcccatcgaccacgaataccacggcatcggccaaggtcacggcaatctgtgcctgtgaggcgatggcggattcaatgccttccacgtcggcttcccagcctcctgtgtccaccagcttgaagtcggtgccggcccattccgcgtcatagctcacacggtctcgtgtaacgcccggcgtgtcttccacaacggcggcacggcggccgaggatacggttgaccagggatgatttgcccacgttcggacggcctacaacagccagcacgcccaccggcttgggaccggccttgcgcgtgccttccgtgaaaccacgaccggaaatcagatcctcatcgccttcgtccagctcatagccttcgagattggcggcatactgctcgtattcttggttctcgatggcgtcctcgaccacaccgatgagcagatcgagcgtgtgggcgaagtccagatcggaattgtcgatggtggtaacgccatcggcggcggtcaggaagctggtgaccttggaatcggccttgtcgcgcgcggccacatcctcagcgcccacgcccttgacagcctggccggtgcgacgggcctgacggacctcctcacgggcggtcagcagcacgcgcacctcggcgtccggggacaccacggtggtgatatcgcggccctcggccacgatgcccaaccccccggagaaggagtcggccgacgcctcgcgggcgatgtaggcgcgctgggcggcgatgagcacgttgcgcaccgggatgacgttcgacaccttggagacatggctggagacttcggaggaacgaatggcctcggagatgtcctcgtcgtcggcgaatacgcaggggttgtccgggtccacggagatatcgaaatggtcgccggtgaagaactcgcccaccgcttcggtgatgacacgctcatccacggtttcggcgtccagatcgatgccctgcttcaggcaccaccaagcgcaggcacgatacatcgcgcccgtgtcaaggtaggcgtatccgaaatacttggccagcgccttggacgtggacgacttgcccacgccggcggggccgtcgatggcaacgcgaatcacaggccaacctccttggacagcgaacggacttccgtctgggacagcacgcggtaggaaccgggcttcaaatcaccgagtttgatcgggccgatctgggtgcgcaccaagcgcttgaccgggaagccgattgagccgaagatacggcgcacgatgcggttcttgccggagtgcagcacgaccttgaccatcgtgtggtcgcgtgaggagtcgatgatcgcgcagtggtcgagcttgatccagccgtcgtcgagctgtacgccggtggtcacgagtcgacggcatacggtgccggagatcttgccttccagtgtggcgacgtaggtcttttcgacctcgtacttggggtgcatgacgtgctgcgagagttcgccgtcgttcgtcatgaggataagaccctcggaatcgtagtcgagacggcccatgtggaagatgcgctcgtacttgtcgcccacgatgtcgcgcaacgtgtagcggcccttcgggtcgtccatggcggagagcaccttgcggggcttgttcagtgccagagtgacgtggttcggattgacgcgtacgcgcgaaccgtctacgcgcacctgctgcttatgggggtcgacgcgagttccgagctcggtgaccagttcaccgtcgacctcgacacggccttcggtgatcatgtcctcgcacttgcggcgggaaccgaatcccgcttgggcaagcagcttctggagtcgaatggaattggaatcgtcttgcgctttcgcagcgcgggaatatgcgtttggcatcgttctcccaacgtggccggacagactctgtcatcgcagagactgtcgatttgtatacatacttcagagttggcggactggaatcccagccaattccaacctatatatcataccgcaacgtaggactgctgctagactggcaaccgtttgtacgggttcgcccgtcttccaacagatgaaaaggaatgaacaatcatggaagaaaccaagcaacagccgctggccctgcgcgtgtgcgccgaattggccggcagcttcctgctgtgctttgccatttacgccttctccacatggggttcggccgtgtatggcatcaatatcgtgttcttcgcgttggctaccggcttggcatatgccgcagtcaccgccatcttctcccgcgtgtccggtggccagctgaatccggccatcaccgtagcctccgtgctggtttccaagacgaaaatcctggatggcatcctctatgtgatcgctcaggtcatcggtgccatcgccgccggcttcgccgtggtcaagctgctgcccacatccgagcaggtagctgccaaagtgtggctgactccggccgttaacggtttcgagaacggctccgtgtcttactcgctgctgacccagtatggcattacgttctcgattacgctggcgattgtcgtcgaggtcgttgcctctctgattgtcgttgccaccgccatgtcttctctgggtgatcacggcgagtcctcggaccgtcatgtcattgccatgggtcttgcctatggtctggccgccgccatcagctacccggttaccggtgccggtctcaatcccgcccgttccaccggtatcgcactggccgcgatgaatgagggtcttacgcaaaatccgctgcaacagctgtgggtgttctggattagcccggtcttggccgccgctgtggtggcgttggtcatgatcatcgcgcagatgatgaccactcccaaagtgccggctgccgccgatcttccacagacggatgccgatgcgaacgcggacacgctcgacgatggcgaattcttcgatcaggccgcctcgtctgatggcgattcagcggaaaaagatgttgccgaagagtccaaagaagctgaagtaggtaatcagcaggccgattcccaaggcgatgccgatgaaggagtcgaacgccactgagcgcactttccatgggcttttgtcctgaagaatcaggcgaacaagcccggtgatgatggccgtcacggcaagtatgaccgtggcggccatcgtatatccgaaagcaaccagcagtgtgatgacggcgacgacgccgagtacgcaccattcaaaccatggcttgccctcatgcgcttcggatacatagggatggttgtgcatgttgcgattccttctgtcgaacggttacgtgaccacaatagcaggcgaatagcaaaggtgggattccgcttggacccgttgacgggtcaggcggaatcccacctttgtgcgttttggctgagctgctcccctcagagagtcccgatcagtggaagaagtggcgggtgccggtgaggtacatggtcacgccggccttcttggccgcttcgatgacctcctcatcgcggatggatccgccgggctgcacgatggccttgacgcccgcgtcgataagcacctgggcaccatcggcgaacgggaagaacgcatcggatgccgcgaccgcaccggtggcgcgatcggcaccatcggccagcgtgttggcgcgctcgacggccaaatggcaggagtccacgcggttgacttggcccatgccgatgccgaccgtggcctggtcgtgggccagcaggatggcgttggacttcacgcagcggattgcacgccatgcgaacacgaggtccttcagcgtgtcggcgtcggcggcctcgccggccacgagcttccaggcgtccggatcgtcgccgacggcgttgatcagatcggtgtcctgcacaagcaggccgccatcgatctggcggatggcctcgtggcccttcggtggctcggccaccttgaggatgcgcaggttcttcttcttggtctgcagcagttcgagcgcggccggctcatagtcgggggcgacgatgacttcggtgaaaatcgggcgcacgctttcggccatctcaagagtgaccttggagttgcaggcgatcacaccgccgtaggcgctcatcgggtcgcaggcgtgagccttcttgtgggcctcggccgcggtcgcgccgatggccagaccgcacggattgttgtgcttgactacggccacggcaatggcgggagccatatcccatacggtgcgccaggcggcgtccgcgtccacgtagttgttgtagctcatcggcttgccgccgagctgctcggcgtgggcgaaaccggtctggttgagcgggtcaatgtagagggcggcctgctggtgggagttctcaccgtagcgcagggtgtgcgcacgatcccaggtgcgggtgaactgggccgggaacttggcggaatcgacttcagtgccctgatcgtccttgtccacctcgacggcgtccagagaggccggcttgggccagtgcttggcggtccactcgttgatggtggcgtcatagacggcggtgtgcgcgaaggccttggctgcaagccacttgcgctcgtccagagagaagccggtgccatcggccacgcgggaggcgaccagtgcataatcggccgggtcggtgacgatggccacggtggcgtggttcttggccgcgccgcgcaccatggaggggccgccgatgtcgatcttctcgatggtatcggcctcgttggcgccggagcgcacggtgtcggcgaacgggtacaggttgacgaccaccaagtcgaacggcttgatgccgaactcctcgagctgcttggcatgctcggggttggtcatatcagccagaatgccggcgtgaatgtacggatgcagcgtcttgacgcggccgtcgaggcattcggggaatccggtgacatcggacacctcggttaccttgacgcccagctcggcgagcttcctggcggtcgaaccggtggaaacgacttcggtgccggccttcacgaacgcttccgcgagtacttcgatgccttccttatgaaagaccgagaccagtgcccgacggatcggtcggttcgtgtttgtcatcctgttcctccttggattcttgtggttgtgacgccagggaccgcgcctgacggacgatgacggtcttcggggtcgcggcggtggtgcgggaatcattgatcctcccaaccaaccagcctatcgaaaaaacgagcactgtgccaatcagcgcgagcagccatgccgcggtaaatcccaatgcggtcgaatgaccgacgactctggtggaggccatgacgtcgacgccaatgtgagcgagacgatgatcgccaagcgatccattggacagagcgaacagcaatgtggatgccagtgagatcagcatcgcgctcaggcagaatgacccggcggagtagatcagcgaaaccagtactgggccgcgggtggacgcattccgtatattcaacggtctgcaggcgaatccttgcggcaggaatacagccagcaggcccacgagcgcagcgatggcgagaggcgcgttcaaggcaacggtacgccatagttcgctgctgaccggttcgggcagaataccgaatgccggtattgcaggaagctctttggattggccgagccataacgtgaaactggccaaatcaccgatggcgaatccgccgccgaagagccaggaaacagcccagagcatgacgttgggtagccagatcagcatggcgagggtggtgagaattcgtgaaccggtttccatcccggacaattcgaacaacgatacgacagcggcatggttacgtaccgaccatacgatgacggtaatcaatccaattgccaggtatatgcccagtatcgcgacggccaagacgacgccgattttcaggcagtggcgtatgtccgccggcacctgcttgcgagtccagtccctgaatgctcgcatcttggctgattccggtacggctgcgcataggaaaccgatcgagaatacgatggctgctttcagcaacaccagccactggtcatcgacaagacctaggtgtacggattgccggaatgcctcgttcaacccgagccaaacaatcaatccggcaacatacgcatgcggcccgtatgctttgattcgcatggtgagtgcattgatcagccatatcagcagtatggtcaacatcaatggcgtgatggtgagggtgaacgaatcggttctagagcccgatccctcactcagaagcacaacggcctgtgtcagcgaggttgtgccgacggtgagattgtcgccgccctcttccatggagacaaccaataacatcagcgctgtatagcaacctaatgcaacggcatagatggccatggatgcgagggcgactatggctccccgcacccattggcgaatcacggctttcatcacgattggttggaaccgatcagtcgatgttggccttggcgagtatgtcgcgcatgatttcagcggcctggcccggggtcttgcccacggggatacccgccgcttcgagcgcgttcttcttgtcctgggcggtgcccttgcctccggagacgatggcgccggcgtggcccatctgcttgccttcgggggcggtgaaaccggcgatgtaggcgacaaccggcttggtcatgtgctccttggcccatgcggcggcgtcctgttcggcgaagccgccgatctcgccgatcatcatgacagccttggtgtcggggtcggcttcgaatgcctgcagggcttccagcagcgtcgtgccgacgatcggatcgccgccggcgccgagacatgcggtgaagccgatatcggacagttcgcccatgagctggtaggtgagggtgccggatttggagaccagtccgagcgggccgcggccgacgatgccgtcggggatgatgcccaagttgacgccagggttgccgagcgtgatgaaaccggggcagttcggtccgatgatgcgcacgcccttcttgagcgccagttcgacgaagtatgcggaatcggccaccggaatgccttcagtgatgaccacgatgagttcgatgccggcttcgacggcttcgaccacggcggacttggcgaacttcggcggcacgaacaccacgctggccttggcgccggtggcttcacgtgcttcaccgcaggtggcgaacacggggatgtccacgtcggcaccgttcttggcaccggggaaggtgacggatgtgccggccttgcgcgggttcacgccgccgacgatattggtgccggccttgagcatgcgagccgtgtgggtcatgccctgatggccggtcatgccctggacgataacgggagcgccgtcttcgatgaacagcatcagcgaacctccttggactgggtcgcctcaccggcgagctgcgcggccttggctgccgcgccttccatggtttcggacacatggatattcggattgttggcggaagcgaggatatgcagaccctcggcggcggcgttgccatcgaaacgcacgacgatcggcttggaaccgccgagcttggcgaccgcttcgaggatgccgttggcgacttccacgcaggaggtgatgccgccatagacattgatgaacacggattcgacctgagggtcggacagtacgatctccaggctttcggccatgacggctgcggaggcgccgccgccgatgtccaggaagttggcgggcttgatgttggtgccctgttcctcgccagcgccggagacggcatccagggaactcatgacgagtcctgcgccgttgccgatcacaccgacctcgccgtgcaggtgcacgtagtgcaggccgtgttcgcgggcgcgctgttcgaaggggtcgggaacgatgagatccacgaaacgcgcccagccatcatggcggaaggaggcgttgtcatccaaggagatcttggcgtccaaggcgctcagctgcttggtggattcgtcatccgggtcgccgatcttggcgagcggattgatttccacgagcgtggcatcgttgtctttgaagcagcgccacatcttgagcagaatctgcgcggcctgatcgacgtccgcgtggtagaagccgatgctctgtgccatttcggtggcagcggccaggtcgaagtcgccgagcgcatcgatgtgcaggcgcttgacggcctccggatgttccttggcgatttcctcgacttcggtgccgccgttggcggtggccagcacgtcgaagtcgcgcgaggtgcggtccacggagatggacacgtaatattcgtgcaggatgttcttggcttcggccacaagcacgccggaaaccttgtgcccgtggatggtcatcggcaggatggactcggattcaagaatcgcctcgtcgcggttatgggcgatcttgacgccgccggcctgaccacgatgaccgatcttgacctgcgccttgattacgcagggatagccgattttgtccgccgcttcggcgacttcatgggagttctgggcaaagatggcgtccggggtgggaatgtcctgttcctcgagcagctgacgcgcctggtattcgtaaagatccatcgatccttccctgactatgtaattggtccggcatataactgtacacagtacatgccggaccttgaaaactaactgtacgttgggtgagacggaatctcaggccggcatcgcgatcagcgagctgctgggcttgccgccgagcttatccagaccgtcgagaccatcgagccgcatcacaaaactgaagcccaccacagtgccgcccgccttttcgataaggtcggcgccggctttggcggtgccgcctgtggcgatgagatcatcgacaatgagcactcgctcccccgcctgtacggcgtcggtttcgatttcgacgctggccgtgccgtattcgaggtcataggattcaccgatggtttcgggcggcaatttaccggccttgcgcacggcgatgaaacccttgcccagatgggcggccatggccgggccgaacaggaacccgcgcgattcgagaccggcaatggagtcgaattcgctcggggacaccggcagagccgtttcaagcgccttgagcagaatcttcaagcccttggggtcggcgagcactggcatgaaatcacggaagataatgccttccttgggaaaccccggtatggaacgcaccaaggacaccagatattcggcgtcctgttgccctaccttgctcaatgcgtcgatggtgatgtccgactgtgccatagtgctcgccccttttatgcctttgcgatgcgatactcggatggtgctaccgaatcgaacagcttacttcgtcttggtttcgttgtcgtcaccggtctcgtcagcggtgtcttcctcggacacgacggacgcctcgatcggaacctgaccagcctcatcgttagccggagcctcggtgtcttcgtcgggcagcgggttgccgttctcgtcgacctcatcatcggacacataggccgggcgggtgtactcacgggcgatggcgttgaagccgaaacgcagcttggagccttcggagtcgatgacgatctcctcatactgctcgtcgacttcgacgaccttgccgatcacctggccgatggtgatgacctcggtgccgggctgcaggttgcgacggaagtcctgcttctcctgctgttgctgcttggccttcttggactgccaccacatcatgccgccgaacacgacgacgatcacgatgagcataatgtactgttgttccacgaaacaactccttcaaacgagcgacattgacgaaacgccgccaagtgtgcaaacaggagaaagtctagaagagcttgctgacatcatctttgggcgtaattcccaaatgctgccatgccttctcggtagccacgcggcctttgggcgtgcgaatcataaaaccttcgcgcacaagatacggctcgcacacggtttccacggtttccgattcctcgcccaccatggccgccagattgttcaggcccacgggtccaccgttgaagttgcgcacgatggcattgagcacggcgatgtccagccggtcgaggccttcggagtcgatctggtacagggccagcgcctccttgacgtcgtccggccgtaccacgatcaggtcgtggacgatggcccagtcgcgtacacggcgtagcaatcggttggcgatacgcggcgtgccgcgcgaacgcaacgcaagctcatgagcggaacccgcatcaaggtttacgcccagtacgttggacgaacgttcgatgagcttttccaactcctcatgcggatagaagtcgagatgtgcggtgaagccaaagcgtgcgcgcaacgggcttggcagcataccttcgcgcgtggtggcaccgatgacggtgaatcgcggcagggtcagcgggatggagcttgcgcccgggcctttgccgaccatcacatcgacgcggaagtcctccatcgcgatatacagcagctcttcggcggcgcgcggcagacgatggatctcgtcgatgaacagcacttcgccgacgtcgagggagctcagaatcgaagcaagatcaccggcatgttgaaccgcagggccggaagtcacgcgaatcggcacttcaagctcattggcaacgatcatggccaacgtggttttgcccaagccaggagggccggcaagcagaatatggtccggtggcacatcgcgtttgcgggccgcgtccaggaacagttgcagctgggccttgagccgtggctgtccgataaagccttcgagaacatgggggcgcagctcctcgtcgctgaccggctcgttgccgatcggctgggaggagaccatgcgcaacgactcttcgttggcaccggtgtttgaggtaccgtaatccgttgtctcgctcatcagcggcccctatccatcagcgccaaagccagacgtagcacacgcggcacatcgtcggtggcaagcggcgtgggaatatcgttttcggcgcaagcctcggcaacggcctgctgggcgtcctgctgacgccagccaagtgaaatcagtccttcgacaacctgttccgtaccggtatccaccggagacttggatattgccgcctgagcggaagcaccctcgatctgactcaaatcaatagagcccttaagctcgaggatgattttctgtgcgcccttcttgcccagccccggagccttggccagcgcggtggcgtcgttgtcggcgatggcgtgggccagctgactcggcgtcagtgtggagagtaacgattgggccactttaggtccaatgccggagaccttgatgagttgcagaaaggttttcttggcgtcccgatccaggaatccatgcagggtaatggcatcctgagagaggttcatataggtgaagacgcgggtgtcttgcccggcgtgcagacggctcaggtcggtggcggacatgcgcacttcgtagcccactcccccaacatcaatcaatgcggtatcggtttcgaccgattcaacccgcccggtcagcatgccgatcatacaggtactccttcagggctccaggattcaagactcgaacaactgttcgaaagtatactacatgcctcggtcgtggttgatgcggcggcgcgtggatttctgtgcggcctcagcccactggcgttgcgcggcggtcagatgttgttcgcgttcgccgccctgcaatgcgcctgccgggcgcagcgcatggcaaatggccaaagccaaggcatcggcggcatcggcgggagtcggcattttggtgaggttcaaaatacgtgtcaccatacgctccacctgaatcttctgcgcctgcccgttaccggtgatagccagcttggcttcggtaggcgtatgcaacgccacgggaatattgcgttgcgcggcggcgagcatggcgaggccggcggcctgtgcggtaccgagtacggtgttgcggttggattgtgcgaacactcgttcgatggatacggcatcgggtgcgaagcgatccattttctcggacaggccgttgtagatggccagtagacgcagatcctgggtgatatccggtgaggaccgcaccacgtccacgtgaataaacgaaagccggcggtgctcgccggcttcgatcacgccgaccccgcaacgtgtgagcccggggtcgacgccaaggataatcacgaggattactcctcgtcgagctgggccatcacctcgtcggaagcggtccagttggagtagatgttctgcacatcgtcgaggtcatcgaggttgtcgatgagcttggacaccttgcgggcatcgtcgaggctcaactcgacctcgttcttcggctgcatgacctggtcggcggaatcgtagtcgaagccggcgtcctgcagagccttgcgcacggtgaacaggtcggacggaccggtcacaacggtgaacacctcaccgtcatcggtaacgtcctcggcaccggcttcggcggcggtttcgaacagcttgtcgaagtccacgccctcggacggcaccacgatctggcccttgcgctcgaagttgaaggacacggagccggaggtggccagggagccgttgcccttggtcagggtggaacggacttcggcggccgcacggttgcggttgtcggtaaggcattcgatgatgaggccaacgccggcaggagcgtagccctcgtagacgatgtcttcgtagttggcggcgccgtcttcagcaccggcaccacgcttgacggcacgagcgatgttgtcggccggcatggaggccttcttggccttgtagatggcatcgtacagggacgggttgccgtccgggtcaccaccgccgaggcgggcggcgatttcgatgttcttgatgagcttggcgaagagcttaccgcgcttggcgtcgatggcggccttcttgtgcttggtggtcgcccacttggaatgacctgacataatgctcctagcaattattgaaacggatgatgtcaaacgaaacgattgtaggccgttaatcagacatacccgtgatgtttccgatgattgtcttgttatgcgtaccgataagaccggtcacgcggggtgccgcacctgtgttaggcaagcggcagatgatactgcggagccagctgttcgaatgcctgggcataggcttctcgctggtcggacagcagaataggcatggtgcgtgtctgggcgacgatgggcatgaagttcgcgtcaccattccagcgaggcactacatgctgatggaggtgagcggcgactcctgcgcctgctacttcgccctgattaatgccgatattgtaaccgtgcggacgggagacggtttccatcaccttcatggcgagggtggtggccttctcgaattcgaacagttcggcatcgtcgagttcggtgatgaatccgacgtgacggtacgggcagatcatgagatgcccgacattgtatgggtagaggttcatgatggcgaacacgtgcgtgccacgccaggcgatgaggccgtcttcgtcggatttcttgggtccggcgcagaacgggcattccttcgtcttgggcttggttgggcgatcctcgctgttgcgcagcacataggtcatgcgctgcggagtccacagtcgttcgaccgtgtcctcctgaggcggaaagtccgccggattatcgacacgcacgtcagtcattttcgcaccctttcttggctcccctctctgaggggagccagtaccattcacatcactcagccacagcggcgttgaagtcgtcggcggagttcacctggacgcgcttcttgatgacggtgaggatctgctcgcgggccttgtccaccggaacgccgttgagctggctgccgtcacggaagcggaagctgaccgcgttgttgttcatgtcttcctcaccgacgatgaggatgaacggcaccttggacttggaggcgttgcgaatcttcttgccgaagcgatcgtcggagtagtcgatctcgcaacggaccatctcgtcctcaagggacttgacgaaaccggccagatgcggggcgaactcgtcggcaaccggcacgccgagcacctgcacgggggccagccacgccgggaaggcgcctgcgtagtgctcgagcagcacggcgaagaagcgttcgatggagccgaacagggcgcggtgaatcatcaccggacgctggtgggtaccgtcctgcgcgatgtactcgagctggaaacgctcgggcaggttgaagtcgagctggatggtcgagacctgccaggtgcggccgatggcgtcgcgggcctgcacggagatcttcgggccgtagaaggcggcgccgcacggatcgtcgacgagctcgaggttggattccttggcgacctcggcgagcgtgttggtggcctcctcccagatctcgtcggagccgacgtacttgttcgggtccttggtggacagctcgaggtagaagtcggtcaggccaaagtccttgagcaggttcagcacgaaggtcagcaggctggtgagctcgtctttcatctgctcgcgggtgcagtagatgtgggagtcgtcctgggtgaggccgcgcacgcgggtcaggccgtggacctcgccggacttctcatagcggtacacggtgccgaactcgaagaggcgcagcggcagctcgcggtaggagcgctgacgggacttgaagatcaggttgtgcatcgggcagttcatcggcttcaggtagtagtcggcgcccggcttggtgatgttgccgtccgcgtccttctcctcgtcgaggtgcatgggcgggtacatgccgtccttgtaccagtgcaggtggccggaggtctcgtacaggccgcccttggtgatgtgcggggtctgcacgaagctgtagtggtgcttgcggtgcatctcacgggagtagtcctccatcgcgttgatcacggcggcgcccttcgggtggaacacggccaggccggggccaatttcatccgggaaggagaacaggtccatctcggcgccgagcttgcggtgatcgcgcttggcggcctcctcgagacgggtctggtaggccttgaggtcttccttggtggcccacgcggtgccgtagatgcgctgcatggtcgggttcttctcggaaccacgccagtaggcggcggcggaacgctcgatcttgaaggccttgatgtagcgggtgttcggcaggtgcggaccgcggcacaggtccttccaaaccacattgccatcacggtctacgttgtcgtagaagctgagctccttttcggagatctcggtggcggcggccgggtcgaggtgtgcttccttgtcttcgatcagttcgatcttaaagggctggtcggcctcttccttcagagcctcttcctcagtcacggaacggcggcggaaggactgggaggatttgatgatgcgctgcatgcgcttctcgatgtccttgaggtcgtccggggtgaagggctggtcgacctggaagtcgtagtagaagccgtccttgatgacggggccgacgccgagcttggcgttcgggtagacttcctgcacggcctgggccatgacgtgggtggccgagtgacgcatgattgcgaggccgtcttcggagtcgagggcgatggggtcgacggtatcgccctcgttcagcggcgtgtacaggtcacggttctcgccgttgatcttgaccgcgatgatgttcttgtcttccgcgaacagttctacgccggtggtggttgcttccacctccttcgcttcgccgttgacggttatggagatggtagcttgcgccatgatttgtcctttgctatcggggcccacggtactaatgtgcaggcctggactggttaatcaacgtaggacacgataggttgggcgtgcgacaaataccaccagcatctgaaccaatacgaaaaaacctcgccgaagcgaggtttcgttgtggagcggacaacgggactcgaacccgcggtctcaaccttggcaaggttgcgctttaccaactaagctatgtccgcaaaggaatccgccgtgagaagcggaatccagtgggcgatgtaggaatcgaacctacgaccccttcggtgtgaacgaagtgcgctagccgctgcgccaatcgcccgaatactcggttcttcagttatatccagtcgaattgcttcgactttcgtgggcgatacaagattcgaacttgtgaccccttccgtgtcagggaagtgcgctaccactgcgccaaccgcccgggtcatatttcatcccattgaattgcttcgctggtctgagaggtgggtacgagagtcgaactcgtctatacggctttgcaggccgctgcctaaccgcttggctaacccaccgtaaggtctgtcaactcacggacctagagcggacaacgggactcgaacccgcggtctcaaccttggcaaggttgcgctttaccaactaagctatgtccgcgtgtgtttccttggcgaggtctccctgccgaagcacgagtgtttactatactcacatgcgtctagttcgtccagctgcggcgtgtcgcctgtaattgcatactctcgcttatggctaaagcgtgcgcttcgggcaatgaattccagttactctagaggtatgagtgaagcagcgaaggacaccggcgcagtattgatcgccgcattcgagggatggaatgatgcctgtcaggcggcgacgaacgcggtgcgccatctggtcaagcgatatgagtcccgcgagattcgtcatattagatgtgatgatttctatgactatcaggttgcccgtcctatgctgtgccatgttgcgggacgcaccaatcttatctggccgcagaccacgttctacgacatcacgttggacgcaggcaagcatatctatgcgcagatcgcccccgaaccgaactatcggtggaaggaatactgtagccagagtctggccattgccgatgagctggatgtcaatcggatcattacgttaggttcgatgttctccgattgcccgcatacccgtccgttgcccatcgccgtcagcgacggagactgtcaatgcgaaggagaccggtcgtataacggcccggtaggcattcctaccgttttggatgtggccgccgcgcagcaaggttttgctcattcctcgatgtgggtgtccatcccccaatatttgggcagcgacgaatgctctgccggcactatgcgattgctggatgcgttgggcaagcatatcggcttcaccttcgatacggcagatctgaagcagaaagccgaacagtggaaggcgcaagcctcgatactggttcgttgtaatgaccagcttcacgattacgtggagcatttggagcacgactacgacttgcagcagaaagccgaggcggaggcttccttgggagcgccccaggccgaacaactagtcaaagaagcagaagcgtttctgcgccagatgggcaattagcccatatatggcgtgctcccgctggatgaacagccctgtggacaattcatagcagtgcaccatgtgcacgtcgcacaaaatgtcgggagctggctcgcgtagcgagactgagggtggttctgctggcatattccagtgaccacccccagtcagcttcgctgacggctcccgccagcgggagcaccattatattggagtcgtctatcgacccgtcttatgccgcagccgccacggagggatcgatggccggcagcacgcccacaatcagcagcaaggcgacgaccacagccaaaccgatgcggtagatggcgaaggccttataggagaagttcgatacgaacttcaggaatccgatgatcacgatgtagccgagtacgaagctgatgaccatggctacgagggtcggcccccagccggggaacatcgcatcggttttgtagttcttcacggccttgatggcttcgagcaaacctgagccgaacaccgcggggatggccatcaggaagctcagacgtacagcggcctcacgcgtgtagcccagtgcgcgaccgacggtgatggtgccgccggagcgggacacaccaggaatcagcgccatggactggcccaaaccgaagaggaacgcatcacgatacgtcatatcattcatggttttgttctggcgagccttggcatccaccatccacagcagaatgccgaataccaacagcacggttaccgtaatccacaggttgcgcaacgaggtctcgatgacgttctgcagagtgaagccgaggatgataatcggaatcgagccgacgataatgttccagccgagtgtggcgtaattgtcgccgcggcccatgcgggccttccaatccttgccgttcttgccgaacaggcagctgaaccagtgagtaaggatattgatgatgtcgtgacggaaatacagaatcaccgcaagttcggtgccgatttggatgatggcggtaaacgccgcaccgggatcagagcccagcatcaaatcgccgaaaatacggatatgcgcgctggaggataccgggagatactcggtcagcgcctgaacgatgccgagaatgatcgcttggaaaaaattcataacccctcgtgatttctaagtatttgatgtgttatgacgatgaacaccctacccaagggggtgtagaacaacactaagaatcggtaacatccacggcttctacaatgaaagtggatatagtacgtaagcgacgaagggagcattatggccacgtatcgcaaaagcagggcattcgcaccggaaggattcttcgaatgcgagggtcgaggactcgaatggttgggagcggctcatgcgcagggcggcccgcgcgtggtgcaggtatacggctggggcaaggattatctggatatcgaacgtgtgggcagcgcgtcccccacgcctcaggcggcacgagcttttggtgcggctctggcccatatgcatgatgtgggtgccgaatatttcgggtctgcgcctgacggatataacggcacatgctatttcgggccattgcaggacccagtgaaaatggataccggcgagtggaccgacccgatcagctatttcgctgatggacgtctgcgcccgatggtcaaccttggtgtgaggcgtggcgagctggataagcgcgatgtcgaactgaccgagcgcgtgattgaagcgttgccggatctgatgggccgagccgcgtccgacaagccggcgcgcatccacggtgatctgtggagcggcaatgtgatgtggaccgccgattccgggcagcccgaggctgtgctcatcgacccggcggcacatggcggtcatcgcgaggaggatctggctatgctgcacctgttcggcatgagctatctgagcgaaatcaccgagggctaccagtccgtgcatccgttgaaggccggatggcgggagcgtatcacgctctggcagctctaccccatcgccggccactgtgtcttcttcggcggcggctacgtcaacgaataccgctccatgtgccgctccctgctgaagtaacagacttggctcccctctctgaggggagccaagaacgcatccactctcagctcagtgcgtccttcaacttgctgaagaagcctttcttttggccagcctgtggacgggatgcctgggagacgtgcgtggcgcctgaatcatgcgaggcggcgaactgttcgatgaggccgcgctcggtttcgttgagcttggtgggaatcagcacattgacgtgggcgatgaggttgccgcgctcgtccttgttgcggatgttcgtgacgcccagtcccttaagcgtcacagtgtcctcaggctggcagccggccgggatggacacggtcttctcaccatcgaacgtgtcaatggacagatcgtggccgagcacggcccagctcatcggcacctgaatccagcagtgcaggtcgtcgccatcgcgggtgaactgcttatccgccttgatgcgaatgtcgatgtacaggtcgccggcagcgccgccgccctcacccacttcgccctggttggccaaacgtagacgcgcgttgtcgttgatgccggcgggcacggtgacgcccacggtacgtgtggtacgcacacggccgtggcccatgcagctggggcacgggttcttgatgatggtaccgtggccctcgcaacgttcgcagggggcggaggtcatcatctggccgagcatggtgcgcacgaccttctgcatgaatccctggccgtggcagtcggggcaggtgaccggctgtgcgccgccctgggcgccggagccgccgcactcctggcacagggagaacgtgctgatcttgacgtgcgcggtgccgccgaacacggcggtcttcaggtcgatggacgcggaggccagggcgtcgcggccgggctgggtacgcggcaccgggccctgtgagccaccaccgaacgcggaaccgaagaacgtggagaacacgtcgctcatatcgccgaagcccgccccggagaagccgccggcaccggcgttcggatcgttcgggtcgacgcccgaatcatacatacggcgcttgtccggattggacagcacatcgtaggcgttgttcacttccttgaacttgtcctcgaattcagggcccgcgatgtcggggtggtacttacggctgagcttgcggtatgccttcttgatctcgtcgtcactggcgccgcgttccacacccagcgtctcgtaataatctgccacttgattgatcctttgtgttcgtttggtctgcgggtcattgtgccacagacggcggtcagtcttgggtccggccctcggagaggaaggcggtcaaatatctggctacggccctgacggcggccatagtggccgcatagtccatgtgggtcggccctatggagccgacgaaggcgatgggttccgtgtcgttcgtctggctctccgtctcggattcggtttcgggttcgcctacgggatcgttccccgccggttcgcccgccgcaccgctgcgcccatagccactgctgaccacggaggcatgcagtaggccgggggtgtgcatttcggagccgatggccacgcccacgccggatgcattcgtctcctcgctcaggttgctcatgagcttcatcagcacgacctgttcttccagcgcgtcgaagagcggggccagatcggccagggaccgggagtgggccaggtgcgaggtgccggacatgtacagttcgtccgcgcgttcgtccaatgccatcgattcgaaggcgtcggccagcgcgtcggccacgccgcgcaccgactcgtagccggcgctggcggcgatggatcgcacggtctccgcggatttcgatagggacagtccgacacattgttcgttgacggtgttggagagccggttgatctcgtccacggcgggcatggatgcgatggtcaggccgtgctgggccacgcggccggtgtcggtaatcaccaccgcgagcaacgtggtcatggcaacgggcaccatctccacgtgccgcaatgtggccttggccagcgatggcgaggtgactatggccacttgaccggtgatttcggacaacagtcgtgccgaacgctgcagcgcgtccttgagactcaccgatccggacaggaagctgttgatgccgcggcgctgcgcctcgctgagcggcaccacggtagcaagtcggtccacaaagtatcgatagcccttttcggtgggcacacgaccggccgaagtgtgcggctgaatcagatatccttcatcctccagagcggacatgtcgttacggatggtggccgaactgacgccgagatcatggtcgcgcgtcagcgaagtggagcccacgggctcctgagaacggatgtaatcctccaccacggcgcgcagcaccagcatgcgtcttgattgcgtcatgcgcgcctcctcatatatgcatacatattcatatcagtcacggttcactcagggcgtaccccgacggtcggttcgccacgccgcgacacgcgggaacccagaaatattgcctctttcttggctccgccacgtgcaggtggcgcacttcaccttagaacattgtattagcactccttaggcttgagtgctaatgcgttcgtttgcagcgtagcaatgttcactgtgaacgctaacagaacacaaactaccaaaacacgccaaaattgcaccgcaacgtcgcaaaccgacgctagcatggtaatcgcaatgtgagggcgtcaagcgcccggcacaagccggatacgcggcccgaccaattggaaggaaagtaatccatgaccgaattcaaggagaccgagctcgacgagcgcgccatcaagatggcgaaggtcctttcggctgacgcggttgagaaggcaggctccggccaccccggctcccccgtctccctggcgcccgtcgcctacacgctgtaccagcacttcatcaagcacgatccgaatgatcccaactgggaaggccgcgatcgcttcatcctttccggtggccatgcctccctcacccagtacgtccagctgtacttctccggctacggcgtgaccctggacgaccttaagaacttccgtggcggcgctgccacccgcaccccgggccacccggagtacggcctgaccccgggcatcgaaatgaccaccggccctctgggccagggcttcgcctccgccatcggctttgcctacggcgagcgtttccagcgcggtctgcttgacccggagaccccgaaggaagattccccgttctaccacaagatttgggccatctgtggtgaaggcgacatcgaggagggcatctccggcgaggccgcttccctggccgccaaccagaagctcggcaacctgaccgtgatcttcgacgccaaccgcatccagatcgaaggcgacaccaacctggtgctggccgaggacgtgctcaagcgcttccaggcctacggctggtacaccgacgagttcagcttcatccagcccgacggctcctacaaggaggacatcgagggtctggccgacgtcatcgccaaggccgaagccgccgccccggaccagccgaagctcatcaaggtccactccctgatcgcctggccgaccccgggcaagaccaacgacccgtcctcccacggctccaagctgggcgccgaggccgtcgccggcctcaagaaactcctcggctacgatccggaggagtccttccacgtcgacgaagaagccctggcccacgcccgcaaggtcgccgatcgcggcctggaggcccacaaggcctgggacgagaagttcgacgcctggcgcaaggccaacccggacaaggccgccctgtacgaccgtctgaaggccggcgaactgccggaaggcttcgacaaggcccttgacgaccttgaggccaccttcgaagtcggcaagggtgtcgccactcgtggcgcctccggctccgtgctcaacgccatcgccgccgtcatgccggaactctggggcggctccgccgacctcggtggctccaacaagaccgacctcaagggcgctgccaccttcgccccggccgagtgcgccaccaagcagtggccgaactgcaacgagttcggtcgccagctgcacttcggcgtgcgcgagttcaccatgggctgcatcaccaacggcatcctgctgggttcccacacccgtccgttcggcggcaccttcttcatgttctccgactacgagcgttccgccgttcgtctggccgccctcatgcagatcccgaacctgtacatctggtcccacgactccgtcgccgtcggcgaggacggcccgacccaccagccggttgagcaccttgcttccttccgcgcgattcctcagcttgaggtcattcgcccggccgacgccttcgagaccgccgaggcttaccgttacttcttcgagaagaagaacaccctgcctggcgccatggttctgacccgtcagggtgtcccggttcttgccgagaccgctgccaaggccaaggacggtgtcaagaagggcgcttacatcctggtcgacaccgagggtactccggacgtcatcctcatggcttccggttccgaggtccagtgggctgtggctgccgccaagaccctggccggcgagggcgtcaaggctcgcgtcgtgtccgtgccgtccatggaatggttcgaggagcaggacgccgagtacaaggaggctgtgcttccggccgctgtcaaggctcgtgtctccgtcgaggccggcgttgccatgccgtggtacaagtacctcggttcctacggcaagcctgtctccatcgagcagttcggcctgcagggtgacggcgctcagaacatgatcgacctcggcatcaccgccgagcacgtggtggaagccgccaaggcctccatcgccgaagtcgaagccgccaagtgagcaactaagcaataattcaataattgttggctcccctccctgaggggagctgtcaggcgaaagcttgactgaggggagcaatgcttgagcccactcccctcagtccgcgttgcggacagctcccctctcccaggagaggggagcctagggcttgaatccaaggagaaaataaatgactgaagcaactcagcgtacgtccgacaacggcgtttccatctggctggacgacctgtcccgctcccgcattgagtccggctccctgcaggacctcatcgccaacaagaacgtggtcggcgttaccaccaacccgtccatcttccagaaggccctgagccaggtcggcccgtacgacgctcagctcaaggagctcggcaaggttgacgttgagaccgctgtccgcgagctcaccaccaccgacgtgcgcaacgccaccgacatcttccgcgagatcgctgaggctaccgacttcgtcgacggccgcgtctccatcgaggtcgacccgcgtctggcccacgacaccgagaacaccgccaagcaggctgtggaactctgggagaaggtcaaccgtccgaacgccatgatcaagattccggcaaccctcgaaggcctgccggccatcaccgccaccctggccaagggtatctccgtcaacgtcaccctgatcttctcgctcgagcgctacgagcaggtcatcgacgccttcatcgagggcatcgcccaggctgacgccaacggccacgacctgaagcacatcggctccgtcgcttccttcttcgtctcccgcgtggacaccgctgtcgacaagctgctggaagccaacggctccgacgaggccaaggctctggagggcaaggccgctgtggccaacgctcgcctggcttacgagctcttcgagaagaagtttgccgaggatccgcgttgggccgacctggctgccaagggtgccaaggttcagcgtccgctgtgggcctccaccggtaccaagaacgccgcctactccgactgcaagtacgttgacgagctcgttgccaagcacatcgtcaacaccatgccggagaagaccctgaacgctctggccgaccacggcaacggcgctccgtccatcgagggcacctacgaggagtcccacgccgtcatcaacaagctggctgagctgggtatcaacctcaaggacgtcactgacaagctggaggccgacggtgtcgccgccttcatcaagtcctgggattccgtgctggctgacgtccagtccggcatcgaccgcgtgaacgcctgagattattagctgatgcgcatttcgcgcattaactgattagctcacagaagctccgaccccaaccggtcggggcttcttacgtttgttgctacagtagtacgagcacatgagagaaaggccgaaccgtaatgaacaaacttgttgcacgccagcggttggtgatgacctttaccttcttttcgatgttcttcggagcgggcaacctgatcttcccgccgtttgtcggagctcaggccggttccgcgaccataccggcggccatcggcttcatcgtctccgcggtcggcctgccgattctcggcgtgctggcggtcaccttcgccggtggcttcgacaaactcgccggccgggtctcccccaaattcgccctgttcctcggcttggcgatcatgctcaccatcggcccctgctttgcgattccgcgtacggcgaccacctcgttcgaaatgatggtggcgcctttcgtgccgtcctcctacggctggctggcccaactcatctactcgctcgtgttcttcacactggcgttcctgttcgcccagcatcccgaaaaactctccaaagtgctcggccgattcatgggaccgttgctgctggtgctgattgccgtcctgttcatcgcctgcctaatccacggtatcggtaccccggccaaaccgatgggcgactactccacaaaccagattgcacgtggcttcctcgacggctaccagaccatggatctgctcgccgcgctctatttcggcatcgtgatttccgcgaatatccgcacccagcaggtcgatgacgaatcgcaagtgcagaaggagaccgcgtatgccggactcggcaccggtgtgctgctgatcgtgatctacggcgcactgagctacgtgggcttggtgtccggcgccatcgccaccatcgatcccgccaaagacacgggcgcgaccgtgctcaccaatctcacctcgtccctgttcggcgcgttcggtaccgcgttcctcggtatcgtcttcgtcatcgcctgcctcaacgtatgcaccggactgatcggtacctgcgccacctacttccacactcggttccagaccgttgcagggagaacgttgagctaccgcacctggcaggtcatcttcaccgtgttcagtttcatcgtgtccaacgccgggctaagcgcgatcatcaaggtttccgtgccggtgttgtccgcactgtatccgatcgccatcgtgctggtgctgctggcgctgacccacaagtcgctcggcgcgcgattcccgcatgtctacttctggaccgtgctgctggtgggcatcgactccttcgccacctgcatctccagcctgatcaccgtcttcggcggctccatcggctggctggacacgacgctggccatgctgcccttgcagcaataccagctcggctgggtggtcccggctatcctcggtgttgccattggtatcgccgatgctccgcgacggtagttcttcccggtctgtgccggagtctggcggtcggtcggtgatggcggttgttgcgacgctcagcggtgccggtgtatcgttcgcaccactatatgagcgcatttggggcggcatgatgctgcatccgaactgtccggcgattggcagaatgacctactatctctcgggccaagcaactgacgattatggagtctgcgtcacctcaccactgtggtttatgacggtgactgcgctgagtgttgtcgcgattctctgtctgaccgttgcgggagtacagggcttttcgcgccatcggctctgttcccgttgccctgttctggtcaggtctcacgttctttacctacagctacaacactggtagacacaccgatttctgcccagcgctatcggcaactgacaatgcaggtcttgtcgcttattgcatcggccgtgaagctttgggactgctgaccgtcgtgttgtgcgtgctgccattgttctccctgctttcggcgattatggccatcacgttggctgcgcacgacgcgacaccaccggcataaaatctccttcatatcacgaaacaacgggcacccgttttgcgaggcattctatccgtcccgtgtttcgcaacgcatgagacggcacatccattgaatcaggaggctagaccatatctcgccgaatcttgcggtaggtggcatagaacaggaagccggccacgatgccggaggtggcgtcggagatgggttcggcgatgaagatgccgttgacgccgatccagtgcggcagcagcagcgcgagcggcacgagcaggatgatcttgcggaagatggccaagaacaccgactgtttggcctggcccatgccgacgagtgcgcattgcgcgcccatctggatgccgaagataccccagccgcagacgaaaatcggcatcatgcgggtcacgatgtcgatgaccgtctgttccgaggtgaaccatgaggcgaagaagccggggaatgtggcgagcacgttcgcggcggccgctcccctgacgccccatccgaacacgaaaatgaacacggggtcaagaaggatggatatgccggtgccgatgagtacggagaccatggccacagtggtttcgccaactgcagcagcacggtgagggtcagggctatggcgatgaggaacgcggcgctggtgccgaggatgcgttcggctttcttgaagttgccgcgcccaagttcaatggaggcgcgaggcgcgccgcctgcgccgatcagcgaggcgaaggcggtgacggccggcagaatcgggaagcagatgcccacgccggtcatcgccgcgttgcccacttcggggatgtgcccgatgaacagtcggtcgatgatcgtgtacgaggcgttcgccgcctgcgccacgatggtggggaccgacatggtcagggccagacggggcaccggtttggtgcccagcccggcatcgatcgtgttcgcctgtaccaaggatcagctctgccagtagtagctgaagaagtcggcgagctcccccatggtttcgtgcagcatgcccatgcgcggcaggtacaccacgcggaagtggtcggggcgatgccagttgaacgcgccgccgtggctgatgaggatgtgcttgtcatgcagcaggtcgagcgcgaactgctcgtccgagtggatgttgaagcgtttgacgtcgatcttcgggaagatgtagaacgcggccttcggcttgacggcggtgatgccgggaatctggttgagcatgtcgtaaacgaggtcacgctggtcgtgcacgcggccgcccggcacgatgtagtcgttgacgctctggtggccgccgagcgcggtctgcaccacggactgggcgggcacgttcgagcacatgcgcatgttggcgagcatgttgaggccctcgatgtagtccttggcgatacgcttgttgccggacaggatcatccagccgatgcggtagccggcgatcatgtgcgatttcgacaggccggagaaggtcacgcagaacaggtccggggccatcgaggcgatggagatgtgctgcaggccatccatgacgaggcgatcgtagatttcgtcggagaagatgatgagctggtgttcacgcgcgatgtcgacgatctgctggagcacttcctttgggtaaagtgcgccggtggggttgttcgggttgatgatgacaatcgccttggtgttgctggtgatcttggagcggatgtcatcgatgtccggataccattcggactgttcgtcgcacaggtagtgcacggcggtgccgccggccaggttcacgcaggcggtccacagcgggtagtccggggagggcacgagcacttcgtcgccggtgtcgagcagcgcggacatggacaggttgatgagctcgctgacgccgttgccggtgtagatgtcgtcgatggtgacgttcgggatgttcttcagctgcgcgtactgcatgatggccttgcgcgcggagaacaggcccttggacggcgagtagccttcggtgtcggtgagctggtgggccatgtcatagacgacttcgtccggcgtgcggaagccgaagggtgctggattgccgatgttcaatttcaggatgtgggtgccgttggcctccatgcgcatcgcctcgtcggcgaccgggccgcgcacgtcgtagagcacgttgtcgagcttgtgcgatttgccgaaggtacggcggcggcccacgggaatctcgctgtccgtcaggggcttggcggtgcccgtggcaagcggcgtggcggcgtgttcgccgtccgtgacgctgttggaagcgtccgagttcaattgcggggtggattcctcgccgcgcagccagttcgcgtcgacgtccagttcgctggccaggaattcgagcacgtcttcgcggggcatggtcttgccggccacgtattggctgatatggctcttgcccatctttacgccacgatgttcggcggcgtgcaccaaatcgacctgcttcaatcccctactgttcatcgcattgcgcagacgttccgcaaacaccgatacgctcatatccttatgcctccaaccgggagttcaatttatcttttgaacaacagttcaaagcatactcccggttcaacacaagttcaattttggcgtgttctcgagtctcggccggttcagcccaactgcgcttcaatccattgggcgacgccgtcctcgttgttgggcgggcagatctcgtcggcgatagacaacaccttggggttcgcgttggccacggccacaccccggccggattcgctcatcatgttgatatcgatgaggtcgtcgccgaaggcggcggtctgttcgagcggcacgtccagtcgttcgcacagcaggtgcagcgcgtgctccttgttggcctgcgggttcatgagcatccacatcacgccttcgctaatggagatgtcgaagtccggcggaatcagcgcacgcagctcgttccactgttcaggctcggggaagatggtgatcttatccgccacgccttcgggcacgtcgtggaagttcgtatattggaaggcctgtgttttccaatacacgcgcacatcgaagttggtgtagcgcacgtcgttcatcacgatgccgagcttcaggccgggcatgcgatcgagcaggaacagacagacttcgcaggcacgccgtgaggagaagccaatcttgatcaaatggttctcatcggccggcgtggcacctgaggtgagcaggtcgaagtcggagtgggccgggtcgaaatcgatgagggcaccgttcagatagattacggcgtccaccggcagtttttcggcgaactggaggccggtactcaccggccgcgcggtggcgatggcgaatttcagtccggcatcgtgcgcgcggttgatggtgtcgatgctgcgctgggtgatgaaccggtcctcgaatacctcggcgtcgtgcagcaacgtaccgtcgaggtcggcgaccagcagtcggggttgtttcggtgtgatggcgtcgagaatcacagcagcccctcgcagtgttcacgcacgagttcggcggaatggtgcaatttggcctgctcgtcctcgctcagatcgagttcgacgatctcgttggcaccattggcgcgcagttcagtggggacgccgaggaacacgtcatgttcgccgtattcgccgttcagcagggtggagacgggtacgatgcggcgttcgtcccacaggatggtctgcacgatgccggccacggtggaggcgatgccgaagttggtaccgcccttggccgcgacgatctcatcgccacgggtgcgggtcttctcttcgatttcggtggtggacacggaggcgaaacggtcttggttgtcggccaggaagcgggcgaatggcttgccgccgagcgagacggtggaccatgcggtgaactgggagtcgccgtgctcgcccatcacgaagccgcccacgttacgcgggtcgaggccggtctcttctccgatgatggtcttgagacgcgaggtgtcgagcgcggtgccggtgcccagcacctgggtgcgcggcaggccggaacgtttccaggcataccaggccatcacatcgaccgggttggagaccatgacgatcacgccgtcgaagccggaggccatgacgttgtcgaccacttcgcccacaaggcccacggtgaagccgagttcggccatgcggttggagttggccggcggcttgcggcccacggtgatgacgacgatgtccgcgtccttgcagtcggcgtagtcgccggcgcgcaccttgacgtggcggtcctggaattcgctgccgtcatcgaggtcgcgggcctcccccagggctttggcggcggagcggtcgatgagcacgagctcattgcacaggccgtgcgtgacgatgccgaaggcggcggtggcaccgacctggccggtgccgacgataacgactttgttgcggttcatagtgaccatggtgatgtcctttcgtaatactcgatagaacgcatacgacccatgaccgacggtaacggtcatgggtcgcgagcgacaagtctatatggcgtgcaagccgatcagccgaggttgaacttggtcatcatgtcgaggccgatgatcaatgccacccacacgagagcgatgataacggtccaacggttcaggttcttttcggcgacaccggaagtaccggcgttctgggtcagaccgccgccgaacatgtcggacaaaccgccgcccttgcccttgtgcataaggatgagcagggtcagcacgaagctgagcagcacgacgatgacttgcagcgtgatcttaagagcggtcacagggtacctccggattgattggactgttgaccagcatagcgcacacacgggaaaaccgtggtattagttccgtgatttcgtggatttcagtgccagtcgagcgattttggcgagttcctcaacatccagggccgcccctccgatcaggaagccgtcgacgtcgggttgggaaatgagttccgccgcgtttttcgaggtgaccgatccgccgtacaggatacgtacgctatcggataccttcgtgccaaaagtggtcttcaaatcgttgcggatggcgtttgcggcatcctgggcggattgcggagtggccaccatgccggtgccaatggcccagacaggttcgtaggccacgatgagttcggcggcttgttcttcgttgagatcgcgggtgacgtctcgtacctggcccacggcgaaatcgagttcaatgccttgacgtcgttcctcgaagctttcgccgacgcacaaaatcggctgcatgccggcggcgagcacggcacgtacctgatcgacgatattggcgtcatcttcaggatggtatttgcggcgttcggagtggccgacgatgacgtacgagcagccgagatgggcgatcatgtccgcggacacatcgccggtgaaggcaccttgggtggtcacggaaacggattgtgcgccgtaggcgacatggagcttgtcggcttcgaccagcacctgtacgctgcgcaatgacgtgaacgaggggaaaagcgcgacttcgcagcgtttgaagtcaaagcgagcgtcacgcaacagccataccagcttctgcacgaagtaagtggcttcaagatggtcgaaattcatcttccagttgccggccaccaacggaatgcgtttggacgccatatgtttcccctctaaaaaatacgtagctcccctcaaggaggggagctagaaaatggattactcaagcaccttcagaccagggagctccttgccttcgaggaactcgagggaagcgccgccaccggtggagatgtgggagaagccgtcctccgggaagccgaggttacgcacggcggaggcggagtcgccgccaccgacgatggtgaacgcaccggctgcggtggcgtcgaccagaccctgggccacggccttggtgccggaggcgaactcaggaacctcgaacacgcccatcggaccgttccacacgacggtcttggagtcgacgatcttgtcgtggaagagcttctgggactccgggccaatgtccagacccatcttgtcggccgggatggcgtcggcggcaacgacttccggagcaaccggggtgtcaccggccgggaagccggcgttcacgacgacgtcggtcggcagcacgagctcaacgccgttcttctcggcggtctcgatgtagcccttgaccttctcaagctggtcctcttcaagcagggaggtgccgacctcgtagcccttggccttgaggaaggtgaacaccatgccgccgccgatgaccagacggttggccttgtcgagcaggttctcgatgacgccgagcttgtcggagaccttggaaccgccgagcaccacggtgaacggacgctccgggttctcggtggccttggacagggccttgacttccttctcgaccagcaggcctgcggcggccggcagatcggcggcaacgtcgtagttggagccctgggcgcggtggaccacgccgaagccatcggaaacgaaggcctcgccgagggcggcgatcttcttggcgtaagcggcgcgttcgtcggcgtccttggaggtctcctccgggttgaagcgaacgttctcaagcagcacaacatcgccatcgttcatggcggcgaccttggcctgagcgtcctcgccgtaggtgtccttggccagcggcacgttggtgccgagcagctcgccgaggcgggcggcaaccggggccaggctcagctcaggaacgaccttgcccttcgggcggccaaggtgggccatgaggatgaccttggcgccttcttcgcgcagggtcttgatggtcggcagagcagccttgattcgaccgtcatcggtgatggtggtgccgtccagcggaacattgaaatcagcgcgaaccagaacgcgcttgcccttgagatctccaaggtccttgagtgtcttcatgaatatcctttccttgacgaatcgcacgtcaaagtggccaattttgccactttgcatattacaggcattccggaacaaaacaccgcattcgcctactgactgaatgcggtgtttcgttacgtcgttgtcgggttacttgccttcggctgcgcgagccttctccgttttctcggcaagctgaagcagtcggcgaattcggccggcaatcgcatccttggtgatttgcggttcggcgatcttgccaagctcctcgaggctcttgtccacgtgatcgatgcgcagctggccggcctgacggaggttgtccggaatgttatcgccgagcacttcgaaggcatgctgcactttttcgctggcttcggcggcagccttggcggaacggcgcatattggcgtcatcgaagttggccagacggttggccttgccgcgggcctcgccgtcggagcgcttgccggtccattcgcgggccgaacgggtggcgcccatgagcttgagcatgcgttcgatggcgtcgggatccttgagggtcacgcgctcggagctgcgcagcgtgcgatgcttggcctggatgccgagacgacgggccacgccacacagggccatggcggcctcttccgtggggcaagcgatttccaggaagctggccttaccgggatcggataggaagccacgggccatgaaggcgccgcgccatgctgctttgatttgggcgatggatccgttgaccacttcagacggcagtccacggacctgctgcttgcggcggtcgaccagtccggtctgcaaagccaaggccactacgttgcgggtgacgagcaccacgtaggtctcgacagggccgttcggggtctgacgggtgaggtggttgacctcggcttcatgcccgaacgtgttcctcaacgtgttcttcagccattctgcaacgtcaagcgaggtgaatacggcttggataacgtatgtattctgtaccggtcgaagaccgccgccaaaacggatcatggccgcagcttgggccttgatcgcggctggcgaatcgccttcaaaggccgccaactcgcttttgacatcgtccagaagagccaagatctacctcctacagtcccgttcttctcaatgcttcaggcgcttcgtgccgttatctgctgtcatacggtcggaagccatcggctttctgtgatacctaatctggtggacaagcgaacccgtttgatacgtattatgggctttgctttctcgcagtgtggtcaccgaacacttgcccgatgaccgctcgacgcctgcttacgatgagtgacgcttatgctgttctctcgcggaaacggttacgttgagcccatgtgcgcgtaagcggcgagccagctcttcgctcatcgccaccgaccggtgctgaccaccggtgcagccgacggcgatggttacatagtgcttgtcttcctgggcgtatccttccaacgcaatctcgatagctttctcataagcgtcgagaaattccttggctcccttgctggaaagcacgtagtcggcgaccggcttgtcgtgcccggtaagctcgcgcaggttgggaacccagaacgggttgggcagaaaacgcacatcggccacgaaatcggcgtcgatgggcatgccgtatttgaagccgaagctgaagatgtgtaccgccacggtggtggggccggaaccgagcatcgtctcgtagagtttggtggacagctggtggatgctcagggagctggtgtcaatgacccagtcggctcgctccttgaggtcttccagcaggtgacgttcctcaaggatgccgtcgatcagtcggttgccgtgctgcagcgggtgcgggcggcgcacggattcatagcgcttgatgagcacttcgttgctggcgtcgaggaacagaatatgggttttgacgccgagatcatccagatggccgagcacggcggccagctcgtcgaaatagctggagcgcacgtcgatgacggcggcaagcttgtggacgcccgaccccgatccggaaccggaggtggtcatcatgtcgacaagcgggataagcagtttgggaggcaggttgtcgaccacataccatcccatgtcttccacgcagtcagcggcatgagagcggcctgcgccggacataccggtgatgagcagcacctcgaaggcatcaagcggggtcggctggttgtccggagtcgatgtggatgtcgcggaattcgccggcgcattcgtggcggccgcctcgccggtatcgcggattgttgtctgttgactcattacaacgcctcctcaagagctttgcgcatcgcgatctccagctggtcatcttcggtggtggtgtcctgcagacgctggtcggcatcgctgggcgggtcgtcatcccagataccggtcatcagcaatacctgtacgagagcttggtacagcagcatttcttcgccgccgatggcgtgaccgccatgagcgcgccaggcttccatgagcttggtggggcgtggatcgtagaccacgtccagcagcagtccggagaatggctcggttccggcattggtgagggcatccgcgacgttgtcggccgcatgtccgggaatcgtgttgatgacataggtggcgttgcgggctgcctcgagcagggcctgatcgtcgcctaattcgatttcgctgtacgggttatgcacgttgacgaacttttcggccactggtttaagcccggtgtttttcccagggtggcgggcggcgacgatgatatggccgatttcgggcatcatgcagcatgcggccaacgccgaagtggcggtgttgccattgccgaggatcagcgcggcgccgcttctcgatgcggtgtggtgttcgccgagttcgcgattggcgtggtcgaaggcgagttggatgccgatgacatcggtgttgtacagcttgatgcccggcttgccgttcggccaagcgggatcatcggtagccacactccagtcgaataccgcggtattcgccaccttcagttccttggcccacagattttccggaacaccgtacggttggatggtcttcttcaacggcatggtcaggctcaggccagcccacgtcgagccaaggcctttgaggaaagcgtcgaggtcgtcttcccccacctcgtgcttgtcgtacagccaatcgtcgagtttcagcgaacgataagccgcgttgtggagcacgggtgacaatgagtgcgcgacgggtttgccgagtacagcgcaacgatgattggccatatcccctccttgatgtctgtttccatgctagccgacactttgcttcgaatatgtcaaccacaggccccgcaaccgaaaattcactctgggctgctggaccgggccggctcactgctcgtgcagcgcgttgtacagcgctttggctttggcgtggccgatgcctttgaccttctcgaagtcctcgacactggcttcgcgcatggctttgaccgagccgaagtggttgagcagccgcttctggtagctttcgccgatgccgggaatctcgtcgagcgcgctgcgcagggcgcctttgcgccgctgttggcggtggtaggtgatggcgaagcggtgggattcgtcgcgtacacgctgcagcagatacatgccttcggactggcgtttgaggatgatcggatagtcgtcgtccggcacccacacctcttccaagcgtttggccagtccgcagacggccacgtcgatcacgccacagtcctcaagcgccttggcggcggccatgacctgtggcttaccgccgtcgaccaccaccaggttcggcgtgtaggcaaagtgatgccggtttgtgttctgctggacgatgtcgggcgaggactcccgtgcatcgttctgcactccgaccggcaccgcgtgccccttgccactgatgtcggaaccgccctcaccattgtcgttaccgttcgcaacgattgtctccgccgccacggcagtggccatcttgccggcggccgaggccgcgcgctgttccgcgtcgatgctttcgccggagtcgccggcgatgttgccgtgcctgaagcggcgggtgagcgtctcgtaaagcgcggacagatcatccaccgcgcctttgccgtccttgcctcggacggcgaagcgtcggtattcggatttcttggcgatcgcgtcttcgaacaccaccatggaggccacttggaaggcaccgcccacagtgttcgaaatgtcgtagcattcgatgcgcagcggggcttgcgcgagtcccaatgccttggccacatcgttcatggcctgggtgcgtgcgcccatgtcggagatgcggctcatcttgctgcgttgcagtgcttggctggcgttctcgttggcgcggtccataagctgcttcttgtcgcctcgcgaggccacgcggatggtcaccgcgcccccgcgcagattggtcagccagccttcgagttcctcgcggcgggccggttcgacgggcacgatgatttcgcgcggtaccggtgcgatgggtgccagcaggtccgcgcgtccggtggtctcctgacgggtgttgcgttctcgggtggcctgggcgcgtgccacagcgtccgtggccgtgatggtctgtgtggagccgatggcctcgcgattggtggagatggtcgcggccgactgggggtgattgtccccggcggcgtccgaatacacctgcaccagaaggtcggccatcaagtcggcgtcatcgatgtcctcaactcgttcgacgctccagttgcgttcgccgcgaatagagccggcgcgcacataaaaggcgtgcaccgaggcttcgagctcgtcgctggcgaagccgaacacgtccgcgtccacatcctggtcgaagacgacggcgttctgttgcaccacggtttccagcatttggatctggtcgcgcagtcgggcggctttctcgaattcgagttcggcgctggcctctttcatgtcgcgggtcaactgggcgatgtatggccgtccgagtcgtccggtcatcacgccgaccagctgttcgcacagccgccggtgttcgtccgcttcgatacggttcacgcagggtgcggagcatttgccgatggaggcgaacagacatggccgtccggtcagttgcgccttgtggaatacgttggtggtgcaggtgcgtaccgggaacgtgcgcagcaaccggtcaagactgtgccgcaattcccacactttggcataggggccgaaataccgggtatcccgccgtttgcgcgaccgcgtgacccacacgcgcggaattcgctcccccgtgctgaccgcgagatacggataggtcttgtcgtcgcggaactgcacgttgaaccgtgggtcgaattccttgatccacgtgtattccaacgtcagtgattccagttcggtggcgacaaccgtccactccagactgcgtgcggtcagcaccatggtctgcgtgcgcggatgcagcagatacagcggctggaaataattggtgagcctgttgcgcaggttcttcgccttgcccacataaatgacgcgcccttccccgtcgcgccatttgtacacaccgggtttggcgggaatatccgaggtcttgggtcggaacaggtcgcgagaatcccccagcaaaggtgccccattcgcattcaccttcgccgtcgtttccccggcgcccacagctacgctttccggcattaacgccgccgcggtcttccgccactcatccggactatgccgctcaatatcgttcgtcataatcctcctcgctattaagcaaaaccaatcatcagggattgggtgggttggggtgtgtgttgccggaccgtaaagacttggcctgagcggcccggagcatgtccagcaacataccactcccacccacccgaggtcagcagcaatggaaggctaaagcatgggcttcaggaacttgccggtccatgaggcttcgcattcggcaacctgttcgggcgtgccctgcgtgacgatggtgccgcctccgtcgccaccctccggaccgagatcgatcagccagtcggcctccttgatcacatccagattatgttcgatgacgatgaccgtattgcccttgtccaccagggactgcagcaccttgagcagcttgttcacgtcttcgaagtgcaggccagtggtcggctcgtcgaggatgtacacggttttgccgtcggatcggcgctgcagctcggtggcaagcttgacgcgctgcgattcgccgccggacagggtgggtgcgggctggccgagtcggatgtagccgaggccgacgtccacgagggtcttcaggtatcgggagatgccggtgtacgccttgaagaagtcggcggcctcctcgatgggcatgttgaggatgtcggccacggtcttgccgttgtacgtgacttcaagggtctcgcggttgtatcgtttgccgtggcaggcctcgcagtccacgtagacgtcgggcaggaagttcatttcgatcttcagcgtgccgtcgccgtggcaggcctcgcatcggccgcctttgacgttgaaactgaagcggccggggccgtagccgcgcacctgggcttcgggagtcttggcgaaaagggtgcggatcttgtcccacacaccggtgtaggtggcggggttggatcgcggcgtgcggccgatcgggttctggtcgacgtggatcaccttgcgcacctggtccacgccttccacgcgcctgtggcggccgggtacgatgcgtgcaccgttgagcttgtcggcgagcaccgggtagaggatcgtgttgaccagcgaggatttgccggagccggagacgccggtgaccacggtgagcacgccgagcgggaagctcacgtcgatgttcttgaggttgttctcgcgggcacccacgactttgagcacctgggtcttgtggatcttgcggcgcttggcgggcacggcgatctctcgccggtgggcgatgtagtcgccggtgatggagcgcttggcttcgatgaggtgcttggcggggccggagtagatgacttcgccgccgtgttcgccggcgccggggccgatgtcgaccacccagtcggcgcggcgtatcgtgtcctcgtcgtgttcgacgacgatcagcgtgttgccgagatcgcgcaggtggtgcagggtttcgatgaggcgttcgttgtcacgctggtgcaggccgatggacggctcgtcgagcacgtacatgacgccgaccaggccggagccgatctgcgtggcgagtcggatgcgctgcgcttctccgccggacagggtggcggccgcgcgcgagagggtcaggtagtcgaggccgacgtcgttcaggaagccgagtcgggccttgatctccttgagcacttcgccggcgatcagctgtgccgagccttcgagtttcaggccgttgatccaggcgagttcgcgtacgacgggcatgtcacatacgtcgaagatggatttgccgtccacggtgacagagagcacctcgggcttcagacgacgtccgtggcagacctggcagggcacttcgcgcatgtacgactcgtagtattcgcgcatggactgcgaatcggtttcgtcgtggcgtcgcatgagcgtgcggatcacgccttcgaagccggtggagtattcgcgcaggcgtccccagcgattgcggtaggagacgttgaccttgaagtcgtggccgtagaggatgtcgtgcttgacgtcgtccggcaggtccttccaaggggtcttcatggagaagcccatttccttggccaagccttcgaggatgtggccgtagtactgggaagtcatcttggtgccgctccacggttcgatgacgccgtcggccagtgacttgtccgggtcggagatgatgaggtccgggtcgatttccagtttgaagccgagaccggtgcaggcggggcaggcaccgtagggggcgttgaaggagaaggtgcgcggctcgacctcatcgagttcgagcgtgtgcccgttcgggcagctgcggtgttcggagaacggctggcggcgggccgggctgccttcctcctcgtccacgaagtcgatgacgatgctgccgttggcgagcttgagggcggtttccaccgaatcagtcaaacgttggcggataccgtccttgaccacgagtcggtcgaccacgacctcgatggtgtgcttcttctgcttggtgagtttgatgtcgtcggacagctgtgtcatctcgccgtcgatgagcgcgcgggcgtagccgtcggagcgcagcagctcgatcatgtccacgaactcgcccttgcggcccttgaccacgggcgagagaatctggaatcgagtgcgctccgggtagccgagcagcgtgtcgacgatctgctgcggggtctgggaggcgacgggctcgccgcattcggggcagtgcgggatgccggtgcgggcgaagaggagtcgcaggtaatcgtagatttcggtgatggtgccgacggtcgaacgcgggttgcggttggtggtcttctgatcgatggagacggccgggctcaggccctcgatgaagtcaacatcgggcttgtccatctgacccaggaactggcgggcgtaggcggacagggattcgacgtagcgtcgctggccttcggcgaacagggtgtcaaacgcgagcgaggatttgccggaaccggacaggccggtgaacacgaccatacggttgcgtggaatcgccaggtcgacattcttgaggttgtgttcgcgcgcaccctgaatcgtgatcttgagatcgttcgggatgtgcgagatatcagctaccagcgaaccatcgtgttcgatcagcggcgcctttttgatttcccggctcaggaaggagtcgctggtcatcaccttttcgacgatgacctcaccgttcttgcccttgctggttttcgcgccctttgcgcttgttgcgcgccttgcgccagtccgcgttgccgccacagccacaccccaccttccatctcaccgttcccgcgcgcacggttatgcgcgcgccaaatctgtcccaaggatacccgaacacacgaccaaattcgaacgcttgttcgatggcgtgtcaggccggaaaaccgaaccatagtatgcaaaattccggaccatcagtggaccgaaacgcaagagccggcccacgcgacatcaaccgtgcgcccagccccagtcaagctctatcccgaagacctctcctctgatttgccccagttcacatgtcaatcgtttgacgtcctcatcggggcaaaacccgctgtcccggttcgtgattttggcctgttttcgagaaccaggacattccagtttccacgaaccacataaaacgcgaacggaaacggcggaataaagccaatctcagaatcgccatgttgtcccgattctcgcatcaaacgattgacgcccataccggggcaacacaacatgtcccggttcgcgaaaaacacccgaaatcacaaaccgggacaacggattctgccccggtacgtccgtcaaacgattgatgttcgaaccgggacaaaatcttcaatggactccacggggatgccaagcttgcgtaattcgtcaactgcatcacgcatgggaatgcgttcctgttcgatacgccgataagcgatggttttgtcagcacacagtcgttcataaagacgtcgctccgccgattgaaggccgggcgtcggcttaggctcccgcatagcaatcttcgcgctgcgttcagtacgatcggtaccaaaatcgtcgtggcccggatcgagataacggaaccgcagttcggtcggccgttttgacagacccaacgtttcgacaccgagcagtcggcaaatggccttacgacgattggtttttgactcattcagccatttgccgctgaatcctgtcagtggaatctgtgcgacggtgcgcttcgcgatattccgccgccagcgtacgaccaaccacacgcatggctattgattcgtcaggaacgacgactttggagatcaactcgacagaggtgcctatggtgcgatgcttggttatgatttcgcaaccattcttgcttgcccattgccgtatctcattgttgttgtcatgcactgcaatcgcattggtttccaaaaatgcttggtccggcaatcccaccggcacgggaaatggccatgccggttcgatgtcgtacatatgtgaacgcatatgtttcttcacgcatgtggtgatcgcagcgatgtctttcatgccggccatagttcccatcacctgctttcgaacatcgtcgagtcgaaccgaatcgtcttaataccggcgacgccgggaatgctcattcggcaaccccgtcatccttcaatatatccgacgatgattcatcgtccatgtcattctgatgcagcacggcctcgcacagggaggtgaggccggtgtcggggtccttgtaggtcacgtaggccttggtggagacctcgaggatttcaccggtcttgctttccggggcggagacgatgacctggaatccgaggcgcggcagcaccgtgagggcgcgctgcgtgtaacggccgtcggccttgatgagcgcctcgtcaaggaacagcgtggtgtacgagggctcgctggtcaggccgccgccaagcaggtagatgagcgccgcgccgtatacgaacgaggtgagctcctgcaaggcgccgcccgaacggccgccggtggaggtgatgcgttcgtccggaccgtcggcatgatgcacgatggcgtagaaggacgagcggcagcgcgggtcgaggttgcgggcgccgtagcttttcacgccgttcgtgtccttgacctgcgcgagttcggcgcgcagcagcccgaccatcggcgcgcaggccgcgaaagccttgcgcgaggcgtcggaatcgttgacgtcggcggatttccaattgttcagggtgccgatgacgcggatgagctgcgcccagaaggtgcgctcgggacggcgcacgtccgcatgcagggacaggctgccgtgcttggggccgaactgttggcccttgagcatggcgttgatgcggtcaagctggtcgtggatgtcgctggcatccgtgtcgatggcgcgtttgatggtcaggaagctcctgagcagctgttcgaggcagcgccggtattcggcgtcggtggcggcaaccacggccagctgggtgaggctggcgagttcgtcgagatagtaccggtagtcctccacgctggcggtcagcgaatcatcgtcggccgcgtagagcgcgatgtaggtgctcattttcgattcgacgccggtgcgtgcggcgtcggcctggccgttcagcaggttgatgcgggaggccatgtccttgccgatgccggcgatggtgcgtccggggaagctctcccccggcgcctgcgttcctgccgcgcccgcgccgatgatcatgtgcgcgcgcatggccgcgtccgccagcccggcgaatcggttgtcgtaggattcggcgagcgccgccgtgacttcgtccggcagcgggccggaagcggcgtcatcgtcattgtcggcggtggcaccggcggcgtccgtcgtgccggtgtcggcatggtcgcgcagccagatgagcgccgcttcgacggcgctgccggcgcgggccgcggcctggtcggattcgatgcgctggcgttccacacggtcgagttcggcgttcagttcgtcgcgctgtttggcgagttcggcgagtttgggatcgtttttgatggatgcgatggcgtcctgcgtgtccgtgatggtccgttgcgcgccggcgatgtcgatgcgttcccatgacgtgtaggcgagctggttggccagttcgagttcgcggtggaggttatcggactgtgttttggcggccgtgtagtcggtgtcggcttggctgagcgcgttgcgggcggcgtcgacctgcgctgcgagcgcgttgaggtaggtttcgttgacgaatccgatgacctgggcgcggtctttggtgccgtgctggccgcgtgcgccggatttgatctgaccgtcggcctgcacctgacggttggtgcggtcggtgtcgtcgatggcggtgacgcatagggcgtcgaatcgttcgtcctgggtctgcgagcgcagccagtcggcgaagggcgagtcgtcgcggtagcgcagtttgccggacagccagtcgccgtcctgttctccggtgagtatgttcgcgtgcgcgccggtgtcgtcgtagtggcgtgcggtgtccacgaactgccaggtgcgtcggggcatggtgcgcgggtcgatggtgctgactttggcggcgaagccctgttcgtggcgcttgtcgacgaggatggtctgggcgatgggcgcgtaggcgacgttcatggcgagacgccagtcttcctcgtgttcgttcacgtccatgagttcggccacgtacggcagttcggcgggggcgagtccggtggcgcggcagagcatggcgcgggtttcgtccatctgctgggagatgcgggtgcgctgggagcgttgccggtcgaagtcgcgttgcagtcgttcgaggtcgccgcgtgcgccggcccgtgcgttgatggcggcggtgagggcttcctcgcattcgccgtctcgtttgttgtattcgcgtttgaagttcacggcgttgatgcggcgttcgttccaggactgttcgttgccgggcagcgtctcgccgatggatgcgaacgtttgttcgattcgtgttcggttggcttgcatgtcttcgagggtgcggcgggcctggtcgagttcgagttcgagtcgggtcaggttgccgccgtccagaccctgcatctggcctcggatcatgtcgaggcgggtgcgcaggtcttcggttcggcggcgcagcagcttggcttccgcctcgctgttctgttgttcggcgcggtcggcgggcagttggacggcgacttcgccacgcatgcgggccaatgcccagtcgcgcagcacggccggcaccgtgccgtcgacggccggcttgaccggttcgaaggcgcgggccttgccgcgtgcggcggcgtattcgccgtaggcctgttggatgccgcgcagcgtgtccatgcggcgggtcttctcgtccatggcgtggaagttctcgtcgtaacgttcgtagtcctcgaccgtggtgcgggccaggtccagggcttcgggcacgccgagcacgccttgtttgaagatgtcgtcgagccgggagggcgcgtcggcggactggatcttgtgcagcagtcggcaggcggcctcgctcaggcccattgcgctccagatgtgtgtgtggaacgcttcggcgctggggaatgtgaggcagtcggggtaggtggctttgagctgggctggtgtgaacggggcgtcacggtattggtccatgcgcctggggtccacgggcttgccccagaccacgtactggcggcgcacgtcgccgcggccgtcgccgggcatcaggtagaggaatttggcgcaggaaagcacctggccggtggtctggttgcgataggtgtccacgatggcgccccacacgggttgcggcgcgccgttctcgtcgcgaccgcgcaggtagagcggctcgtcgccggtttcggtgctgcccacgccgaccatgccgcgcaggtaggtgtagtcgctgcgttcggagcggccggagttcgaggccttgttgaacggcgtgccggtcgggtacagcagggagatctgcgcgtcgaccagcgtggatttgccggattcgctggcgccggcgagcagggtcaccggcagcttgtggtccgtggaggggcggaattcgtggtagccctcataggagccccagttgatgagtcggcgggattccagcatccaccggtccgcgatcatctgcacgtctgtcgcctgcatcattcggctcccttctcgtcgtcatcgtcatcttccgtgtcgccgtcgccgtgttccgcgacgtcgagccaggtgtcggccagttcgcggtcgagcaccacgggcacgagcggcgtgatctggtacatggcttcgtcgtccaggcgcgccaaatacccgtaggtgatcatcgcggagacgatggcgccgatctgctttgccacgccttcctcgtcattgcgggctgccaggtaaccggcgccggtggcgagcgcggcgcggatctcctcaaagctgacgagccagtcggcggggtcggcgtgcacgttctcgtattcgaggacgcggatgcgcaggaaggcgagcagcgcggcctcctcgcgtttgaggctgacacgggttttgagcgagcgcagggtcacgtcgtcgccggccacgggcgtggcgtacatgatgcggtagcgttcgttgatcaccaagtcgagcaggtcgttgttcagggagcgtacgacggcgtcgcggttgtcgagcacggtgtcgtaggtgggcccgctgatatagcggtcgcgtttgagggcgatggcggccatgcgtgcctcggccggcatgtcgccggtgtcgccttcgaacagggcgtacgggttggcgttgtccatgtgctcctcgtgttcctcggccacggtcatccttcctccacaatgatgttcagctcgtccatatcggccagcaccggtctagtgatccagtgccggggctcgccgtcgatcgatacgcaatgccaagtcgcggtatcgccgcgctgcgccggggccggctcggtggcgatgtcgctgtcgatgccgacgccgtcagtggacggctcgtcggcgatggcgctgccgcttacggctcccagcccgcccaggaagccgacgatctcgctttcgcggcgttcgctttcgggcagccggttgaagctggcggcgatgtccacgagggttgcgttggacctgtcatcggacctgtcaacggtcaccgggttgcgccggatgaggctgaccatgcgcaggagtcgggggccgccgctgttgaccatatcccgcagatcggccaccggagtcgcctgcggggcttcggcggcgaggtcgctcaggccgggtgcggtggcgcgggtcatggatttggccgggcgcatcggcaatggcgcgaacagcgcgtccgcggtggccgtgtcgtacgggcgcgaggcgtctcccatatgggttttcgcatccgcgttgaggcgcgcgtacagtcggttcaagcgggtgagcatcgtacggtagcgagtgtcggtttgctggcgcacgagccggctgatcgcctcgtcggagacgcgcatctggcggcgcacggcttcgatgccgtcgtagatgcgggccagttcgtcgcggatctggccgagcagcacgccggattcgccggccagatacggggttttggcgatggcgcgcagggcttcgtcgatttgctggcggccctcgtcggtgatgatcacctggaaggcgtcctcgaagcggcggccgctgtccgattcgctgaacgagcggcggtattcgtcgtggtagcgggtcaggttctcgtccacgctgatgtcgccggtctgcatgcgccggcgcaaggcgtcgccgttgtcccgctcgtcgagcacgagttcgcgcaggtcgatgggtacgccgcgcagcgtgttgtggatcacggcgatcacgtcctccacttgggcttcgctcagcgtggcgtgctgcttgccctgttggatgcgtttgatctcgtgcttgcgttccttgatttcacggttgaggagtttgatgcgctcgccggggtcggcggtcagctgcatgcgcgcgtgttcgatttccatgatgatgctgttggcctgcgcgccggacagggcgcgtgattcgtcttcgagcctgctcagcgcctcgatggcgcggtgggcgcgggccgtcaaacggtagaggaatcggtgtgtggccgcatcatgcgagttggcgagccaggcgtagtcgccttcgccttcacgggtcaggtcggcgaggatctgatgggcggcctcggcgaaggtctggtcctcgcgcggcgcatattcgccggcgtcggccagagcgttcagactttgcgcgaaccgctcctccacggtctcgcgcggcagctcgccggtgagcgggtcgaacgtggaacgcagcagcgacacgtacagcatcgcgttctggcgcaacagcaaccgcaggacgcccgtctcatacaccggtcgcagccgttccagctcccgcatcacatcggccacagcatgcctccctctgtcgtgaccgcaccatactagccgatagccgcgaaccacaccccgcccgcgccacgcgtgctctctcccgcccagcaccaatatgtcacttttactgcacatgtcatcatgtgcagtaaaagtgacattgaggctgcgcactcatggtgatcgttcactccagccgtcgcccctattcgccgcgcagggcctcggtcggggtgagacgggcggcgcgggaggccgggtagaggccggcgaggatgccgaccaggatggcggcggcccaggcgagcggcagggaggtccagtcgagggcgatcggctggccggcactggcggcgacgccgatggcagcgccggcgccgagcgcgctgccggcgaatccgccgagtgtggacaggagggccgcttcggtgacgaattgcatgcggatgttgccgggcgtggcgccgagcgcgcgtctcaggccgatttcgccgcgacgttccatcacggtgacaatcatcatgttggcgatgctcatgccgcccacggccagcgcgatcacgccgatcatcaggccgagcgtggtcagtgaatcgttggtggtgttgcgcgctttggataggtcggcggacgcggtgacggacacgttgccgccggccgggttggcggcgtgggcgagcgtgcggcgggtgccttcggcgtcgccgggcgtggtgcgcacgtagatggcgctgatccgtccgatggtgtcggcctggtcggggtaccggccgagcgcccattgctcgccgatgatgacggcggcgttcaggttttcagcctgcggcgtggggttcaggatgccgatgacgccgtaccatgcgttgtcgatgaggatgcggtcgccgggctcgttgacgccgagccggtaggcggcgtccgagccgagcacggcgacgggcaggtgctcgttgttcgcgtcgatgccatgaccttgggcgaggcttgctccgacggcgtcgagtgcgccgggccgcatgatggcgagggccagcgcgttgccgttggttttggggcacagcccgttcttgaagatctgcaccttctctggcgcggtgtcgaagacaccgacccgttcgacctgcggctgacgggcgatggttgtgggcgcgtaatccggcagcggaaccttctgctgggcggcgtccacgccgggggcgaccaccgacagattcgcgccaagcgcgtcgagttgggcgaggagcgctgcctggttcgatgcggcgatgccggacaacgccacatatgcggccacgccaagcgcgatgcccagcgatgccagcaccgtgcgggacgcccgcccggcggccccaacccaagccgcatgcatcaaatccgcaattcgcgtgcgtatcggtttactcataggagtacgttcactcatatctctcccccagtcagcctttggctgacagcccctcgtcagagggggcttgattcggcttgtcgagttcggtgactaggccgtcttggatgtgcagacgcctggggaaacgtgcggcgatggtctggtcgtgggtgaccatgaccaggcttgcgccggaatcggccgccgtgagcagcaggtcgacgatggtgtggccggtttcgcagtccagcgcgccggtcggctcgtcggcgaagatgatgtccggccgtttggccagggcgcgggcgatggccacacgctgctgttcgccgcccgacaactgggccggccggtgatgcaggcggttccccaatccgacctgttccaacgcctcggcggcccgttgccgacgttcgccgcgcggcagggttgtgtattgcaggcctgtcatcacgttctccaaggcggatacggtggcgatcagatggaactgctggaacacgaagccgatgcgcgcggcccgcaggacgctacgctgccgctcacccatcgcattcacatccccgccgtcgtatcgcaatattcccgaggtcggcatgtccagcgtgcccagtaacgacagcagcgtgcttttgcccgagccggacggcccgacgatggccacgagctcgctgcgatcgatggccagtgacgtatcatgcaatatctccagcacgctcccgtccttgcctggaaacgccttcgtcacatgctccaacgtcagcaatgccccatgctctgggccagcgggggcaaactcgatgtcgttcatgagaccaccaccttgtctcccgccttgaggccgtcggacttggtgatttgcacttgcgcgtcggacaccagcccgattgacaccggcacacgcaccaacttgccgccgcgtaccgcttcgaccgcatacgcgctgccggcgctggcgatcagtgcggtcaccggcacgatcagcgcctccccggtcgaggcatcggcgttcgggatgatgacttgcacggccgtcggcccgaaagccgccacctgcgactggtccgggaagtcgatgcgcgccgatggctgtgtggcttgcccgttgtcgccggtcttctgcccgccctgatcgaccgaggcgagcgtcgtttcgacggtggtgttgtccggcagcacgacctgcgccttgtctccggctttgaacatcgccgcctgcgtggcggtcaacgtggcctgcgcatgcagggtgacgcccgtatagcttgccgggctgacctgtgattggccgagtttcgcgttcaccgccgtgatgcggattggtgcggccgcggccagggccaccgtattcgggtcgaatgtgccggtgaccgcgtcgccggtcaggccgagcgagcgctgccattgccggatcgcctcgcgggtcagccagttgaaatgcggtccgacctcgccgccgtagaatccgagttcctgcaggttctgctccagttgcgtgacgtccgggccgtcggagacgccatcgccgatcgtccgccagaacgggcggtcgccatggaacagcggcacgggcgcgccgtccatctcgtacacctgttcgccggtgttgatctgtttgccggccaccggcagttgggtgattgtgccggaagcggccgcgaaatcggaggcgtcatcgtattgcagactcgcgccgagccgggtctcggcgttgagtacgcccttggtcacctcctgcgtgcgcagcgtggacacatccacctgctgcgatcggccagtctgcccggtcgcggtgacgtgcccggccaacgtccacggcctcaccgccacgcacaccgcggccagtccgatcacggcgatcgccgcgataatcatcgtcacgattctgcggtgtttcccgaatctgcgcgcttccgtccgtgtcatgattgctcctttgtccgttatcggatggccgtctcattgctggggcgcggcttcggtggacgcgctgccggaggtgaattcggagaggactttgttgtagtcatagccgaattcctcggtggtgccagcgaaggcataggagatgttcgcgccatcggtcgggcattccttgaggaatcggcgcagttcggattcgcttacggtgccgggaatcgtgattgaggtgggcgtatcggcgtccgggtccttgacccagtcgaagcccttcttacgcgcggcctgggcgtaggcgagcgccgcctgcttgtcttccccggaatactggtgttgcggccccatgtccggaatgggctgggtgaagtcggggttcttggcctcgcagtcggcgtattcccgctgtttggattcgtagggtgagccggcgagcgccttggcgtccttgaacaccacccaggtgctgtcgtcttccatcgacgtgtaggcagcgttcgggtagagttgcgggccgtcgtcggatgcgctgaggctgttgccttgggaggtgaccggcttgccgtcggtgccgatcatgcgcagtgcgaccgcgtttttggtcggggcttgtttgcccgagccggagccggacgacacgccagcagccgtacgtgcgtcgaatcctttgccggtcaggcaggcggcgaatcgcttcgccgtggcgtcggtggtggtcgtcgcatcggaccgatcgtcggcacctgagcctgttccgactgccgccagcggtgacgagcaggcgcccagcaccgaagccagcgagagtgcggacgtaagcattgcgattcgccgtaccaggcgcgtatgagtagtggacattaccgtctccattccgtgagtcgattgtgacgacttccatccaatcgccctcaccgtggagcgtcggtaagcggacggattactttcgccttaccgtagaatcgggaaaatgttgggtgatgccattggttcgggaaggctcggaaggggacatgatgcggattctgatcgtcgaggacgaccgcgaactggccgccgcgttggacgacgcgctgcgctacgaggggtacgcgaccagtctggcaaccaccggcgtcgaagcgttgaagatccttgccggcacgaacgtggacatcatgctgctcgaccgtgatctgccggtattgtccggtgacgcggtgatggccaccgtcgccgcgaaccgcattcccgtggccgtaatcatgctgacggccgccgccgaggtcagcgaccgcgtgagcgggctggacctaggggccgacgattacctgaccaaaccgttcgcctatcccgaactgctggcccgtatccgcgccctgcaacggcgcagcgggaccagcaacgcgaccgcagccgtgctcacgcgcggcgacatcaccctcgattccacacgccggctcgtgttccgcgaccacgggcgcacgctcgtcaaactcacacccaaggagtacggcatattgctggagctcatgcgtgcggaaggcggatacgtgaccgcgcacgaactctacgatgcggtttgggatgagccgaccgccgccgacccgaccgacgtgatcaaaaccaccatctattcgctacggcgcaaactcgccgatcgcgaggccatcgtctcgacacgcggggaaggataccggctgcaatgaaggcgacgaacacggcgaaagcatcaggtcgtatacaggcgcttgccggcaaactgcggcccaaatcattccgcgccaaactgacgttggccatcagtctcgtgttcctcatcgccatgggatcggcgaccctcgtgcagaccattgtggtcaacagcatgttcacgtacgccacgacggtcaccgccaaaaaccctgagatgcaggtcgaaagccagcacagcggttccggcaccggcaaacgcccggattccgacccgcgaatgttttcccggggaagcggcacaggtctgaacgatatcactggaacatccagcgtcggcggcgatatgggcgacggtgactatcaggtggaatggggcaaggacgggtcgtataccatcaacaccccgtatggcgtctccgtgtggaaccaggacaacatcgccaccggattgcgcatcagcgcggccatcatcttcgtgttcttcgggatcaccagcattctgatcatctggctggtcacctcgcgcatgtcccggcaactgacctccatcagcgcgcaggcggcggcattggacccggccaaacttgatacgcgcatcgacgtgaatgggccgccatctcgccgtaggccccagttccggcgtgcgggcagacgcgggaccgaggattgggatcatagcacggacagccgcacggacggtcgagctgccggccaatcctccgaagtcacgcagctcggtgacgccatcaacggcatgctcgaccggattcaggccgcatccgaagcggagcggcggttcgtgtccaatgcctcgcacgagctacgcacgccgattgccgcggtggagaccaatctggacgcgccgttggcccaggggcggttccccgaggatgtgcgaccgtcggtacagcgcgcactggatgccaatcggcgcggcgcgcaactggtgcaggcgctgctgaccttgtcccgtattcaaagcgggaccatcggcggcaagcaggcgggcgatgtgacacagatgagtcccgcatcaacggcacgcacatccacagatttgtacggatgcgtcggcaactcccttgcggatatcgacgatgccgccaccaagcgtcgcatcaccataaccgtgaacaaggccggcggcgacgcggacatgtttctcatcgccgccgacccggcgttgctggaactggcggtcggcaacctgctgcgcaatgccgtcgtgcacaacacggatgatgggtcgatcgacgtgaccgtcgtatcggatgaggatggaagcggaccccgtctgaccgtcacgaacaccacggatgagatgctgccggacgatctgaacgagctgacccaaccgttccatcgcggcgagaactcgcgtatcagcgccgtgcccggcgtggggctcggcctgtccatcgccagtgcggcatgcgaggcgatgggagccaggctggaactcggccaactggccgaaggcgagttccgggcgagcattcggttttgatggaacactcaggctccccttcaaagaggggagctctattgtttcgcacgcaaaaatcacagacagactattgccttgcgggaaatcatcgttagattggcgagaggaatattgtcaatgcatacgaaacggaaaacatcgtgaccgcaccgaacacgcccgccgaaacctctgaccagctcaacaagcccgccaaatccggcaaactggaggtctccgacctcatcaccatcggcgtgtttgcggccctgtacttcgtgatggtgtgcatcgccacactggtgagcaccctgttcaccagcggcttcggctccatcttcctgcccgccggacgctcgatccgcgcgcgagactcttccttctgctggtggcgaacctcatgctgttcttccatgtagggctcgccacgcaaatcgtcatggtcgtgctgttcctgttgcccctgctggcggccgcccgatggcgaaccgcgttgaacttcggcgtgacctatgccgtactcaccgcgctgggaatgctcgaccccgatgccctgggactgccgtggctgcatgtggtctccgcgctggccgtgggcgtcacgatgatgctgccctgtttcatcaccgactcgcatggctcaacggcgtggccgaccggtacgtggtattcgacggcggacatatcgtgcaggattacgaggccgatgaattcctgtccctctcccccggctgcgtgaccgccatgggattgcgggcgtttgacttggaaccgtatcggcaccggattgcggccctggcttcaagcccggccgccgaagacagcccgttccgctggctgctggccatcaaccctctgccttcgcgcaaggcgttcgccgagggcgggctgcccagccacctgcatttccagtacgccaacgatctgcacacgctcgtcgccacggatgaggccaccggcgccgagaccttgcgcaatccgcgttggtacgcacaccatgtgctccaacgagggaaccaccgaggaccgttgcgccatcatccgtgcgttgcaccacttgcagtagatctggcaacatacggcggtatgacggctccccgctagtgaaacagcatcgcttcagtagccatgcgagtgcagatactcatcatcgaagccggaataatggccgatctcgtgcaacacggttttgcggatctgttggcgcagctcggcccgtgttgagcatacgcgttcatgcgaccccttgaacagggtgatggcgtcccggcatcacgccgctgtagcccgtggttcgctttgtgatgggtatgccctcatacagtccgagcagctcaccgcacggattgctcattgtggccagttcgcgctcattgggctcgtccgcaacgacgatgccgacattctccagcacccgcgcaaaccgttcaggcaaatcatccaacacctgttcaatggcccgttcaaactcatcgtcaccgatgtgcatactcaatccttcacctgttgcttggctcccacgataacagacatattccgggttccggcttcttgcgggtgccataacgttgcgcggaacgcttccaatcattcattaggtcgattcttcattcattaggtcatgaggctgcgattgtcggtgttggaatggcaccattccagtggtgactgtcagagctcaccgacctaatgaatgaagaatcgacctaatgaatgcgtccggtcatatctcattgtgaaaatgacccggtattgcggtattccgcaattgcacttccaacgattctgaagtattcatccagattctgcgtggtagcgaacgttcttcttgtggcgggaaaagtcttatagcccgcgaaggagaggttgttccttttctcgatatctccttcccatcggtttcggtcatagtggtaccgtccgtcgtattccagaatcacatgatcattcggatacaccatgtccacaaccacctctttgttctgcaacgggaggtatatcggagcattcacctccaattcgggtaatccacgttttaccgattcaaggcgaaggatgctttcctgcggcgaatcggtgttctctctgcacaacgagagcgctttgcgaaataatctgataccggggaacctacctatatcggtgaggaacaacgatatcttgtctttcgttgtctgtttcaaatgctcattacggcaggtggcccaatccaaggcaatgaccatactttccacatcgacgaactgtgcgatctgacacagcgcctgttccactgaaaccacggcgataagatcatcaatcatcgtctggtcaatgccatgaccccaataatggcattgcgtttcggtaagattcgataatctttcagccccgtccaccgtaacgtgcagtttgttggggtcatagttgggcttgtaattcagcgtggccgtcatgccagcaagctgtagcctggtgccatggctgaagcaaagctcctgtgaagtgcgcatcgatctggcacggcattgttccagtgttttctgggcgaggtctcgcgcctcatcaagtgtgaagaacgtgttgtatgcataggactccatgccatccccccaatggttgtatccgtgaaccgcgttattcacggatacaactcacgatggcataaccaacttctgcgcgcaaccagctcggccgaatcggtggatatgtgtataacctgccagctcagctgttgcggttgatctcgatgtcggtgacggtgaggttggcctcgttgatcaggttgaagaggatgacttcggccagcggaccgggctgcatgaaggtgtgctgcttggcttcggacacgtaatcgtggctatcacggtagaaggcggtgtcgatgccgcccggatagacggcgaccaccttgacgctggtgcccttgtatgcggcctgcagactcttggtatagcccttctcgccccacttggtggcgcagtacacgctttcgttcgcgttgccgcgcgtggcggcggtgctcatgatctgggcgattttcacgtcacgctcgccacaggccttgagggtttccaccgtccacagaatcatgcctttgagccccttgaggcatttgtcaatgtcagcggcttcataggcggtgggcaccttgaacgaaggctggccggcgttgttgatgagcaggtcgatatggccgagcgcggcgatgctcgccacggattccttgacaaacgcttcgtcggtgatgtcgcctacgaaggcgcggtaggattcggctggccactgcgcgctcagctcggcctgacgttcggcgttgaagtcgatgccggccaccagccagcccttggcgatgagttggctggcgagctcgtagcccaaacccagcgcgctgccggtgacgatggcgatcttctggcctgttgtggttggcatggttgattcctttgcatgcttgcgagactcccctcagcgaggggagcctagggttaacccgttctttgctgacagctcccggtaagggggccacggtaggactattcttcggctacgagttcgaggtacgaatcattccagaggtcttcgtcgccgtcgggcatgaggagcacgcgctcggggttgagcgcctcgacggcgccctcatcgtgggtgacgagcacgatggcgccctcatacttggcaatggccttcagaatctcctcacgggaagcggggtcgaggttgttggtgggctcgtcgagcagcagcacattggcccgcgaggtgaccagcgtggccagagccagacgggtcttctcaccgccggaaagcacgtgagccggtttcatcgcgtcgtcaccggagaacaggaacgagccgagaatcgaacgggcctgcgtgttatcgagctcgggcgccacatgctgcaggttctccaacacggtggcgttcagatccaaggtgtcgtgctcctgcgcgaagtagccgatcttgcagccgtgaccgtattccacggaaccggtgtccggctcctcgatgtgggccagcaggcgcagcgtggtggtcttgccggcaccgttgtaaccgaggatcaccacacgcgagcccttgtcgatggccaggttcacgccggcgaacacgatgttggcaccgtaggccttggaaatatccttggccatgatcggcgtgcggccgcagggcgcgggctcggggaaacggatgtccgccaccttctcggccttctgcgcctcggaggtgttttccagcagcttttcggcacggcgcatcatgttctgcgctgccacggccttggtggccttggcgtgcagccgaatgccttgcttcatgagacggtcggccttcttctcggccacttcgcgttcgcggcggcggcgctcctcgtccaccacgcgctggtgcaggtaggccttccagccgagcgaatacatgtcgatctggccgagctgcgcatccagatgccagaccttgttcaccacttcgtccagcagttcggtggagtgggagatgaccaggaagccaccctcgtacttcttcaagtagccgcgcagccattcgatggaatcggcatccaagtggttggtcggctcgtcgagaataagggtgtcggcgttggagaacaggatgcgcgccagctcgatgcggcggcgctggccaccggagagcgtgccgagctgctgctccatgacctcctgcggcaggccgagcgaggcggccatggaaatcgcctcggactgggccgcgtagccgccagccttgtcgaagtcctgcatggccttgtcgtaccgggtcatggccttgctcatcacgtccggatccgggtcggtcatatccttttcggccttgcggatgcggttgatgatggtggcgatgtcacgcgcgctcatcatgcggtcgagagcggtctgcgtgggatcagaggcgtgcgtgtcctgcggcaggtagccgagcttgccggagacgcgcaccttgccggcggtgggcaacatgtcgccggtgatcacgcgggtcagcgtggtcttgccggcgccgttgcggcccaccagaccgatcttgtctcccttggccacatggaagttggtggggtgaagcagcgtgcgcgcgccgatctgaatttcaagtccctgcacctcaatagccatgaataacctacttgcc

SEQ ID NO: 907 - DNA, 5148 bp, Unknown
  R117_24m  MAG No. k141_2495
gacgaggcgaagcgtcagggcgcctcgcgcatgctgctcgaagtgcgtgtggataacgaccctgcgctggccctgtatcaccggttcggattcgaacgcatgggattgcgcaaacgctactaccagcctgaaggcatcgacgcatacaccatgagcttggacctgaaacctagggtcgtgggctttgccgccccgcagacggcatcggcggacactgaagacatcactggcaagcaaacggagaagaacggagaagcacgatgagcgaaccggttgtactgggcattgaatccacctgcgacgaaaccgcggctgccatcgtacgcggccgcgaactgctctccaacgtcgtggcctcatccatggaggaacacgcgcgatacggcggcgtgatccccgaaatcgcctcccgtgcgcacgctgaggccttcgtgccatgcgtgtccaaggcgctcgccgacgcgaacatgacgttggcggatgtggacgccatcgccgtgtccgccggtcctggactggccggttgcctggccgtgggcgtgtccggcgccaaggcgctggcctgggctgcgaacaagccgatttacggcatcaaccatgtgatcgggcacatcgccgtcactcagctgcagttcggcccgttccccaaggacacgctggctctgattgtctccggtggccacacctcgctgctgcatgtggaggacatgccgcgcaatatcgatgtggtgggcaccacgctggatgacgcggcgggggagtgcttcgacaaagtcgcccgtctgctcggcttcccgtatccgggcggcccgcacatcgaccgccacggacagaacggcgacccgcacgccatcaaggtgccgatgggtctgacccaaggcaaggccggtgccgcgcacccgtatgatttcagtttctccggtgtcaagaccgccgtggcccgttgggtggaaagcgagcaggccgccggccatgagattccggtggacgacgtgtgcgcatccctggccgactccgtggccaccgtgctagcccgtaagtccatgcgcggctgccggcagtacgattccaacacgctgatcgtgggcggcggcttctccgccaactcgcagctgcgcgccaaactgctcgaattcggcgagaactacggcgtcgacgtccgtatcccgcaaatcaagctctgcaccgacaacggtgccatggtcgccatgctcggcgtgaacctggtcgaagccggcgtggcccccagcgcccccgacttcccgatcgactccgccatgcccctgaccaaggtctcgatgtaagatttgcacggtattcccagactgatactgggaataccgtgcctctcatcggtgaattgacagtgacctgtctgcctgatgtgagtagtggtgaggtcttcgccatggatttcccggttgatgatggggtgtcgtgtctggtcaccaatgcaatgaaaataaaaaagcctcggagaaccgaggctttcgatggctcctgcgactgggcttgaaccagtgaccgtccgattaacagtcggatgctctgccaactgagctacgcaggaatattcaattttcatcccgtccggagttacccgttcaggtgagctcctgcgactgggcttgaaccagtgaccgtccgatatacggttctggcttgcagccgtagggcttcttgcaacaggagtagagagtacacctgctttgcttgtccttcaaatcggcgtgtctcgacaattcctctcgatgcacccggttttccgaagagcttcagccgtccgcgataacattggctaggctccatgcaatcgcaaatagcattttctgggaagtgacgaagacgtcacttcctttttctatgcgaaggagctgccatgaagtactggaactcgaacaggaaaagctgcgagcatgtcgagccacgcgaggattggaaggaatccatcgaactgtggatcgactggatggaagccataggccgtacggaagagaccttgagaacccgatggtaccagatcgtccgtttctccaaaatcgtgaacaagagcatcacggacgtgaccgaagacgacctcatattctatcttgccggcatgggcaccgaaggcagacgcggagtgcgcagctgcgtcaaggtcttctaccaatggggcatgaaacgcgggctcgcccgctgcaacccggcggactcgtgcaggacgagatgcgcaacgccgtggaatccaccacacgcaccgacatgagattgaccatgcccacgaaccaaatcgtcggcgcaaacggcgtcgccacgtactcactcagcaccgcaagaataggatagacaaaaaaggtatgcgccgacatgcgcaaagaagcatgtcggcgcataccggcaccgatatcagaggcgtctgccctcgtcggcggaaggcatcaggccggacaacatgcccatcggatcatcagtcatggatacggaatcatagatcggatcgattttcgtgttcgcactatccaccagcatgaggatccggtcacggatacgaggctccacatccgagtacgcctcctcgatgttggaaaggaccagaccggccatgtgcctggcctggccgacgacccgctcgggatcgaggtcgttttccaatgccagcttctcccaatgacgaggcgtcacatccctggcgccggtgacgccgccgatgcgcatgggcagctcggcggacacccaaggccagaaggtcgtggtcaaaacgtcgtacatgggagaaagttctccaggaacctgccaggggctttccttgcccatttcccgtcaagagggagggaaaggcttatgggcatatccacacccttggcgtattcgagggaaacattcccttcggaatcctccagaaacacaccaacaggagaatcgcccatccaggcgtgcagctccctcaccgggcgctcccgagactggaaagcggcaacgcggctatgtctattcccagcgcatcggctgcggggaacaccgcttcaatcggagcttcgccccgctggagcaaatcatcggcggaccgggggtcgatgccggcccgggaggcgagatcaccggcgttccaggaacggttcgccgcctcttcccggaaagcagccgcgatatccgattcggtgcgggcgaaaagagtccggcgtccacgcggcgcttggaaacggctgagataacgcgcgtactccagttgcgcctttgtcggctcaggcggtttatagtccagattcgacattgcaggcctccttaacactcgattattctagcctatacagagaaaaaggacatggaatcatcgttgccgtccgatgatcccatggatggctcctggagacgcatttcctcgatttctgctgcggtctgcttcgtcgcctgttcgagctggtcgcacaggctgacggtcttgcccgtgaaagcggccgcgaggtaatgcgggtcaatgtccaaggcgatggcatcggcgcttcacaggcattccccggcctgctcgatcaatctcatggcctgttccacacgcgccttggcaccattgagaccggatgcttcaagcccctgttccatgggctcgtccgaccaggagcggatatcgagccgggtatcaagcgtgaaatccacccccgcgtcacgcaacgcgggcacggcgctgcgatagcgcccaccctgccagtccgctgtgacccgatccgcgagctcctcgccctgagtcccgcattccccggcgaggaatccgcgcagcgcctcctcgtcatcatcctccatgagcgcggcactgacggccacatggttccgaccgtcatacgactcgaaatacagcatcgtgtcgggcaaccggtcgcggtccgccacggactgtccgccaacggcaacgaccacgtgcacatcatggtgcagctcgccgccgacgacgggtggatcaacccgtaccacgaccggatcaacgcgcagagatcatgcaggcggatggagaaatcgcgccccgaactggtcgagctcgcacgctccgataccggcacgcgcgtcagctggcagtacgggcaatggcgtcaatgggccgaatggaaggcgcggaacgggtacggcgacgacatgagattgaaacgactgcgcgacgactgggcggacgatgccagaagccgcagcctcgccgtccaggaatggcgcgccgcgatggagaaccgcccgcccttcctcgatgacggacgagaaagacacccggagaatctgtccacgcacgacatggaacgcctcgtatccgaagcgttcgccatcgccgccaacctcaacagcgcggcggacgacgacgaataccgggcagcgatgcgcgagggcctgcacacgttcgacatgctgcgcgaacgctacgggcttacgcaggacggcctgtggataacggccacagacatgaacgaaagccctataccagcgcacgtaggaaaaatttgacagcagcctcgaatccctacctccgtcgcatgtcggtgcaaactcagaaggaatgtcctcccgagagtacacatccgctctcattcattgaggtatcgcgcgtaacgagttttcattgtaaatgccacggtatggtgacggattttggaggacgataatgacaatacaatatacagcgcagccggctgatccggcgtcgagtgcagtgctgacgcgcgggctggtgaagcggtatggggattttctcgcggtgaacgggttgaatctgaacgtgccggcgcatggcgtgtatggtttgctggggccgaatggtgcgggcaagtccacgacgatgaagctgttgcttgggttggcctcggccacgagcggcgatatgtggatgttgggggagaaggtgggtggccggcacaggttgcaggcgggccgggtcggttcgatgatcgaggggccgagcttctacccggggttgagcggtctagataattgccgtatggtggccgattacctgaatctgccgggttcggccgcgcccgcgattttgcggcgggtcggtctggccggccatgagggcaagaaggcgagggactactcgctggggatgaagcagcggctgggcatcgcgatggcgttgatctcgcagccggagctcctgttgctggacgagccgacgaacgggctggacgcgga

SEQ ID NO: 908 - DNA, 44949 bp, Unknown
  R117_24m  MAG No. k141_2749
cagcgaaggcatggccacgcttgaattcacggccaaggcctccggcgacccgtccgctatcagtcaggatattctcgaccgcgtaaccaaagccaccgccgacgtggcactggagggccagccaccgctggtcaagttcaccggcttctccccttacggcatgaccggccaagtgcttgtgttcgcgcgcgagggtgtgctgccttccaccatcaaagatatggcggcgcgagccatcgccggttcgggcactaaataccttgttgaagatggcggctcgtcagacaatctgtgatatctcccggctcgcctctctgggtccggctatgacagtcatgcgaacagcatccaaccggtaagcatcacagtcaacagtaggtacgagataacgccgggattggcataggcggtgcgtattttaagccccgcaggcaactcctctggcgcaagatagaactcccagctcttgcgcttggtgataagcagcacgataccggcaatgcagaggcccaacatcactgtgccgtacaacatcatgatgcccatgccgcccatgttgccggtttcagccatacgcatgatttcggcctcgctgattgtgccgtcgaggatgcggggatcgatctgttgtatcaccaatggggcgagcactgccccgttcaggttgatcagcatgtgcatagccactgaataccgcaggcgggaggtgcgtgtgtatacatatccgaacatcagtcctaggccaaaggcgtagaagaactggaacacgttcatatggaatagcgcgaacgccaatgcggagaacatgattgcggtcttttctccgtaccggcgcaggcgggagataatctccttgcgaaaaatccattcttcgcaaaccggtgccaacaggcctatgaacaatgcgttcacccgccagtcgctgccaagaatcacgtcgttgatgcgattggtggcctgaccatcagtggctccggcagacaatatattgccgatcatattgcccaagagcattaccggaatgcacatgacgaaaatccgaatgaactcccccgccttcatggggtactgccgggtgcgaataaccggtacgcgagtgaaggccaacatactcagcggcatggccaccacatacagcggcccggaggaggcgagcagcacagcccaagcgggcacatcggcgccaagcagcgttcgtagtgcttcagtggccagaatattcagcccgatccagaacaccatcataatggcgagcgccgagccgattgtcgaaaaccggcgatgggccgtgaaccaccaatcgcgtggggtttgttgcggctgctgcgccgacggcattggttcgctcatacttatcccccatagtcactggccgcaaacggaccgatcacacgtgcaatactcttcaagaatacggcacggcgtttcgattgcattgggaatggggaaaatcatcaatgggcaaggaatgatctacgtcaatcaatccccatgccgagagagtcctctactctgcgggattgttgtgggacggcacgcgattttgcccgattttttcgcggcggcccacaccactccacatatgactgatgacgccgcacgaagaaatggcgtcattgcaacgattcctcaatacaatctgtgggacggcacgaatgtacatcgtttgacgttcatgccatcccacaccggcgtgggacggcacgcgataatcgcccaaaaatcgccgccgtcccacacatatcattgccgataagccattcgacgatcgtacagtcacaaaacagaacagaaccgcacgatcatcgcaacgccattcagcaggcgagcgcggcgaccggacgcggggcgacaatcacgtcatcgcccaccgccagaccggccggcagctcgctggcgggcagctgcacggtggccttgagctgttcacctttgttccagtgctggtattcgccggaggtgatgaccgtgtccacacgaaccaaagagccaaggaagtgaatgacctccacgcgggcgcgttcgccgacgtgcgaatcgctgctgccagccaaggccagcatcaggttctccgggcgcacgagcacggccacggaatcgcccttggcggagccggcgagcagcggcacgcgctggccgaagaccacggcctcgtcgccattggatgcgccgagcaggcggttggtgagtccaatgaacgtggccacgtactcggtggcagggcgctggtacaggtcctgcggggcggcgatctgctcgatcttgcccttgttcatcacgccgatgcggtcggccacggccagcgcctcttcctgatcgtgggtcacgaagacggttgtggtgccggtggtgagttggatgcggcgaatctggtcacgcagctggacgcgcactttggcgtcgagcgcggacaacggctcgtcgagcaggagcacgcgcggcttgacggccagagcgcgggccagggccacgcgctgctgctggccgccggacatctgctgcgtgtacttcttggcctgatcggcaagccccacgagctccagctgttccatggcgatcttgcggcgttcggccttgcccatgccgcgcacttcgaggccgaattccacgttctccagggcggtcatgtgcgggaacagcgagtacgcctggaacaccatggccatctcgcgcttgttcaccggcacaccggtgacgtcctgtccgccgaccatgatgcgtccgccttggatgtcttcgagaccggcaagcgatcgcagcgcggtggacttgccgcaaccggatccaccgagcagcacgaccatttcgccgggcttgatgtccaggttgaagtcgtcgagcgcgtgaacggtggagccgggatagatcttgacgacgttctgcatctgaatggaaccaccgccgcgcttggcggtgtctttgagcagggccttggcggccttggtcacgtccttgccgcgcacgccctcgagggtagcggtgggatcgttcttgaaggcgtcctcggcagtggaggacacggctgccgggatggccggggacgccggggcggcgtccactgcggtaccggtttcctgacgggtgggagttgaatcgttgttcatcgggtcacttaccttcccttgacttacgcattgcgtcggagatcaggtcgagcgcaacgaggagcaccacgccgaagagcagagccagcagcgacatggcggtggaaatttgggcattggattggccgagctggtagagcgcgacctgcaggttcatacggccgagcagcgaggcgacggtgtattcaccgagtaccacggcgatggagatgaaggatgccgagaggatcgactgccacaggttcgggatgatcaccttgaagaacactttgggccaggaggcgccgagcgatcgggaggcttcgaccaacgtcttgacgtcgatggagttgaggcccacggcgatcgcgcggaaggcgaacggcatcacgagaatcacataggcgaagcacagccagatcgggttggtgctcaacacgtcggcggaaagccaacggtagatcggcccaagacccaccaccagcacgatggccggaatggtcagcggcagcgtggccacccattcgattgcacgctccaaggctttggagcgaatatgcacgatgaccatggtgggcaccagcaggatgagcatgatcacgacggtgacggcgctcaacgacagcgagatgccgacgccctgccatagcacgctcagatcggcgcccaacgattcgccgttgccggtgaaaatcgccgtccacggcgcggccgaccagcgaccggacaacgggtgacgcagggtgaagatgaacatggccagcagcggcacgaacaggaacgccagggtgacgaacaggatcacgaatttgatgatgctctgtttgcgcacgcgggcggcacgcagctgcggcggcttggttgtggaagtttcggtcattgccaacgtccggccctcttttccacggcgtggctcagcagcatgacgatggccacgacgatgatcattgcgaatgccagcacctgcgcgaagccctgctggttggggtccatctcattgcgcatggcaccttggatcatcaacggcaccagaatcgagcgctgcgagaacagggctgcggcggtcgcgtatgcggagaacgcggaggcgaacaacagcaggaacgccgagatgaagcggggggcgaggatcgggcaggccacgcgcgtccagtattggacggtgttgccgccgagcgactcgcaggcttcgcgccactgtggacgaatggaatcgaccgcaggcaggaagatgatgatcatcagcggaatctggaagtagcagtagacggtcaccagccccggcagggagctgagccaattcgggttcacggtatagccagtcagggttttgatgagcatggtgccgatgccgttgatgccaagagtggcgatgaacgcgaacgcgagcatcacgccgccgaactgggcgagcaccgatgagatggcggcgaccatacggcgcagcggtccgttcggcttggcgccgatcaccagcgcgtaggaggcgagcgcgcccaccacggcaccgatcagggatgaggccacggacaccaggattgacgtgccgaacgcggcgatggtgttggcttcgaacatcttgtggaagttcgcaagcgtgaaaccgccgctgcgatcctggaacgcgccgatgatcacgatcacggtgggtgccagcaggaagcaggcggtgtaggcgaagaacgggagcgtggtggcgagcgtgccaagctcctgacggtgcttcgccagtgcggacgaagcgggggtcgatgcggcggacggacccgcggccttggaggcggcgggtccgttcggtgcgatgggtgcgattgcggcggtcatcgtggactctcagttgccgatcgtcttgtcccagttgttttgaagccactcggtgatgcgggtggagtcatcgttgctgtaggtgaccggctggccttcgatggtgatggcgtccttcagggtggcctggtcgacggtgccgtcggccttcatggagtcgagcagcaccgggttggcgccgcccttgaaccacaggttctgggtttcggcggtgtacaggtattcctcccacaggcgtgcggcggcggggtgcggcgcgtccttgttgatggcctggttgtagtagctgacgacctgggctttggggaaggtcttgtacttccagttcacgcccttggacttgagttccttcttgtaggaggcctggttgtaggtccagtcgaagaccacgccggtctggccggagtcgatggtgccgttggtcacatcgatggtgttcaggttgccggcttccttgagcttcttgaagaagtcgagaccgggctgaaggttgttgatgtcgccgccggcgagctggttgaccatcagatagccgttgaaggccgcgccggcctcggtaggcttgccgttcagggacacggtgccggcgaacttcggatcgagcaggtcgttcagggaggcgacatcgccgtacttgtcggcgttccagcccacggacatgatgccggtgtagtcggcgtagtaggcgccgtcgacgttcttggcagcatcagggatcttgttccaggcctgcaccttgtacggggcgaaatagtcggtggaggtggcggcgatggcctggccgacgtcgaagacatcgggggcggcgtcggtacccttgttggtcttggcggcgtcgatctcctccttggaggaggcgttcgggttcagctcggtgatcttgatctccgggtacttcttcttgaagccctcgatgacctcgccgtagttggaccaatcatgcggcaaggcgatgacgttcagcgcgccttcttccttggcggccttctcaaggtcctccatggtgccgaaatcggcgagggaggtggccttggcggacttctcgttcacggtgacggccttgccggtgccatcggaggaggcgttgctcgagccgcaggcggccatcgagaacgcgagtacggcggcaagggagccggccgcgatcttacgcaggttgttcatactgttccttttctcaacatcatccagacgacagtctggggagtcgggcttggtatgcgcggcattcgcgcggcccgtgaatccagaaaagaaactatgcgcctaatctgtcctgacactggcgtgcaagtgaattgcgtccgccatttgccgtacgcctgttgaacttaggaaaacttggcatgaattactgacaggtatgggcaatgtgtcaatagcggaaccggcctgcggccgattccgcaccacacttacctcagcacgccctcaatcaatcgcgtgatgagttcggtgtagctcactccggtggcatcccaagccttgggatacatagaaatcggcgtgaagccgggcatggtgttgatttcgttgaccatcaccgtgccatcaggcgtcacgaaggtgtccacacggctcaagccggcaccatccacggccttgaacgcacgccgggccacgtcacgcacgtcctcaagcacgctgaccggcagattggcaggcacttccacgtggctggcggaggcatccatgtacttggagtcgaaatcgtagaactggtcgtcgttctgatgatcgagcacgatttcgccgggccagctggcctcgggctcgtcaccggccttcgggcacagcacggcacattcgatttcgcgaccatcaatcccctgttcgacgagcaccttccaatcgtgctcgccggcggtggcgatggcggcggccagacgatcctgctgggtctcgcggtcatcggttttctcgaccttggtcacaccgaagctggagccggcgcgtgaaggcttgatgaacagcggataggtaagaccggcgtcctcgatcttggcaagcacatcggcggcggtgaagttgcgcgcatcgaccgtcacacccggcgcggtgggaatgccggcggcacccagcaccaccttggtgtaatgcttatccatgcaggcggcggaagcaaacactccgcaccccacgtacggcacacccatcatttccagcaggccttgaaccgtgccgtcctcgccataggggccgtgcagcaccggcagtaccgcgtccacatggccaagggaggtcagcgcatggtgcatttccgggtcggacatgctgacgaagctggtgccgaagccggaatcggcggaattgatgcggctgggctcgccgatgaagaaaccgtcctggccgcgagaggggtcaagcatcaccgggcgcgattccggggtgatctttacggtcggcagctcgccgccatccagattccagccacgaggatcttcgccgttgatgatccacttgccgtccttggtgatgccgaccggaatcggctcgaaccgttcagtgtccatggcccccagcacaccggcagtggagatgcaggaaatcgaatgctcgtctgcacgcccaccatagagcaccacaacacgcttcttggccataaccatccttttattgaaactacaaccgttttcaagcctatgctttgcaccgccaaccggaccgaaccgcgctcggaccgccgcgcacaagagacgcacaccagtctactcgcgcacgtcaacgacgtatacgccacacgactttgcacgtacaacgtatacgccacgtatacgtcgcttctctcgttattcgccggtaacctcgtgcccgaacagtccggcaagcatctccgagcaggaaatgccttcgttcagcacgcggctcatctgatacgccaacggggtcggcacatcaagctgctcgccaagagccaccaccgcatccgtggtgggcacgccttcggccaccccgttgctgaccttggtggcctcctcgaccgtcaatcccttgccgagattcgcgccgaacgtatagttacgagacagcggagagccacaggtggcgatgagatcacccacaccggccaagccgaagaaggtcttgggatcggcgccagcggctgcgcccagcgcggtcagttcggccagtccacgagtttcgatcatggctgcggtgttctcaccgtagccggcaccacgggccatgcccacggccagcgcggtcacgttcttcaggctgccgcacatttccaggccgatgacgtcggtggtcacgaacggcttgaaataggaggtggtacatgcctcggccaccttcgtggcattatcgaggttcgtacaagccaccacggtggcggcaggatgacgatcggcgatttccttggacaggttcggtccggaaatggcggcgaaccggtcggccggcaggtcaagggattcgcggacgacttcgtccatacgcttgttggtgccacgctcgatgcccttcatcaggctgacgacgatggcgtgatcgggaatcagtcccttgaattcgacgagtgccactcgcgcgaactgcgcggcgatggccacaaccacgatgtccgcgttcttgacggcttcggcgcgatccccggtggcggtcatgttgtccggcaacttttcgacggacggcaggcgcacggcgttgtggtggtgatcgcgaatgccctcgacaatccgctgctccttggcccacatggtcaccgtgttgccggcgtccgccagcacttggccgaaagcggtaccccatgctcctgcgccgagaaccgttatatttttacccatatcagattcctaccttcgcttgtcgcgcaacttcatcggcacaatcttgtgccatgctactcgcctaggctccccgtacgggaaccggtgcggctacttctcagccgggaacgggccgccggcttccggccaaggcttgcgactcatgctgcggtagtcccagtagccttcagcggggaactgctcgccacgaatttcctccagtactgtgttcatgcgtttgagcacgcgccacatcagctcgttcacggcctcggcaggcggctcttcaccccatgagtccatgtcggcaagcagatcggagtaatcgagcgcatggtcatagcacatcaccacgtttttgcgcggccatggccaccagtggttgatggaggcggcaccccacgtcaccgccgggtacagcggcacctgatgccccagtctgcgcgaggattcaagggcgatgtatcccacgccctccttaatgctcatcacccactttttcgggtcgcgggtcacggtgccttccggccagaccgtcagcgggcggccggacgtcagaatatcaatcgaggtctcttcgatctgcttggccttgcccgaatgacgctgcaccggctgcatgccgaccaaccggaaccacttgccgatcaatggccacttcgccatctcggccttggccatgtaccgggggcggcggcccatgtggaacaggctcatcatcggcacgaacacatcaaacatggtgatatgactggcggcggtgatgaacggtccggtttccggcacctgctccaggccccaggccttggtcttgcagctggcgcggaacacaatggacacccctcccagcagtcgtttggtggccttgggattctgggcgtcgatttccggctgattgggcgtgcgagggccggtcgggtaatactgtgtcgagtccacaagcgtgtggcgggcggccagacgcttgacctgctcatcactcagcgggcttacggccgaacgcggcgacggttttcctttggatgccatggtctctattgtggcacggaccaccgcccaacgattccagcgcaacattcccgggaatgtgccgcggaaccacccctcgcaccccgcctagcgcgacattcccgggaatgcgtcgcacaatacgcggcggcccgtctgcacacaccatgcgcgcagacgggccgccggggaaacgttcgaatcactccaccgcgatggcgtcgatctccacgagcgcgcccttgggaatcatgttgttgccaaaggccacgcgggcgggcttgacggagccgatgaacgcctcagcgtaacgtgcgtccacttccttgaagtcctcgacgttcttcaggtagatggtggcacggcacacatgctcaatgccggtaccggcagtgtcgagaatgtgcttaatattcttcagcgcctgtgcagcctgctctccagcggtctcgcccgccagttcgccggtggccggatcaatgcccagctggccggatacgaacacgaagccattggccttcaccgcctggctgtatgcgcccagcgcggccggcgcctcggaagtggctacggcttccatcttttcgctcatattgtgctccttctcatcttgggggcgcccacctgctgcggccggcgccggtacacatcaccaccggctacgaccaatcgcacgatcagcaacgattggcaatgccgattacgtagcagtctactgagcgaagtcgcgtttagcgcgcatgatgcccggcatacggccatcaacagactattccttgctattccagacgattccagacgattcgactaccgttctcgccaaaccgggcggtttttccacgacccaagcgagccggcatcaccgacaccagcaccagcaccagcaccagcaccagcaccagcaccagcaccagcaccagcaccagcaccagctttgcacgcgcttaatatcacgcgccgaatatgcaaaaggcttccggcggctagccgaaagccatgctggtgggcttgatggggatcgaacccacgaccttctgttccggagacagacgctctatccactgagctacaaacccgagcaacttctttactgtacaccacatcacgctgcatgaggcacatacgtcgccaaaataacgagaaaatcgccatcatcggctctacaatgaggttatgtcggaacctacagatgacttcgaatacgaacgccgcttcttctgccgcgagctgccggcggaatacgacgacggcgacgccccgaccctcattattcagagctactacgtgcatgccgacaattacgccttgcgcgtgcggctggtctcgcacaaggttcacgtcgacatgacgcccgacgtaaatccggtggccgtgctggacgagtaccgcgaccggttctcggaagcgtatgtcaccgtcaaaggtccgtccgtgggtggcacgcgctacgaggtcgagcgcgagatcgacacgcgcatcgccgccgaactcatcaagcgcggcggctcggtaatcatcaagaaccggtattccgtgtggattgcggaagacggctggagcgtggacgtgttcggcgggccgaacgcgccgctcatcgtagccgaggccgaacgatccgggccggttaccaatctgacgattccgaaattctgcatcaccgaaatcaccgatcaggcgcgattcaataacgatggtctcgctaaccgtccgttctgcaagtgggcggatgatttcgaggaggaactggcgctggaggggccaaggttccagcaatatttcgggaagaatcggatggtttaggggaagcaatcaagtacgttcgcgcgcttccctcagtcatctacgcctgacagctcccctcaaagaggggagccaaaaccaatcagtacatgagggtggctaggcgacggcgggcgcgagccagacgcgggtcggtgggttcggggatggcgaagtattcgagcagacgcttgcgaaccggctcgatatcagccttgtgcccggcggccaaaaagtccagcaaacggtcgaaagcgtcttgaatctggccaccgatcatgtcgatatcagccacagccaactgcgcttccacatcgtccggcgctgcggcggcagcggcacgcacgtcacgtacatcagcggacccggagcgggccagcaacagcgccttcgcacgttcgcgggcggccagtgcatcggacgggtcggattcgagcacgcgctcgtattcggcggcggcaccggcgtaatcgccctcctcggccaaacgatgggcttcggcatgctccggcggcacctgctcagcacccacgccggcaccggtggcaccagcgctcttggcggcatcggaatcaggatcacccgagtacggcgcggtaccgttcacaccagactgcgcggcggcctgaatgatcttcggaatcacctcgtcggtaagttgcttgagctcgtcgtcacccggaaggccctgcaacagtggcatcggacggccggcaatcaacgcgaacagtgcgggcgcgccctgcacctgcaacgcttgggcaatcgaaggattggacgagatatcgatacgggagagctgaatctggccgttcagggcgttcaccgcgtcgcccaacgcacgggccatcgggaacaggcggtcatcggtcggtatccacaggagcagcaggatcgggaaggtcgcagaagtctgcaccattgcctggaaggtgttttcggtggtgtcgatcacgtacccaccagcggcaggagcgccacccgcctggccgggctcggccttgacctgatgcttcagcgcctccaaatcgacggcgcccgccaatgagactcccggattgaactgctgctctgccataatgcctcccgattccacgcgattcgcgtacaacaacaatcacatttgctgacattgattgtaatgccgattcccaccacgtagggattcttccactacgcggtgaaattcccaccacgtagcaaaacgcccaccacgatgtgactcaaaacggcaccattgtgcgaaaggtaaaacttaccgacatcgtggtggatgaatcatatcgtggtggggcgttaaccgcgcggtgggcggcggcaacaactacagcgcttcgacctttaccggctgacggtcggcacccacggcggtgatttgctcaccggagcttgccaacggaatgtacaaggccaccacgttcacatacgtgaccttcatggtgctggtgtacttgtcgctattgaacagcgccttctcgtcgtcggaagccggctgcgattcgcggccatcccccgccttgcgagtccattcgccgttaatacggccaaccaccaaatcaccggcaccgtctgcagcacgcatcacccacatctgttcaggcacaacggtgaatttctgctcctgcgtaccgttgttgcgttgcataccttcctgcaccttggccgtggtattggccagttcctggcgcagcaaatcgtctgcgaacttggaagcgtattggctcttggagccgttctgcagcacatcggcgtattgggtcaaggcatcggcgggagtggccaccagcttctcatcctttgcagtgcccatctgcgagccaatagtcggaatctcgaacttcggcagcttggccccctcaaacagtcgagccatggccatcagcttgtaattctgccgggcggattcctgatcgaagaccagcaaacgcttggactgctgatcttcggtggtggtcgtgatggtgaacaccgagcgaggccatccgtcgtccatgggaatcaccgtctgggcgatgtccttgggaatggtcgcgtatttggacataccgccgccgcgctggttgatcgtggtctggctgatgcgaatgtccagctggggcccgcccataacggccgcatatccatcgggattcttggcctgatcggcttcatcgatcgtcttgagaatcttcaggcgaatcttcttctcctgtgcctcggtcaaatccggcgcaaccttggtggaggtatcagcagccggcgtcggcagccggccttcacaggcggtcaacggcacgaccaacgccacgcaggcgagggcggccacacacagtttgttccatcgcttgttcatcagctttcctcctgtccgtcatcggccgagtcgtctccggtattgacctcttgggccaagcgggagaagtaggcctgcagttcgtcaggggtgattaccgaagtcgattcgttatcgccggcgctgaagccggtctcagcgccgctctcggcaccagtctgctggtcggcgaccaggttacgtgaacttgggtcgatgataaccggtgtttcggtggcttcagattgcgaggacgcacggcccgaacgccgatttgtggcgtggcggcgacgattacgtcgacttgcaccatccggcttcccggacactgcgatgctggcgggtgcctcttcctcaattacggcgcttgccgtgccttccaccatgcgcttgcggcgcttatgcggcggcatggcgaacacggaggcgcacaatacggccagcacggccagcaatccaccggacagatagaacggcatcgcaaagtccggcacttcggagcgcacccagtgcagctgcaccttggcgttggtggcattttcacccaaatccacaatggccaccgtcgaggcgccggtcttcttgctctccagcgaaacggacccggtgccgcatttcacggcagtccacatatcggaatccttgaacgccaccgcgtcatcggcactggcaggcgctccctgactcgtgctgcttcccttctgggtgctcagctcgctccatgacgccaatccggtgatacgggtataggacttctcggacgcgacccatccggcaacatccttggacggacccaacgccacgcacgcctcgtcctgagaggatcccgagtccacggttatcgtggcgttctgatccaacaaggtcagcacattcggatcagtgacggcataccgggagccgctcatggttgcggaagcggtgatttcagtggagggcttccatatcgtggcattcatgtaccccaacaccacagccgccacggccaatagaccgaagataggcgtcaccactccacgcatgatcttggcatgacgggatggacgcttggcgcccttatccggtcttgtagtctgttcttcagcactcataacttaaccattctacaatcttcacctgtttattacctaggagcgcagaaaatcaaggttcaccagtagggtggtgtgtcatgcgtaagtctgttaaatctatgttatcccctctcggcaaggccgttgctcttgcctgctcgctggcgatgtgcgtatcgctggctgcctgctccagttcgagctcggactcgaaatcctcttccgactcttctgacaagaaggggcaaattgccggcgtgaccgccaagggcaagctcggcgagaagccgaccatctcctttaatacgccgatgaccgtgtccgacggctcctatgtggtgctgcaaaagggcgatggcgacgtaatcgaggagggcgaccgcgtctgcgcccaaggcatcgcgctcaacgttaaagacggcaccgagctcatggacacctggaccaagaacacgccggattgctcgctgaaggtggattccaagaccctctcctcgacctactacaaccagatcaagggtgccaagatcaacaccacgatcggctttggcgtcaacgctcaggattcgtccggatactcttacattttggcgatgacgtttgtatccaagtccaaggacctgaagaaggccactggcgaggaagtcaaggatgtgccggccaatctgccgaaggtgacgcgagccaagaatggcaagccgtccattgacatgaacggtcagggttcggttgattcgctgatctcgcagacgctgatcaagggtaacggcgccaagctgaccgacaagaacaccgtggtggtcaagtacaccggttggcttacggatggcaagcagttcgattcgtcctgggatcgcgattccacaatcgacgccgatctgttcagcgattccagcggccagcatcaggttatcgagggctggcagaagggtctggtcggccagaccgtcggctctcaggttctgctggtgattccgccggatcaggcctatggagataaggagcaaggttcgattcccgccaactccacgttggtcttcgtaatcgatattctcgccgcgtactaaacaatctcgatggctctccccaagaggggagctggcagcgaaactgactgaggggaggcctcacggaatataccgtgaggcctcccttcagtctctctatgtacgttcgaaaactccccttcaagagggaagccaagaacaatcagaacagcctgagactgtcgtcctcggtgcctttcatatcgtcgtaatcgaggatgaggcaggtgaagccgcggtccttggccaagacctgggcttgcggcgtgatggtttgtgcggcgaagatgccatgcaccggggccagcagcggatcgcgattgagcagttcgcagtagcgagtcagctgctcgacgccatcaatgccgccgtgacgtttgatttccacagccacatgctcgccctcggcattcacggccatgatatccaccggaccaatggcggtagggtattcgcgacgcaccagcttggctcccttgccgatacgctcgatctgctcggccagatagcgttgcagatggtcttccacgccatccttgatgagacccggatcttcgcccagatcataggtttggtcggaatagatgtgttgcagcgtcacttcaagaatgtcagagcccttgtcggcgctgacacgtagcaccttttccggctcaccagcggcgacactttccggggaatgcgtcgcggaatcaccatccacagccccaccagcgacactttcccgggaatgttgcgcggatttggcggctgggtcgatctcacgaatcgtgcagggcgcggtcatccagttcagcggcttgtaggagcccaattcggagaaaatcaacaggctggaatcagccttgatcagcaatacacgcttggccaggggcagtgaggcgttgaggcggcccgaatactcggccgaacagtcggcaacaataactcgcataggccaccactgtagcgcaacacatggcatacatagcaaaaggggctctctggaaaaccagagagccccttgaggagttggttcagatcactcggcggtgccggagtactggacgtcgtggccgcgctcgaccgccacggtgagtttgttcgagtcgaaggagatgaatccgtcggtcacctcgaacatgtggcgatcgccatcgggctcaaccacggtgagcgtaccctgcttgatcaccgtgagcacaggctcatggtcgggcaggatgcccatgccgccctcagaggcgggaatggtcacgctcgtcgcctcgccgtgccacacagggtggtcagcggcgacgatgttgaccttcatcgtggttttttccgcagccatcacgcacccagttccttctgcatgttgtgccacttctcttcgagatcatcgatgccgccgataccggagaacgcctgctccgggacgtcgtcgtacacgccgtcgcagatgcgggtgaaggcttcgatggtctcgtcggccggcacgtaggagccggggcgaccggtgaacttctcggcaacgtagaagttctggccgaggaactgctcgatcttacgagcgcggttcacggtggtcttgtcctcttcgccgagctcgtcgataccgatcaaggcgatgatgtcctgcagctccttgttacgctgcagaatcgccttgacgcggttggcgcagtcgtagtgagcctggcccacgtaacgcggatcgaggattcgcgaggtggagctcagcgggtccacagccgggtagatacccttggaggcaatgtcacgagacagctcggtggttgcatccaagtgggcgaaggtcgtggccggggccgggtcggtgtaatcatcggccggcacgtagatggcctgcagcgaggtgatcgagtgaccacgggtcgaggtgatgcgctcctggagggaacccatctcatcggccaggttcggctggtaacccacggcggaaggcatacgacccagcagggtggacacctcggaaccggcctgggtgaagcggaagatgttgtcgatgaacagcagcacgtcctggttctgcacgtcacggaagtactctgccatggtcagtgcggtcagcgggacacgcagacgggtacccggctgctcatccatctggccgaagaccagtgcggtcttctcaagcacgccggcctcggccatttcgccgatcagatcgttaccctcacgggtacgctcgccgacgcccgcgaacacggacacgccaccgtggttctgagccacgcgctgaatcatttcctgaatcagcacggtcttgcccacacctgcaccaccgaacagaccgatcttgccgccctgcacgtacggggtcagcaggtcgatgaccttgatgcccgtttcgaacatctgggtcttggactccagctgatcgaaggccggcgggttgcggtggataggccaacgctcggagacggtgatggtctcatccggcttcttgttgaggatgttaccggacacgtcgaagacgtggcccttggtcacgtcgccgaccggcacggagatcggggcgccggtgtcggagacggaggcaccacggaccaggccgtcggtgggcttcagagcgacgcaacggaccgtggaatcaccgaggtgctgttcgacctcgagggtgatctcggtctccttcgcctcgccttcttccttggcgccggtgttgacgatcgttactttcagggcgttgtagatgtcgggcagatgacccaccgggaattcaacgtcgataaccgagccctggacgcgggtgacgcgaccgttggtaggctcggccgcagtggtctggttgtcagccatatgcgttcctactcttccttcttggtcagcgcgtcagcgctgccgatgatttcggtaagttcctgggtgatcgaggcctggcgggaagcgttgagcttgcgcgtaaggtcgtcgatcaggtttcgtgcgttgtcggttgccgtgtgcatggcgttctggcggcttgcggtttccgacgcggccgcggtcagcaggcactcgtggatgcgggactgaatgtacttcggcagaatcgcgtccagtaccttttcgaggctgggctcgaaagtgtacagcggagcgacatccgcagtagccggtgcctcttcatcaggatcgggcaccttggtctcgtttttcacgatttcgaccggcagcatgcgcagcacgcgcaccttttgcaccaccatgttgatgaactcggtgtagacgatgtagagttcggaaactccacctttctcagccggcttcatgtaggcgtccatcaaagtgttggagatcgtttcagcaatttccacgccgggctggtcggtgtcgccttcccacgtcgccgcgatgtcacgattacggtacttgtagtacgtcgaaccgcgacgcccgtacacgaacagctccggctgcttgcctgccgcatcgaggcgggacagcagcgactccgtttcacggataatcgaagaggtgtacgggccggccataccacgatccgaggtgagggcgagaacagccacgcgcgggttcttctcgtccttcaccgcgatcggatgcgtgatatgggtgtgggccaccaacgcttgcacggcatcgaaaatcgcatcggtgtacggcttcgcgttcagggccacatcacgggccttggcgatatgcgaagacgcgatcatctcctgagcgttgaagatcttcgccaacgactcggtggagtggatgcgtgatttcaatgcgagttgcgagcccatggcttacttttctcccgccacgatcttttcctgatcaaccggcgcggccttgtcaacgtccggcttcttctcgaccagcggcttgccggcggaagagacgaacgtcgaacggaactcatccacggccttatcgagggcagcctcggtgtcggcggtgaattcctcggtctcgcgaatggtcttgaggatatcggtgttgtggtcgatgtagtccagcagtccctgctcgaacggaaggacgtccttcaggtcgaggtcgtcgagcttgccgtgggtgccggtccatacggacacgacttcctgttccggcgagtacgggtggaactgcggctgcttcaacagctcggtcaggtgggcaccacgggtcagctgggccttggaagccgcatccagatcggaggcgaacatggcgaaggattccagcgaacggtactgtgccagggagatcttcaacgtaccggagaccttcttcagagccttggtctgcgccgcgccaccgactcgagagacggagataccgacgtccacggcggggcgctggttggcgttgaacagatcggactgcaggaagatctggccgtcagtgatggagatcacgttggtcgggatgtaggcggacacatcgttcgccttggtctcgacgatcggcagacccgtcatcgaaccgccgccgagatcatcggagaccttggcgcaacgttcgagcaggcgggagtgcaggtagaacacatcacccgggtaggcttcacgccccggcgggcggcgcagcagcagggaaatcgaacgataggcctctgcctgcttggacaagtcatcgaagacgatgagcacatgcttgccgttgtacatccagtgctggccgatggccgagccggtgtacggggcgatgtacttgaagccagcggaatcggctgccggggaggccacgatggtggtgtactccatggcgccggcgtcttccaggctctgcttcaccgaggcgatggtggagcccttctggccgatggccacgtagatgcagcggacctgcttcttcgggtcgccggattcccagttggccttctggttgatgatggtatcgatcgcgatggcggtcttaccggtctggcggtcgccgatgatgagctggcgctggccgcggccgatcggggtcatcgcgtcgatggccttgaggccggtggacagcggctcgtcgaccgggtggcggtgcatcacgtcgggggcctgggcttcgaggatacgacgaccctcaatgccctggatctcgccgaggccgtcgatcggcttgcccagcgggtccacgacacggccgagatagccgtcgccgacgggcacggagagcacttcgccggtgcgtcgcacttcctggccttcctcaattcctgcgaaatcgccgaggaccaccacgccgatctcacgggcgtcaaggttgaacgccaggccgagcgtgccgtcttcgaacgtcagcagctcattggccatgcaaccaggcaatcccgtcacgtgcgcaatgccgtcaccggccgtggcgacataacccacttcctgggtgggggtgtcgctcggcttgtacgacgacacgaagtcgtcgagggccttgcgaatcgaggcgggatcgatggtcagttctgccatgatcactccttctattggttattgttcagtcaagtctttgcttgtgtgtggtgttggacggattggctcggccggtcaggccggagtcgcctccgtctgcaccttgcgatgcaggttctgcagctgtgcgaccacggtgttgtccgtgacttcgtcgcccacctgaatgcgcatgccacccagtacggtcggatcgaccaccgagttgatgtgcacctggcggcccaccttggcggagtagacctcgaccagtcgctcaatctgctccttcttcagcggggtggcggtggtcacggtgaccatcgactcgcccatgtggcgggagaacttgttgatcagccactggatggtctccaagtagcggcggcggcgcaggttgcaggtggcgtgttcggcgagcctcatggtgaccttgttcagggtcttgccggagaacacctcgcggaacagcttcacacgggcctcgctggtggcctggcagtcgtacagcttggagcggacgaccggcaggttcagcagtgcggaatgcagctcggacagctcgatggatacctgcagcgtggcgtcggtggcgtcagcgtagtacatcatggcgtccacgccgaagtcctccaccgcgttggcgatgtcgcgcgcacggctccaacggcgggagaccaagtcggtcatgatctccatggtcataggatgcgcgttgtcaccgagcagtcccttcaggacggccaccttgtcggcgaccgggcgggacgggtcggtcagtgcgcgttccagctgaatgctgtcatcgagcaccttggtgatcgtgaacagttcgttgccgatccgccacgcgtcctcacgggtgtcgcgcagtttcggggccagcgaatcacgcgactcgcggtctgcaatacgtgatgcctctcctcgcatggtcacctccctttctggttacggatggtcacggtcacttcttggcgcccaggtcgtcgatcatcgaatcgatcatcgaggactgcacgtcgctgtcttccagcttggcaccgaggatcttgccggccaaggcggtggcaagtgcgccgacctcgcccttgagcgagacgatggcctgctggtgctgggattcgatcgagcgctgtgcggatgcggtgatctgggccgcatcggactcggcgcgggaacgagcgtcggcgatgatgtgggacgcttctgcgcgggcgtcgtcgcgaatcttggcggcgtccacacgggcggtgctcagctgggcctcatacttggccttggcctcgtcggcgtccttcttagcctgctccgccttggcgatgttgccctgaatcttggcggcgcgctcgtcgaagatcgcattgaacttcggcatgaagaacttgtagaagaacaccgcaacgatgacaagaatgatcagggaccacacaatgtcataggtctcgggaatgaacagatcaattccgccttctgcgagcgtcattatgaagtcctcctttcactggtggattcgttttgccttctgtattcgactgagaaaacgttcgatcagtggaacatcagggcggtaacgaagccgatcagtgccagcacctcgatcagagccaggccgatgaacatgatggtctgaatcttgccggacatctcaggctgacgagcggtggattccatggccttgccgaagaggatgcccagaccgatgccagggccaaccgcaccgagaccgtaaccgatgacggacaggttgccggcgaccgctgcgagggtgatgatatccattgtgtttcctttctaacgtacttggcgacgttataaatcttatttcgttcggtcctgcctacctaggcgaggccgggttccgaaagagggggttgaacctcactcctccgggaagcttaggttgatgtacacggtggaaagaatggcgaagacgtaagcctgcaggaaggcgacgaacgcctcgaagcacgtcatggcaagaccgctgacgaaccacatcgcgccgactgggatgccttgcagcttgttggctgcatcgacgatccagtactgtgcgaatgccaggcaggtggcgaccatcaggtggccggaaatcatgttggcgaacagacggatggtcagggaggccggacggatgaccagcaactcaaggatgttaatcggggtcaacaggatgtagaccggccacggcacaccgggggtgaacagctcgtgacgcagataatggccaagaccttgcgaacgtgcggcggcgatccaatactggaccatggtccagatggcgaacaccagcggcatgaccacagtggcggtggccgccatgttcatacccgggatgatgccacacaggttgaagatgaaaatcgtgaagaagatggtggtgatcatcggcacgtagcgcttgccgcgaacctcgcccatcacgtcatagacgaccttgtcacgcacgaagtcaagaccgtattccaccacgccctgccaacggccggggatgagcttggcgcgctttgcggtcacgccgagcaccaccaacagcacgatggttgccacgatacgaatcaaaataatgcggttgatagcaaacggagttccctggaacagaatctccgggggaaggaagtcaccaaccgagggcagatgagcgcctgcctcgtcagccaacagcaatcctgcgccgagcgaaccgaccatatcacgcctcctgcttcttcaatatcaggtgtcagtttaaacccaagagatgtgcgaatgtgacgtactcgtaactttcgcgcccctcggatggagcatgccgggcgcggacggggagtcgacgctgggcattcgactccgaatgactgaagagtgattatttgcctgtgtctagacaaagtcaatattacaccggcgagtcttttccgaggcctactggcgcaaggctttcccgggcgtttcgccggcttcgcgcgctattggtcgcatatggcggatgtgtggcattatgttcatcaggttgtccgtatcgtggacggattgccgtccacggtgcgaacgctcagccctgaataaccccgtatccgtcatgaacaaacggcttgaagtcatcctcacgcggcccgcccggctcatgccgaatcgaacgatcagtaccgagcttcttctcagccctgagctgcggcacctcggtcaggtcgtacggcgtggtctggtacacccagttgagccagttgcgccacagcagattggcgtgggcacgccagacgaacaacggttccagcttcggatcgtcatgcgggaagtagttcttcgggaagggcacgttggtcatgcccttggccatatcgcgctcgtattcctcggcgagcgtgtacttgccgtactcccaatggccgagcgcgaacacttcggagaagtcacgtgtggcgattaggcccgggccggactgcggcccccaagtcaagatctgaaggtcatggttggcacgtacctcgttttcgttcacgccggcgaggcgggagtgcggctgcagatcaatctcgtcgaagccattggtcaggaagcagtattcgtcctgcaggtactgcgggaatacgccgaaaatcttctcggggtaatccaccttgtggatgccgtagcggtagtacagtgcgcccatcgcaccccagcacaggtacatggtggagaacacatgggtggaggcccagtcgagaatcgtcttgaactcgtcccagtagtccacatcttcgaacggcatatgttctacaggcgcgccggtgaccacaaaaccgtcgtaatagttgtctttgaacgcatcgaggttttcgtagaacttgacgagatgatcggcggaaacgtgcgtggcctcatgcgtggaggtcttcatgaagtcgatttcgacctgcagcggcgacttggaaatcagacgcagcagctgcgtttcagtctcgattttcttaggcatcaagttcaggaccaccagtttgagcgggcggacgcgctgacgctccgcctcgggcttctccagagcgaagatgcgctccgaatcgaggatatctctggccggcaggccactggggatcttgataggcatgttcctattatgtcaatattcgggataacggttcagggcattcctataacggccatttatggcgcgttatcaccccgactccggctccgccccaaacccctcgctgcgtgagccgattcacgttttagaaccgtgggaaaatgacacgacacgccgatgttgactttctggaatctgcacctattgtagatagagctgtctgagagacaagccgacgcggggtggagcagctcggtagctcgctgggctcataacccagaggtccatggttcaaatccatgccccgctaccattaggccgttagggtctaggaatctggccggtgcaattccaaggaattgcccggctttttccatatctgcgatagtccatgcggttacaccgcgcattttctgcgatatcagcgttcgagacacgccgaaggccctagacaaatcggattggtttttattcctcattgccagcgccaccctcatgttgccgctaatgacgctttccagtgaaattgcttgcgtttcacgctctaacgtttgtgtagtcatgctaaacagtatacacgactgtttagcgttggttaactcttattaggcaatatctgtaaagtttgccttctcattggtatacaatgcaaagcatgacttctcaaatcgttgccgctggcgctgccacggccattgacttgctttgcaaaagcaatcatgtaacccgcgccgaactaagccgcgaactgcatataacccgttcggcaatgtctcaaaagatgaccggcaagagcatgttcacacttcgccagattcgccagatcgctgattatttcgatgtgtccgtggactcgcttcttggccgcgcccctttggaggtgaagtgatggattggcatcttgttttgtcgtcgttgacatttgccatttctgttgcttcgctcttggtgtcgcggcacgcttggacgatcgcagaggaagcgaagggcaaggcccgtcactcgttgagggtgtccgtctattcggtcgaggttaaccgcaagcggcttggtattccctatgaccatgatgtggttgaacagtacgaggccaatgagggcatttttgccagcatgggtgtcggttcctataaaggcaggcgatgcaaggattcggacggtatcgtgcagtccgacgacgccgtacaggtgttctcggacggcacgtatcggattgttcctaggacagaatctttctctgttctgaagcccgttttctgtcgagttcatggaacctgcgatgacccttcctgtccctatgccatctccgcagtcgttccaagggtccgcacttccatggttctactcccaagatcgggaactgcctatatcgacaccggcgaagacgagttggagatgatacccaatgcacgccaagctctagcttcgtcagatcgggttcaatgtcgcgactcgaatcgcagggcggtgtgatggtgacccagaatcgcattgtttcgttggtcaactcgactattcgaccggtgttggtcatgatccatttggtttgttcgcccagcaccgtttcgcctatctgccggcagtcccacatctcggcatcgcagtttatgccaatggctttgacgttgaatgcccgtccatccccgcagttggccagccatccgatgaaaaccgggtcaacgccggcgcgtttgaactcgggaaacaggagcatgtcgccttgcacctgcacgaaggcgggttcggcctcggaacgccaccgccatgcgcgacggtatgtggccaacgatacaaggaacgccagcacggcgataaccacgctcgccgctggtgcgttggctttcagtgcgtcgatggcgttcctcagtagctcgaaccatgtcaggtccgcgtccatttattcttccttccttcgttgtttccgacggcttgtttgtgttgcagtttccagcctatcgctgcggaggaaggagcctaaccatccatccatgaatcgaggagcagtgaaatgagcgttcgtttcgagatcaccacggaacccggcacagttgcgccgggtgatctggtggtgttgcgtctggtgacccagaagggcggcgtgaagtggacgtgcggcccggtgcgctgcttcacggacgacaaggacatgcccgcgatagtgcttaccacgggcgcgattcctgaatacgcgggctatgagctgatttgctgcatcaagtcgataccggacgcggtgcagctggatatcgaggaggcgtgacgtgatccgcaagctttttcagggcgtggtgctgctgctgatttcaccgctggtgatgttctcgctgggcttgtgtctagcgtgggacggtatcgccgagtttctggggtggcgtgatgtatgagttcaccgtcagtcgctccgctcaggggtacgtggtcgtgacgatcgtcccgctggtgcgttcgcgtcggcgcgaggatcgcgggcgtatctattcgttcacgcgcgaggaggcgttgtcgttgttccacgagctttacgcggcgttgtcttcgccgcctgaataaccattcgtttttctggataactgaatgtgccgtgaccggggatgtgcagggacccggtagcacgttgacgggtctaacccactgcggacgtctggcgcaacgttacgagcggaacgaaacctgacctgtggtcttgagcgctttccctaccaccagggcttgccggttaaggcgtaatagggcggcgtaccgcgattgcgggggctctggcgggaccattcacggcgggcgtatgcccgctctcgacaatgcgacggcccggctccagaccgaaagtctcgcgtggagacctgtagacgacgaagagactacgaacttttgttcgagtctttttcgtcgcctgcgtttaggtctccccgctctaaccacccaccacccaaaagtctctgaatgaatcaatcgaacgaatcgaggtagctgttatgggatatgcagtcgattacaagccaacacgcaaacgcaacgtcacccagtcgccggcgtccaagtcgaaactgaggatgctcagggcgatggtgaagtattcgttgcctcacatcgaggagcggtgcgcgtgttcggagaccatcaccaggcaggagctcatgacgatgatcggattgagcgtgaagacgccgggagcggataacgatatgcaactgatcctgtccgaacgccagggcgcgggcatccgtccggtgggccgcatgctgggcatgaagacgtatgcctgtcgtgatgtggtcgcgtcgttcaaggcgtggtgccactgatgggccgtggtttcctgtacgcgcgtgagctggccgagttcctaggcaagtccgggcagacgctctacatgtggcgcaagcagggcaaggggccgaaatggcggatgctggagggccgtgtggtgtatcgcgtggccgatgtcaacaagtggcttgggaggcagcagtgaagcgtaagagggtgccgccgagcatggccgctcaggtgctgctcatgttcggttcggattgttggctgggcatgccgggttgcacgcaccaaggcacgcagaccatggaccatgtgaagccgtacagtctgcacggcccgaccatgccggcgaatcttcgcccggcgtgcaagcattgcaactcgttgcgtgcggatcgtgtcgtgaacggcttcggcgcgcaggtcactgccgtgatagggccgccgtgcgtgggcaagaccgattatgtgcgtgagcacatggcgccgggcgatatcgtgattgacccgtcacggttggcggccgcgtgcgtggatggcggcagcgaggctcacgcattggccgatgtgctgtggggtggcgcgtaccgtcgtgtgtcacgcatgctcacggcccggcatgtgtggctggtgcgtgcgttgcctcagtcgcgtaacagcccggatatgctggccgagtgggtggcgttgaactatgacgtggtggtgttggacatggacgacgcgcagctgaggcagcgcatggccgagcagggccgtggccgtgaggacatggagctgctgaagcggtggcgtcgcctgggcatcacccagtcgcgtgttgacggcctgctggaacgcaggcgcgcgtggctggcgcggcttcgcctgctcgatgctccgagctcgtcgccggcggcgtcggcgcggccgcgatggtagccggttttttaagagacgtatctgaagggacaccccgcgcccaccgatttcgtatccccaacccaaataaaaaaaagccgcgccggcaagggcgcggcgctccaccaatcggcggaatgaagccagttccagacagtaacaccgataggctaggagcgcaaatcatggacgacaacgacaagcagatgacacttccgggcatggaggacagcgacgagctgaccaacccgctgaccagctccaccaaggagctcgtcaccgagcttttgcaggacgccgcgaacctgacgccgcaacggcgcgccctgtgtacgctgctgctcacgtgcgcccgcaccatcgaccgcctgtgtcgcaagggccgcgacatctcccgcatggtcacgagctacaacgagaccatcgaccggttgcagccgtccgaaacgtccgcgaaggccggcgacctcgcacagctgctcaaggacatggcgcagtgaggccgacaccggcgcgccacgcgaccccgcgcgaccccgcgcgtgagacggacggcggcaaggtggcgcgcatctccgccgcgttgggtcaaccgctgatcccatggcaacgccaggtagcggacgtcgccggtgagctggacccggaaacgggcacgtactactacgaccgcgtgatagtgtccgttcaacgccaggcgggcaagacgacgataagcaaggccgagcaggtgcgtaacgcgctgcttggacccgaccgtgaggtgtggtatctcgcgcagaccggcaaggacagcaacgaacagtttcgcaagctgattaaaagcgtggtgcgctcccctctggcggcgctgatcgacgggaacccgcgcatgagcaacggcagcatggcgctgccgctcgtcaacggcagcacgttgcggccgggcagcatgaccgaaagcagcggccacggtttccagggcgatttcatcaaccttgacgaggtgtgggcgctgtcggcgctccaggccaagcagattctggatggctttatcccgacgacgaccacgcgcatgagggccacgggcgtccgtccgcaattgtggatcacaagcacggagggcacggctgaaagcgagtattacaacgcgcttctggaccgctgccgtgccggcgacatcccgaaacgttgggcgttcttcgattgggggcttgaccccgcgaaggacagcgaggacctggacgccgtagcccgcgcgcacccgggttgcggctatctgttcgaccgtcggcagctcaaggactttcgcgaccagttcgcggacgacccggccggctggcggcgcgcgttctgcaatctccgtgacacgtccagcaccgaacgcgtctaccccgccgccttgtggacggagaccgagaccgcgccgctcgacctgtcggcgctcgacctggacacgctcgcgttcggcgtcgcggtcggcatggaatcggaatcgaccgcgatagccgccgcgtgccggcgcgatggcgtcaccgtcgtgcagatcgtggacgtgctgccgggcaccgccggcgcggccgaacggctggccgacctgcaatcacggtatggcgacgctccaatcgccatcgacaggcgcggcccgtcggctccgttggcggatttgctgcactcgacggcgccggacggcacgcctgaataccggttgtcggatatcgggaacacggagatcgtggccgccggcgtgctcatgctcgaccggctcatgcagcatcaggtgctgcacgtgcccgaccctgcactggacgccgcagccggcgtggccgtgcgcaggtgggtcgccgacagctgggtcttatccaggcgcaacagcgaacaggccataaacgcgcttgaggccgcgcagctcgccgtcaccgcgtcgctgcacgctcaaccggccgcgcctttgcagattttcgtttagacgtttttagatgttcttagacgtttttagatgtttgttgatggtttttttgcgtggtccggcatgtgtggcgttgaatcggccgcatgagtcttctgtcacgcatctccagcaccgccgcgttgatgttgcgcgccgcgcaggccacggccgacgacggggattccgaagcgcccgtgctgcctgcacgcccggaagcctcgcatgatccattggcgttgtccaccgtgtttcgcggcgtgcagatcatcgagaccgccgtgagcaagctcccggtgatccagtacgcgccggacggctcgcgcatgaggccgagcacgctcatcacccgtcccgatttgaaccgcagccgccgcgacctgttcggcgacctcgtttcagccctcgcgttgaacggcaacgctttcctgctcaaggtggaaatctccggcgtgctcgtcggcgtgcgcagcctgccgccgcagctcgtcaccgtcaccgatttgaacatggaccccgcgaacccgcgcctgcgctactcgtatcgcggcgtggactacggcgccgaccgcatcgtgcatctgaagctgctgaacgtcgccggacgccttcgcggcatggggcccatcagcgcggcgcgcgaggagatcgagggcgctcaggacacgcgcgcctacgcggcgaactggctggacaacacggcacggcccgccggaatcctgaaaagcgaccagatactgagcgaccaggacgcgcagacggcttcggaacgctgggccaagggcggcgccggcggcgttcgagtgctcggcaagggcctggactacacgccgttggcattgagccccgaagacctccaattcatcgaatcccagcagttcaacaccacgcagatagcccgcctattgggaatccccgcgtcgctcatgctcgcgaaggtggaaggcacgacgctgacctactcgaacatcgaacaggaatggctcacgttcgccgaatacacgctgagcgcctacgccgacgagatatgcgaggccctgtcatcgctgctgcccgaaggccaatgggtcgaacccgattgggattccctgcaccgttccgacacgaacacgcgctattccgcctaccagaccgccatcgccgccggtttcatgaccgtgaacgaggcgcgcgcgaaggaaggatgggcgcccatcaatcagacagcaccgcaggaggtcgcattatgagcaccgagaaacgcaccatcaccatgaggggcatcgagctacgcgagacggaaggcgacggcaccagcatcgagggcatagccgtgccgttcggccagcgcatcggcctgtggccgggcaccgccgaggagttcgcgccggactgcgatttcggcgacaccacacgcacgaagctcagccgtgaccacggccgtctcatcggcaagatcacgaacgccaccagggaagccgacggcctgcatatcaccgcagccatcagcgacaccgccgaagggcgcgacgcggtgcagctgatccgtgacggcgtggtcgattcgttctccgtgggattccagccggtgacaacggacaagcgcgtggaaggcgatacgaccgtgtacgtgcgccgcgcggtccgattgctggaggtagccgtcaccggaatccccgcctatacgggcgccgccatcaccggccagcgcgaccaggaacacgtcaaccaggaaaccaacgaaaccaaggagaaaacagtggaaaacgaacccacccaggaatcgcgtttcgaccagctcgaaatgcagattcgctctctcgccgacaccatcgaccggcagcagcccgaaccgccgcacatcatcggcggccagtaccgttcggccggcgaatacgccaaatcgctcgcggccggcgaagacaccgcgtatgagttcatgcgcgaggcccgcgacctcatctccagcaccgacgtgcacaacacgaacacgtgggtcgccgaccagattcgactcatccagtcgcgccgcagcgtggcgaccctgttccagcatgcggcattgcctgccaccggcatgacgctggaatatctcaagctcggatcgaacacgctcaaggtcacgcagcaggccacggaaggcacgacgctggcaacgggcaagatcacactgaccagcgcgaccgctgccgtcgccacctacggcggctacgcacagctgtcacgccaggtcatcgaacgcagcaacacgcccgccttggacaccgcgcttcgcgcgctcaccatcgcgtacagcaacgccgtggaatcggcggcacgcgccaagctcaccgcagccatcaccgccgcgacggcgaacaagctggacacgccggccgccgtgagcacgctcaccgcagaccagtggattaccgtcatcatcaacgcggccgaggccgccgacgctcgcggcgcccagctgggcacgctcgctgtcagcaaggacgtgttcgacgccatggcgaagatcacgcgcagcggcgacgcgctcatggacgtttccggcgagggcgtggacaagctcggcagcatgagcctcaccggcgtgaccggccgcatgctgtcggttccggtgcgcatggtacccggcgcggcagccaacacagccgcgttcatcgaccccaccgcattgcagatgtgggaggccggcggcccgttccagctccagcaggacgacaccacgaaactgctgtcgaactacagcgtgtacggctacgccgccttcgcgaccgtgttcgagggaggaatcatgccgctggccccaaaagcgtgacccctcccccgcctgtagcgtcgcgtaacctgctcgcctacggcccggcctccggatcgggactgacggcgactgtgaacgaggacggcagcctgcacctggccggtgacgcgccgacagccaacaagggccttcggtggcggtgggagtgcccggacacagcaaagggccagacggtcatctattcggtcgcgcaattccctgccggcacgtactcgtacttgcaggcacgtggcaccaacctgagcctgctggccacactcgaaaccggcaaatcgagcgtcatcccggaggacacggtcactcttgaactgcacatcgcggcatcgaccaccaatccgatcgacggcgatctgcgagcacagctcgagctcggcgccacggccaccgactggacgcgcccggacaacacaggcctcgagggggggggaaaactgacttgaacctctatccattgccgaaactgccggccactcgtgacggcgtggcctacacatacaagtcggaaggcgtcattcacgccgtcggcacctgcaccgcatggggcggcgtcggcagcgaagtcacgttgcagcccggaagatacagcctggccggcagcgtcggcaccgatagacagaacctgtatgcgcagatcaccgttgacggcaagaactacaacacaatctcaaccgaaccgttcacgataaccacggccggcacctacagctgcggtgtcattacccgcaacggcagcaccgttgacgcggacatcatgcctgtgctgaccgccatttcagacggaacgtccgagaccgacggataggagagcgtatggaagaagacgccttgcatgcggatttcctcgcgatgatgaacgtcatcggcagcgaggacgagaaacgcgccgacggttgcctgaaaacggctcgcgcctacctgtccgcgaacctcggcagcacgtgggacacggtgccggtactgatccaatcggattgcgtgctggccgttgccgccgatttgtacaaccagaaggacgcgcgcaacggcgtcatgaacgtggacagcgattccatcgaaccgttccgcgtctccgccgacccgttgcgtgccgcatggccgaagctgcgcgcggccggcgtgctcgcgggaatgggcatcgcatgaccgattccatcaccgcgaaactggacgcgctcatggagcaggtcgccgccacgtgcggcgacctcgtggaccatgtgaccatcgacgagaccgaaatcaaaccgtcgcgcggcaaggtctccgcgtggctcaaaccaccggagatcgaatggccgtaccagtcggcggaaaacgagctgtcgtgccggctcgtgctggtggccggctcgccatggtcccagggctcggcgctgccgctgctgctcgtcgcgatggaccggctcgccaccggcggcctgccggtggcatctgccttgcctgtcggattccaacgcggtgacgcgactctggcggcctatcagatcgaaatcaacgacatctaacgaaaggagccaatcatggctgagaaaatcaggaccttgggaccgggaagcctggtcatcggttcgagcggggacgaatacaagcttgacgtggattgcacgtcggtggaactctctcccgacaattcgagcgaggacccggatacgtatctcgacggccacgaggagggcggcgcgctcagcacgtcgtggaagctgtcgggaagcatcggcgaggacttcagcatgaacggcgcgcaggtgtattgcctgaaccatgcgggcgagaccaagcccgcgaagttcatcccgaacacgtccggcgcgctccagctcgacatgaccgtgaccatagcgccaatcgcgttcggcggtgacgtgaagacgaagaacaagaaggatttcgagttctccgccaccggcgtgaaggccagcgcgtacacgaagccgagcgcctgaacatggcggacaaggccctgtacgtcgtcggccagaagcgtttcgttcagaccatgcgcaaggccggcgcggatatgcaggagctcaaggaagtcaaccgcagggccgccgacatcgcaaaacccgaggcggtggcccgcgcgccacgcggcaagaccggcagactggccggttccatccgcgccggcgccacgcagaaggccggtatcatccgcgccggccgcaagaccgtgccgtatgcgggcccgatcaattacggctggccggcgcgcaacatcagaccgagaacgttcgtgaacgacgccgtggcatcgacagagagccaatgggcgaaggaatacgaaacgttcgtgaagaagaccatgaaccagatcaagggagcctagatcatgcgaagcacagcgaaagtcacgtacaccgacgggcatgtggacgaagcgccgttgacgccgcgcgccatcacgtcggcggaggagcacgcgcagaaggagggatgggcgccgggcgaggcatccaagattcgccagtcgtactacatggcgtatctggcgcaacgatacgcgggcaacaccaccatgccttacgcgcagtggctggaagaggtggacgacatcgacgtggagacgccgaccgctgaaaaccctaccgtctagccgagtggcccgacgattcgctgggcatgctgtcgttcctgctcgcggcccgtttcggcggcacgccgtgggcatggaggcatgaggccagcgaactcgattggggcaccggcatgaggttattgcaggacgagatagaacacatggaggaggtggaccgtgggtaaaagcgccatcatgagcgtgcggatcactggcaacagcgacgacgcggtgaaggcattgtccaaggtcacggccaaggccagcgcgttcggcacgttcatgggcggcgcggcgctcaagggcgtttccgcgttgtgggacacgctcaagggcttcaccagcgcggtcatggacatgtccgattccacggacaagttcaaaaacaccatgaatttcgccggcttcgacacgagcgccgtggaggccgcgacgaaggccacgcgcgaatacgccgacaaaaccgtctacgacctgaccaccgtgcagaacaccacggcgcagctcgcggccaacggcatccaggattacgtcggactcaccgaagccgccggcaacctgaacgccgtggccggcggcaacgccgaaacgttcaaaagcgtcgccatggtcatgacgcagaccgccggcgcggggaaattgacgaccgagaactggaaccagctgacagacgccataccgggcgcggccggcaagctccaggaagccatgctgaacgcgggcgcgtacacgggcaatttccgcgaggccatggaaaaaggcgagatcacggccgacgagttcaacaaggccatcatgggcctgggcatgaccgacgtcgccaaggaagcggccacgagcacgcagaccatggaaggcgcgctgggcaatcttgaggccgcagtaaccggcggattgacggacgctttcaatctgttcaaaccggccgtgaccagcgccatgaccgtggccgccgacaagatcagcgcgttcagcggcaaggcgacgaccggattgcagggcgtgataaagctcgtgcgtgacggtgatttcagcagcgaattgcgcgaagcgttcaacatcgatgaagacagtcccgtcgttgatttcctgctcaccatccgcgacaacgcggtgagcgcgttcgatacggcgaagcagaaggccggcgagttcgtggccgcattacagaacaccggcccgatgcaggccgctgcggacatcttcggcgcggtgtgggaggcgtgcaagaacctcgccggcgcggccggtgacgtcatcggccagttcacgccgttggcggattctatgggcggcgcgtccggcgccggccaggcgttgggtgacgcattcaacggcgctgccgatatcgtcggcatggtttcggacaagctcacggcgttcagcgactgggtatccgagcatgcggaacccgtcgcgtccgcgcttgtgggcatcgcggcgggtttcgccgcgttcaaggtcgcttcggccatcagcgccgtcgtgtccgcgttgcagggattcagcgtggcgaccacggccgcttctgtggcgcagtgggccatgaacgcggccatgaacgcgaaccccatcgtcatcgtcatcaccgcgatagccgcgctggtggcggctctcgtctacttcttcacgcagaccgagaccggccgtcagatatgggcgtcgttcacatcatggctgggatcgtgcgtgggcaacatcgtgggattcttccaggcgttgccgggcaagattggcggcttcttccagtcggcagcgcagttcgcgaccgacaagtgggatgcagtcgtggcgtggttcaagggcattccgggacgtatcaccggcgcgataggcaatgtggggcacctgctgtacaacgccggcgcatcgatcatcagcggtttccttgacggtctgaaaagcatgtgggattccgtgacgggctggatttccggcatcggcgactggataaccgagcacaagggaccgccggaatacgacgccgtgatgctcgtcaataacggccgtctcatcatgcagggcttcgccaagggcttgcgcagcggtttcgacaccgacgtgcggcgcaccatctcacggatcaacggccgtatgggagggctcagcctggacgccggcatgaacggcggcacggtgggcggaaccgtggtgaacgtcacgttcaacgctccggtggaccgtgagggcgtggcgcgcgagatcaggaagattctcggcgattacgacaggaagcggggcaactagtgcagcagtgtttcatgttcctggactggggcgacggctggaagtccgtcaacgaccatgccgaggacgtggccgcgttggccggcttcagcatccagtggggcaccgacgacctcgccgaacagcccgaaccgtcggtgatgtcgttcaccttgcgggatcgtaccgggtggctcaccggccgcgcgctcacattggccggggcccgcgtgctcgtgcagatcagcgaacagcccacgtggggcatgctccgagacgatatgggcccatggtcggcgcagcatatgcgagtggaagcgatgcaccaggcttacacgcccggcttgccttccagcacgtccagcacggcaatcaccctgttcgacggactggtgcagaacggcggcgacgcgcgaccgcatggcgacggatggctgctggaattgagcgccagcggtcgcatgatcctgtggaagagattgcagaagcaggggccaacgtcatccgacgccaggtatgcgggactgcattgggtcgccggcatgagcggccgtgtggaagagctcaaccggcgcgccgccgacgccgacgctcccctggtctccgtatccggtttgacctccaccgattccatggcggcctataagaccgacgattatccgtcccaactggatttgctgcatcgcacgttcgcgcatgagagcatgtggcccatctggtacgaatacccggatcgtgcggtgagccgtctggattacatgccgttcggcgttcccgtgacgctcggcgtcgataccgtgggacggttcaccgtgaccgactggaccggagagacgctggacggtttggacgctgccgaaatcatcaccgacgacgaacagacgctgaccatcccggaacccgtcacgcagttcgtcatccagggcaagaccgcgaaggcaagcgacggcgtgcttgagttcgaccagcacgacaccgagctatccgacctcggcacgctgccggccaacctgaaaaccacccagtcaagcgtcaccgttgaagccgacgtggtttcagcggacgaaagcggcggagtgtggacccgcgcaggcggcaccgtatggacgcctggcgacgatgaacgcgcggcgttctcccgtctgctcgtcacggttgaccggcgattgcggccggagaccatcgtgttcgacagccgcaggctcgaccccgcaacgcacgcgcgcctgtatctcaccgccagcagcggcccgctggtcatccagggagccacgtcgtcacggctcgccggcgacgacggaaacccggcggcatccggcgcgtgggcaagcatcggcggcacgctcacctaccagtggaggaacggccggacactgctccgcaacgaggtgacgttatggccgctgccagtcgccgcagctgccgtcgccacctgggcagacatgggctcatggcccgtcacctggactcaggcggcgttcaccttagctgaactcgcgctgattcacgactaccagcaacaaaccaccatggaggaatcatgaagaccacggacatctacggacttccatacatcgaggccggcgacctcgtatccgccgcgccggcgcagttcaagaccatggccgagggcatcgaaaccgctctggccgaggtcgattcacgcaacacgccggccggggtgaaacccgtcatcgcgaccacgctggaggcgctggccgcgcagaccggcgtcaccggccagaccggctacgtcaccgccgacacgacgacggcgaacaacggcccgtatttctggaacggctccgcgtggctcccctacgcgaccggcggcatgctggacgatttgcggaaccaactgacacagggttatgagtccggcacgttcagcggacagacgaacggcgacgccgtggcggaaatctcgtggaagtcccacacgaccaaaccggcgggcatggtcgtcacgagactgcgaatcgacaaccaatccgacgattccacggtgtacatagtgccttacctgtggtccctgcgacccggttcggcatgggtgcggttccgcaacaacctcatgaacacgtgggccacgacgtacgcggtgagtttctgctggttcgcctggtgggactaggcgaacgtcacgccggccggtatcggcagcgttcgcggcgtgtgcaggcacctgtcgttgaccgccatgccgccgattaccgaaacgctgccgtcggtgttccacttcgcctgtttcgcgaagttgctgccgggaatggaccagagacagccgagactcacggccctggatggcttcggccctgatgcgtagtggaagaccgggaaatcggccgacagcgacacggtgcttttgaagccgctcagatgcacgtgcagcaggcggttggccctgtccacgacgatttccattccgccgccgtagacgtccggctggaaactgccggtgttctgccaggtgaatttcgcggactcataaccctgtgaaccacacccccgatgaaaggagatcatgaccgagaacgtaatcatcgcaatagtcggcgctgtcggcgtcgtcgccggcgcgttcgcgcagcagctcgtgacggcggcacgcgaccgtatggaagcgtaccggctcgcgcagcagatgcaggccgacaacgcgctgctgtggcaatggaaccgacagctggttgaccacatctacaagggattggggccaccgccgcccgaaccccctgaaaaccttttcgaccacgacgactgacggaaggagagaaacatggtcggatacgcgaaggccgtgtggcgcggcagcccgaaccactatcaaggccgcaacggctacaaggtgacgcacatcacgctgcacatcatggtcggctcgctccagggcacggataccgtgttccagcgatccagctaccgggcgtccagcacctacggcgtcggcacagacggcaccgtctaccagtgggttgacgagatcaatggtgcctggtgcgacgcgaacatggccagcgactgctcaggcatcagcatcgagcacgccggcggtatcgccggcatcgcgccgaccgacgccgaatatgaggcgtccgcgcagctctgcgcggatatcgcccgccgttacgggtggacgaagctgtggcacgacgagaccggcaaccgcaccggcaatatcgtgctgcaccgcgaggtgcccggcacggatcacgccggctgccccgatagggccgtgaacggcctggacgtggcccgcgtcatcaacagggcgaatcagattctgaacaaccaaggaggaacagacatgagttgcgcgcttatgatccgcgacgacgacaccggcgtggtctattactggagcccggagacaggccgcatcggtttggggcatcccgaccagatgaaggtgctggaggacgctggcgtgaagctgatccattccagcaagaaggccccgtgggccgcccgcgccgatcagatcagcggttacgtgcaggctaagaccaccgcgtatgagaaggcccagacggccgcgctggaagctctggcgaaatcggtgggcgcgaacccatccgacatcaccaagaccgtgagcgaggccgtcaacgcggcgctgaagaacctcacggtgacgctcacgaacaaggaggcatgatggattacggagaggaacaggtggaaggcggcgacccgcgtacgccaggcgtcagcggtgcgaccatcgcccgcgcggccgtgctgctgctcggcttgattaacgcctgcctggtcatgttcggcgtcgataccatccccatcgcggacgataccgtgaaccagttcgtggccctcgcatggaatgtcggcgcggccctgtgggcgtggtggaaagacaaccccatcacgcccaagtcccgcgcgcagcacgcggcctagccggccaacgtcaccgcgtccaggccggcgcgcagacggctgtcaggcatcgccacgtagatttgcgtggtttccacgctgctgtgccccagcagtttcgacaccagcagcagatcgtgcgtggtttcgtacatgcgcgtggcgtacctgtggcgcaatgagtgggggccccagcccttcggcagcagccgtgtgagatggcgggacacatacgatttttcgacgtgtcccgtccatctgccagggaaaagccaaccatgcgcgccgccgattcgttccgcgaggtcttcggatatcggcactatgcgctgcttgtcgcccttgccacggattatcagggatggcccgtcgttgccttccaacacgtcgcgcgcgtggacggcggctatttccgagagccttagcccggcttcggctccgaggcgcagcatgaggcgttccgtttccgtggcgtcgcataacgccgcgcggatatgcctgtcagggcacgggcgtgggtgtggcctggtcttgcgcaccttcggcaacgacgccgccggatcgtcggcgcgtctgccggtgtcgtgcagccatcggaagaacccgaccagcgtgtttcggtatcccttgcgcgtctccgccttccacgactgcgaggcggtccagtgcactagatcctctgatgtcacgtcatagggagatttatccaggcatctggccgcgtggcctatcttgcaccgcctggtgttgatcgtgtcctgactgaggcccgccgccgtgagcgattcgagccaaccggtgatttcatcccgccactgagcagggggcagctttttgtgcatactcacggccggctaccttgacggccggcggcgttacgccgctagaataaaatccgataattgggcttcatggatttgaaccgtggacctctgggcgacaacgttcccagaggtccacggttcaaatccatgccccgctactgcgggcgaggccgtcacgattattcgtgacggcttttcgtttatccgccgtcgtgccctacggggccgcatatccgatcggggcgatgatgtcctgtgaaaaaacaacatccaagcccgctctgggcagaatcaatcaatctatggctcgactccctcaaggcggcgggctactccccccaacacgatcggcacgcgccgatgccagatgtccgcattgtcgagggcgcttaagggcgatctagggacgtggagggcgacgacctcgccctgctgatccgatccgccaacggctatctattccccggccggtggagcggccacgccgaatcatcctacgtcggccgacaccacgcaacggtacatcgccatgcccgacgaccgtctgcgcgccgccgtggaagccacgcgcctcaccgtatgatgttgtattgatgtcatattgatatataatagatgttattaagaggtttgatggagtttgaatacgatcacgcaagaacgaggaggcatactatgacagccaagaataaggtcaatgccaaggcgatcaccagcgaccagcttgaggagatgttcgacgacggcgacgacatcctcgactatgtcgatctgaacaatcccgtggtcgagcatcacccgccactggagaagcggatcacgctgacgatgcccgcgtggatggtcagcgaactggacgaggaagccgccgatctggcaatcagccgcaacgccgtcgtcaacacatggatcgccgaccggctgcgcaccatgcgacgccgcgaaacgatccacgcctagcccataaacgacgaaagcccccgaaccaaaccgcccggggcgatatggatgaaaggcgatcaggcagctacggtgcccagggaagtcggcgatcataaacgtctcgtcgttttcatcgcggatcttcagttgtctaatccacgggaggcgacaggcgtgaagtttctcaacgaagcggaagccgggcacaagtcgtatgtcacaatcgacttcgtgcccagctcccgtccttctgctcagaagcggagtgcggttcaccatccagccgacatcatcggcatcatgccgc

SEQ ID NO: 909 - DNA, 59603 bp, Unknown
  R117_24m  MAG No. k141_2940
gtgttcatccacccaatctgccacgccaactcgaaagtcactcaaccgttgtgccgcaaggcctgaccggccattccggacacacattctggccgacctcgagttccccgcccatacaactcgaacaggaggaacgcccactgccacaaaggaacacaagccaaaacggacacacattttggcctataaccctaaaagtgtctattccctcgtgtcatggtcaggttgatcgcccggcccatccttttctgatcccgaacccgctctcgtaggcgtcgacgccgtcggtcggttcctgcacggccgtcatggtgccgggcatgggcccgtcattcccgaccggcttccccttcctcgtcctccggtgttcaggcgtgacgagcgccatggggccgggctgctccgtgagcatgtacaccgtccattcgcagcagcgtctcatatgctcctccgacaatccccggtggtggtcgagcgcgcgcttgaccacggcgttgacgccgccctccagctggttggtcgtcgacggcagcgggccgccgctcttgaggacggccggatcgcagaacgcgaacagcacgccggcccagttcagtctgaccaatcggaagtgggcgcggcgcaggcgttcgtgcgtccgccgccacttgcgtcccctcgcgtgcatgggatcctgtttggcggtggtgcgctccttgaagtgatcgtcgtgcctgccgtgccagtcgttgagctccttgagccatgcggcgtcctcgtcggccgtcgtcaccctgacgagcctgcgggcgagtccgagcagctccctgccggcctcgctcttgggcctgttcgtcaggtacgcgggtgttgcgcagcacatgcaccaggcagcgctgcacgttgcaggcgctctccgcgccgcgcagcccgtccgttatcggcacgtccggagcggggatgcgcgagaacaacgccatataggcggccttgctctcgttcgagcaccactggaagcccagcacctcgccgttcccgccgtcgatggctatgaccaggcgccagccgtggttcatgtacgtgccatccgccatcaccgtatgatgtttcaccctgcacggcgggatggcgggccggatgttccggcaccacgcggtgcgcttgcgcagggcccgcgaatcgccgttcgcgtcgcacgcggactggctcgcgcggccgagcagccatccaaggaacgcgtcgagctgcccggaccgctccgtgttctcctgtggcatcgtcgagctcagcgagcaggatgcgcacttccagcgctgcaccccttcgcggtccgaccgttcttcttcatcggctggccgcacaccgggcatttcttcgccttgctggacttcgttctcatgcgtccagcccaccaccgggacgcccctattttcctgccgggaaaaataacaccccggcacgcctactcccacaaggccaaacccgggttataagcaccacaaaagttcctataggccgtgttcgtttctgttctgttcaatgttcgttttcaagcgatacttgaggacagcacacggcgtgttgggtgaaaatctgcgaattactccaacgttatactagttgcgtttgcgcggttttgcgtactggtgtatcttatgtatcagcagtcggtacaaggttgtactaaatagaaagaagtgttcaaagcaaccgattgattcgatgattctcccataagaggtggtttccgcttcgtatgcaccgaacattgtttcagaaaggttgtggtttttttttcgcctttaagacaacgttgtattaactctgtgagaaacagtaacaggaaagggttcctatggcacaagaagtcactgcgaacaaggcgcgtctcgtcgtcgatgacgcatttgaggtcgcgccggtcaacaatcgtctcttcggctccttcgtggagcatcttgggcgttgcgtttataccggcatctatgagcccggtcatcccacggccgatgaagatggtttccgtcaggatgtgattgatctggtccgcgaactgggtgccaccaccatccgatatccgggcggtaattttatgtccggatatcgttgggaagacggcgtaggcccgaagggtcagcgtcctcgtcgtcttgatttggcttggcattccactgaaaccaacgagttcggcctgcacgagatggtcaagtggctggacaagtgcggcggcaacgaactgatggaagccgccaatctgggaacccgtggtttgcaggaagcgcttgatttgctggagtattccaacattcctggcggaacggccctttctgagcagcgccgagcaaacggtgctgacaagccgttcgacatacgtatgtggtgccttggcaacgagatggacggtccttggcagattgggcacaagagcgccgaagactacggcactcttgccgcttcggtcgcggcgggcatgcgcatgatggatcccgaccttgaactcgtggtatgcggttcctcttcccatgagatggacaccttcggtcgttgggaagaaaccgttctcgagaagacctacgaagccgtcaacttcatttcgtgccatgcttattacttcccggcccttaaggaagatggcacccgcgatatgggcagcttcctcgcatccggcgtcgatatggacggattcatcaatgatgtggcggctgccatcgatgccaccaaggcccgtttgaagagcaagcatgaggtctacatctccttcgatgagtggaacgtgtggtaccagcatgatgagccgagtaggaatccggaaggcatcggcaactggccggttgcgccgcgtctgcttgaggatctgtactccgtcgcggatgctgtggtgtttggcgatctgatgattaccttgctgaagaatgccgatcgcgtgcatgcggctagtcttgctcagctggtcaatgtgattgcgccgattatgactgagcccaatgggccggcatggcgtcagaccacgttctacccatttgcggtcactgcagaatatgccaagggcggtacggtgcttgagccgaaactcgcttctggaacctatgacaccgctaaatatggcgaggtgccggtcgtcaattcggtggcggtacgtggcgcggatggtacggtcagtgtattcgtggtcaatcgttctttggacgctgagcaggacttcgaaatcaaattgtctgaaggcctttttgcgaaaaccgtcacggcgcagacgctgcatgatgatgacctactcgccaagaacactctggacaatcagaaccgtgtcgtgctgcacgacaacgacaccgcatcactcgatggagagaccggtacggcgcatgttgtgctgccccccgtgagctggacggcgttgcatttcgcttaatcgtagcgggcgcgccaacaacataactgtgctgcgggatttcgttaatcgcttcgacgaatttccgcagcgcccataactaaagaacaataaggaaagaacaaatgagaatccaaaggaggagctcatgaagaaagtaacccgggttatggcagccattgcggctggcgctatggcattgaccgtaagcgcttgtggcggaagctccaacgcgaatggtgctaaggtcaacagcgataagaccgctaatgacagtgcatcctgcaccaataccgttaagaaaaagggtgtgcagaaggttaccgtttgggcttggtatccagctatcgaacaggtggtggatgatttcaacgaaacccacgatgatcttcaggtttgctggaataacggcggccagggcggcggtgaatacaccaaattccagaacgccattaaggccggtaagggtgcccctgatgttattcagcttgaatatgaagccatgccccagtttatggccggcaaggagcaacatctcgtcgatttgagccaattcggtttcaccgatcataaagacgattacaccgaaggtgcctggaagagcgttcagctaggttctgaagacaaggtttacggtgttcccgtcgaccttggaccattcgtcatgtatgtgcgccaggacatcttcgacaagtacaacgtcaaggtgccgaccacctgggctgagttcgagcaggccggcaaggacctcaaggcagccggatacgacggctacctgactgatttcgcgccgaatggcaccgcgttcaacattgcactgttcgcgcagaagaatcagaacgtctacaactactcggcgtctgatcccaccaaggcctcggtgaacttcaacaccgatggagtcaaggaagtgctcgactactggcagaacctcgtcaaagagggcctcgtagacaccactgatgccaacacgaacgactggaccaccaacattcttggcggcaagtacgccacatgggtgcaggcttcgtggcagaccggctatctgaagggggccggcgacaccaatggtcagttccgcatctacaatgctccggtgtgggatgactccaccccgatggtgaaccaaggcggttccgcttgggccgtaaccgatcaggccaaggacaccgaagccgcatacaaggtggcacgagagctgttcgattccgacaaggctcaggaaatcggtgttaccgatggcggcctgttcccggcttggaccaagaagctgcagtccgacagcttcaagaacatggaggaggagttcctcggcgggcagaagctcaacgagatcaccattcccacggctgaggattacaagggctactcattcctgcccttccagacctacgcatacgacgagcaggtaaagacgttcactagcatcgtcaaggatggcaaggataccaccagcaacctcaagagcctcgatgagacgctcaacaactacgccaagcagcagggttacactgtcgaataaccctgacagcaggtgagttgcgggctgggccaacggctccgaagccaaccggctcggcccgcagcttcttcacctgattattggagatacacatgggtaaaaacgcaacaaagaccgttagtaaagacggtatcgtcactcgtcgcggcaatatctggggatggctgttcactgctccattttgcgtgattttcgtgattttcctcgtagtgcccctcgtatatgcattcgttatgtcgctgttcacatccaacgtgttcggcgtccaattcaccggtttgtcgaattaccagagggtgttcactgacccgttgttccttaagggcatggggcgcgtgattctatacacggtggttatggttccgattcagcttggcctagccttgttcttcgctctgctgctcgactccctcaaaaaccgcttcgcatccgtgactcgtttggtcattttcctgccgtacgcgattccaggcgtggtcggagcgttgatgtggggcttcatgtactccaacaacatgggtccatttaccacgtttttcgagttgttcggactgcctacgcctggcttcctcactcctgatggaattttcggcgcgttggtcaatgtggttacttggcagtggaccggctactacatggtgattctgtattcggcacttcaatcggttccgcatgagctgtatgagtccgcgcgaatcgatggtgctacggaactgcagatcgccacacgagtcaagattccgatgtgctccagctcgatggttatggtgaccatcttctccctaatcggaaccttgcagttctacacggaaccgacggtactgcgcaatcaggcaccgacggccatacagccggaatacacgccgaacatgtatgcacaggcactggcgttcaactacaaccagcccaactatgcggcgacggtttcgttcgccttgggactcatcgtcgttatcttcagcgtcgtctttatgaaactgacgaagaaccaatcgggattggaggactgacatggctaagaatgcacgcaaagctgctaaggccaatcacattcgtggcaattcgagagtgtttacgattgtagtgttctgccttgccatcgtttacttcctcattccggtgtggtggcttatcgtcgcctctaccaagaccaataatggcttgttctttggcgcgcacggttcactgtggtttgacgacaagttcgcgttattcgacaacatcaagcagctgaccatctatcagggtggcatctactggcgttggattctcaactccttcctgtatgcgttggttggtggactgggcgcaaccacggttgccgttctcgccggctatggcttcgctaagttccgcttccgcggcaagaagatgttcttcaatctggtgctcgcagctctgatgatcccgaacaccgcgttggtcatccccaccttcctgctgatgtcgaatatcgatatcgttgatacagtttgggccgtgttgcttccctcgctgctcaaccccatgggcgtgtacctcatgcgtatctactgccaggaatcgttgcccgacgagatgatcgaggccgcccgtgtggatggtgccggcgagctgcgcacgttcttccaggtgtcgctgccgattatgaccccagccatcaccacggtatatctgctgtccacggtgggagcttggaataacttcttcctgccgcaggtagtgttgacgaacaacaagttattccccatcactgttggtctgacgcagtggcaggtcaagtcccaggctggtgcggcttctgaacaggtgtggaatttggtcacgtccggtgcgttcatatccatcatcccgatggtgctggccttcctcttccttcagcgctactgggtgggaggtcttacggccggttctgtgaaatcctgacgacttggcgggtcttctccttcggcccgccttcgctctcgacgagcccgacgcacatccttcgcttctttcaatgtgtgtcgggctcgttgtcatagtggcattattgaaggtaaaccgtaattacaatgtgaataatgagcaaattgttaaggagtgaataatgcctaggcgtgtgaccatcaaagatgtggccaaagaagcgggcgtttcgttcaaaaccgtttccaatgtgctcaacagtactggcagtatgcgtgactccacgcgagaacgtgttgaaaatgccattgtcaaactcggatatacggttaacttgtcggcccggtcgctgaaaaccggcacgaccggtctgataggactatctatttttgatttctcgcagccttttgctccctatctatctgatcaggttatcgactatgcgcgtcagcgtgggtatggcgtaatcgttaatacatatggccaaggcggtgctggactggcatcggttatggataatgccgccatgttggcacctgatggatggttcgtgttcattgaccagccccttgccaatgaaggcgcgttactggagcagccgtatccgttggttgttgctagcgactatgaaacatatgacagagtcgataaagtgaccatgcccaatgtcgaaggtgtgcggcaggcaaccggccgtttgcttgatgcggggtgccggaacatcgcgctgttcggtgcatgcgagggcaaccgcgattacgactactatatgaacgctactgaaggcacacaggagatgcgtgttcgtgggtacattcttgctttcgaagaacgaggactacgtccggacatggatatgctgttttcgtggggcctaatgatgagcgacagtggtgtgcgtgccgttaatcacatgttgaagcagggggtacggccggatgcgattgtctgcctgaacgatgctatggcgattggcgtgttgcatggtcttgaggcgaatggtcttcatgtgccggaagatgtgcagcttattggatacgacaatgtgccagaagctcaattctccaatccgtcactcaccaccgtagatccgcatgtgagcgattacgtgaagtgcggcatagatatgttgattgaacgtattcagggctacgaggggccaatacgcacgtattgcactgatttcgagcttatagagcgtggttccactcggctgtagcgtataggtctcgtgccagcagttgcttggtgcgatgcgtaatgcatgcgaatacaggtgttttacctgttgaattgttgaacggcatcgcgtctaccggactatggttcacgaaaacggttactgcgaaactactcgaacaatgcggcgtcagtcgctgggtagccaagttggaacgcggtgtaggcgtgcttggcggccagtgcggcgaggatgagcagcgtatcgctctcggtggaagatttcgattcggtcacggccttgatctgcgcgcgggcgcagtccatttcgatggcggcggcggtcggtacggtctggccgcttgccttgtcggcgatggtggtggggttggccagtagttggtcgatggcatagaccttttggcgggggtcgctctggccggaagaactggactgtgcgccggaatcatcaaaattgccgttcgccagcgacaccagctgctgcccggcggtcttatgcatatcgctcaacgccaacgtagccccagcggtctgtcctcgtgcggccaagacctcgatagcgaatccggcgcgatcctcggccacggccatcgcatccaataccggtcggtcaacgttggcggacgtgacgccatcaagacgcgccggcgtcacctcaggcgcggactgcccgaatttatcggccagaaaagccagccattgcttggtctgcgcgtcacgtaacgttccctcggcaaaacgacccgaacaatacccggcaacgtcaatccaagtcaggggagcggccaggccggtggcatactgctctaataacggcgtgccttcagccggatgggtggcgtagtccgccaacgtcatcgctttctcgcaagggctcatttgagcttccgcctcggcccgtccggccagtcgcggcatcgaacacgccgaaagcgaacacagcatcgcgctcgcgcatagtacggatgccaagcgccgggtaaaccgtcctgaagagaagcgtgtctgcatggaaacctacactaatagctaactgtgaccactcataggccatgcgccacataacttcataggaggtacggatcgatggaactggacctgacaggaatacacaagctcgccgccgagcaaggaatcgaccccggaaccctggatgatgcgctggcagaggccctgcgcctcgcctacctcaagaccccgcacgccgccaggcacgcgcgtgtggagcttgacgaacgttccggcaacttcaccgtctgggccgccgacgaaatcccggtcgagcccaccgaggacgacccgcaccccgctcccaagctgggcgaggaatacgacgacaccccgcgtgacttcggccgtctcgccgccgccactgcacgccaggtcatcacccagctgttccgccgcgccgaagatgagaaggtattcggcgcgttctccggtcagaagggcaagctcatcaccggcatcatccaacaggatgcttccgacccctccaacgtgcatgtcgcgatgggcgatgtcgaagccattctgcctcgccgtgagcaggtgcccggcgaacgttaccgccacggcgaacgcatccgcgtgtacgtggtgaacgtggcccgtggcatcaagggcccggaaatcgtggtgtcccgctcccacccggagctggtccgcaagctgttcgagcgtgaagtgccggaactggtctccggtgccgtgtccatcatggccatcgctcgtgaggccggcgcccgcaccaagatcgcggtcaaggccaacaccgatggtgtgaacccgaagggtgcgctgatcggccccggcggcgctcgcgtgcgtgccgttatggagaaccttggcccggagaagatcgacatcgtcgactactccgacgatccggccaagttcgtggcagccgcgctgtccccggctgtggccaccggcgtacaggtgatcagcgagaagaacaagaccgccatcgccttcatccacgacgaccagctatccctggccatcggcaaggaaggccagaacgcacgactggcagccaagctgaccggctggaagatcggcatcgaatccgccgaggcccatgccaagaaggtcgccgctgaaaaggccgcccaggctgcggccgaggctgctgctccggaagccgaataggccgccgggctcgaaggcgaatgatcttcagggcgcattatttcctgatacgagccgcgtcagcaatggcgcggctcgctgcgtctacgctatccagcgctatgagtatgcttgattggcgtatgtgggctggcgcagtgtgcgcgaaatcgcccacaccagagacgaggtaacacgatcatggtcgcacgatgagacagggtaggcttgccgtcatcaccaactgaccacgcccatgcacgcgcgtggtcacagaataggagtaattagtggcgaaaccacgcgtatacgaactggctaaggttttgaatgtcgatagcaaaaccgtgcttgagaagcttaaggacatgggagaattcgtcaagtccgcttcttctacgattgaaccgccggtagcccggcgtctgaaggcagagttcgccaaggacaacgccaagggcgattccaagcccgcatcttccgtacaaaagcctgctgccaagcccgtgcagcagcgccgcccggccgcaccttcggccccggcttccacttcatcttccgcaccgactccggccgctcccgcacgtcaggcatcgcccgcctcggcacatcagcaggctccgactccgggcgcaccgacaccgcgtccgcagggcggcgcacgccccggcatgccgacccccggccgccacggtcagcacgacaaccgtgagaatggtcgcgataatcgcgaaggccgcgagaacggtcgtcagagtcgcccgaacgatcgccgtaacaacgatcgtcgtaacaaccagggccgtccgaacaatggccagccggggcagcatcagaacaaccgcgacaatgcttcggctccgcgcccgcacgctcagggcggcgccggtgccaatggcggcaatgccgcttcaaacgcgattccgcgcccgcacgctcagggcccgcgcccgggcaacaacccgttctcccgcaagcagggtatgcacaccccgacgccgggtgatattccgcgtccgcatccgatggctcgtccgactgctgatagcggtcgtggcggtcgtccgggccgtcccggccaaggccaggggcagggccgcggcttccgtggcggtcgtccgggccaaggtggtcagggcggtcctcgtcccggccagtggggccacaaccgtccgggccagggcggcggctcccagggtgccggtcagggcggcgcacgcggcggcttccgtgggggccaaggcggcggcaataacttccagggcggcggcgcaccgagcaacggtcccgcacgtggcggcggtcgcggcggtcgcggcggtgccgcaggtgcattcggacgtcagggcggtaagtcctcgaaggcccgtaagaaccgcctggcaaagcgccatgagtatgaggagctgaaggcaccgaccatcggcggcgttcgcatccccaacggcaacggtcagaccatccgtctgcgtcagggcgcttccctggccgatctggcggagaagatcaacgtcaatcaggccgcgctggtcaccgtgctcttccatctgggtcagatggctaccgccacccagtccttggatgaggagaccttccagattctgggcgaagagatcggctggaacatccagctcgtctccgcagaagaggaagacaaggaactgctccagcagttcgacatcaaccttgacgaggaagaactgcaggatgacgaggatctcaagcctcgcccgccggtcgtcaccgtcatgggccacgtcgaccacggtaagacacgactgctggataccatccgcaagaccaacgtcatcgcacgtgaggccggcggcattacccagcgcatcggtgcctaccaagtcaccgtgaaccttgaaggcgaaccgcgcaagatcaccttcctcgatacccctggccacgaggcgttcaccgccatgcgtgcccgtggtgccgagctcaccgacgtcgcgatcctcgtggtcgccgccgacgatggtgtgatgccccagaccgttgaggccatcaaccacgctcaggccgccaaggtgccgatcgtcgtggccgtcaacaagatcgatgtgcccggtgccaacccggagaaggtccgcggccagctcaccgagttcggcctgatccctgaagagtatggtggcgacaccatgttcgtcgacatctccgccaagcagaacctgcacgtcgacaagctgctcgaagccgtgctgctcacggctgacgctgagctggacctccgcgccaaccccgacatggacgcccgtggtgccaccgtcgaagcccgactcgacaagggtcgtggtgccgtggccaccgtgctggttcagcagggtacgctccacgtgggcgatgccatcgtggccggcacttcgtacggccgcgtgcgtgccatgctcgacgagaacggtcagccgatggaagcggccggtccgtccacacctgttcaggtgctgggcttgacctccgtgccgaccgccggtgacctcttcctggtcgcctccgatgatcgtgccgctcgccagatcgccgagaagcgtcaggccaccgagcgtgccgcccagctggccaagcgtcgcaaggtcgtctccctcgaggacttcaagaagaagttcgccgagtccgagatcgacatgctcaatattgtcatcaagggcgattcgtccggttcggtcgaggcgctcgaggattccttgatgaagatcgaggtatccgacgaggtcggcatccaggtcatccaccgcggcgtcggtgcaatcacccagaatgatgtcaacctggccacggtcgacaaggccgttatcatcggcttcaacgtgcgcccgaaccgtcaggtggcggacctcgccgagcgcgagggcgtggagatcaagtactactcggtcatctaccgtgcgatcgaagacatcgaggcatccctcaagggcatgctcaagccggaatacgaagaggtcgtcacctctcactccgagatccgcgagatcttccgctcctccaagttcggcaacatcgccggcgtcatggtgcaggacggcgaggtcaagcgtggtacgaagtgccgtatcctgcgcaacggcgtggccacggtcaacgacctcgagatctcctcgctgcgtcgcttcaaggacgacgttcagtccgtcaaggaaggctacgaggctggtatcaacctcggcaccttcaacgacattgaactcggcgacatcatcgagaccttcgagatgcaggaagtcgagcgcaagtagtcattgttaagccctctctgacgagtgggctgtcagccgcaggctgactgggggagagacatggtagttccatgattttctctcccccagcctcactgcgttcggcagcccctcgtcagagggggctcaagtctagaaaaggaaattcctatggcaggaaccaacccgcgcgccgcacgtattgcggccttgattcagcgtgtcgtcgcctcctccattgagcgcgaactgcatgacaagcgactcgccagcatcaccgtcaccgaagttcgtgtgaccaacgatctgcagatcgccaaggtctactggacccagctcggccacgaaggccacgaggaaggcgaacgcaagcgcgcccagcaggcgctcgatcaggccaagggtcacctgcgttctctggtgggccacaaggctggcctgcgcctgactccgcagctccaattcgtgttcgatgaagtgcccggcgaggctcacgagatcgaagacattctcgccgtggccaagaagcgtgacgaagaactcgcccgcgcccgcgccaccgcccagtacgccggcgacgccgatccgtacaagcacgacgacgaggccgaagccgagggcgatgagttcgagtccgacgaggagtagtgtgcttcatacaacacccagcggcctactcatcatcgacaagccgcaaggcgtgaccagtttcgacgccgtcgccgccgtgcgcggcgcgttgcacatcaagaaggtcggtcacgccggcacccttgaccccatggccactggcacgctggtcatcgccttcggccacgccacgcgactgctcaacgccatcgtggcgcatgacaaaacctacgaggccaccatacgcctcggcctgcgcaccactaccgacgatgccgaaggcgaggcgcttgtcgatgatgaagcccgctcccgctggcaaacgctgtcagcgcagctgactgagggcggccagagcggcgaaccaacggcgtcaccaactgcctcatggcaaaacctgctcactcgcaccatcgccaccaatttcaccggcgatatcggacaagtacccaatacgttctccgccatcaaaatcaacggccagcgtgcctacgacttggctcgcgaaggcaaggatgtggaactcaagccccgcctggtgaccatcagcgaattcaccgtgctggatatccgcagcggattcgtagcaggggagcaggccgctgaaccattgcgggaagacgcgaacacgggaacgattcccgcacttgatattgacgtgcgggtcagctgttcatcgggcacctatatccgcgcgctcgcccgcgacctcggcaatgaacttggcgtcggcggatacctgacccgtttgcgccgtacgcgagtcggccgattcgcgttgccggacgataccagcggacttatcgcctctgaggcgatgcttgacacgcgaacccataccgtcaccgcacataccgatcagaagacgttcactaatcgggaagggcaaaccgtcacgcgcaacaagtgcgtattgaacactcctgaaggtcttgccggtgacgagcgccgcaactggctgcttgaccatgccctcaccatggaacaggccgctcgaggcgcgatgccggcgcttgacatcacacctgaggaagccagcgaattgcgcttcggccgccgtatcgagcgtacaatcagcgagcccactgccgccattgtgccgcaaacgcatgatgtggcggcgattatcgagcgtgccaacgctcatcaggccaagccggtcaccgtattccccctcgcgtaaagtagacgcggtgaaaagtgcagcttgatacaggccgcgcacaacaacgcctatattgcatgaataacatcgcacggataaaaggaacagcacactgatggatatcacgcacctgacccctgacgccgaaggttcgattgaatggccctcgttcagtaacgacaagaaggccgtggtgacattgggcgcatttgatggcatgcacttgggacatcaggcggtgatcaagcgtgtggtggaactcgcgcaccagcatgatgctttttccgtggtgattctgtttgacccgcgccccgcattcgtgcacggctgggccgcctcgcaccatggcgaggaacccgcggtgcagaacgtggatgccgaagccttgaccagtgtggatgatcgactgcaccgcatggaacagttcggcgtggaccatgtgttggtggtgcactacacgctggccttcgcagccatgtcatacattttcttccttggcagactcaccggcaagctgggcatgcgtacgctggtcctcgggcaggatgccgccatgggcaaggggcgagaaggtgatgtgaagcatatcgccaatcttgccgccgccaccggtgtattcgaacttgatgtggtcgatgaccgtggcccaggtgaagtgcgcattccgcgcgatttcaagccggaagccccgagcgaatggggagagcccgtcgacccgctggccaatgccaccaaggccgagcgccgcgcatggagcaagaagaaccaggccaaggcaatgcgcgcctggagctccaccaatgtgcgctacctgctggctcatggccgaatccaggatgccaacgccattctgggtgctccgcacgccatcgaaggcgaagtggtacacggtgaggagcgcggccgcaccatcggattccccaccgccaatcttggctccgacattgcaggctacattccggtcgacggcgtctatgccggttggctggtagatggtgagaaccgctggcctgccgccatctccattggcaccaaacccaccttcagcgagaaaacaggactcaacgaacgcgtggtggaggcctattgcatcaccgatgagtggattgatctgtacgaccataaggttcgcgttgaattcgtcggtttcctgcgcccgcaggtcaagtttgatggtcccgaccaactcgttgacgaactcaagcgcaacgtcgaagagaccaagcgtcttaccgcctgaggcatatctcagggctatttacgcactcccaaggcatctaaggcgtcggacaatgtgttggactccaccagccgaagtccctcgacatgcaccggcttgcgcagcggaggaatgactgccgtcgtaaagccaaggcgcgaggcctcgcgaaggcgatattccatacgcggtaccgggcgcacctgaccggtcagggaaatctcgccaatggcgcacgtggctcgcgcaatgggttttgacgtggcggcgctcgccagtgccgccactatcgccaaatcggaaccgggctccttggcctggcccccggcaatagtggagatatacaggtcgttggacagcaggttgagcttgctgtgacggtagagcaccgcgaccagcatggcgatacggctggggtccacgccattgaccgcacgtcgaggtgtgggcagcaccgacgtggtgaccagagcctgtacttcgataggcagactgcgatgcccatccaatgtgaacgtcacacaggtgccttccatgggtgccgcgttggccgcatcagggccgtctccagacaggaacaatccggcgggatcggtgacctcttcgatgccctcaccgctcatgtcgaaacagccgacttcatcggtcggaccaaaacgattcttcaccgctcgcaacattctcagcgcggtctcgctgtcgccttcgaattggcagaccacatcgaccagatgctccaatgtgcgcgggcctgcaatcgaaccgtccttggtcacatgaccaaccagaaataccggaatgtcaagcgtcttagcggtatctatcagcgcgcttgccacttcgcgcacctgagtcgaaccgccggaaatgccatcgacctcctgcgagacgatggtctgcgccgaatccacaatggccaaggccggcttgttctgttcgatcagccccaatactgtggacagatcggtggtggaggccagtaacaagttcggctccaccgcgttgatgcgggaagcgcgcaaacgaacctgcgcctgtgattcctcgccggaaatgtacagcacggtattggcatgtaccgacggtgcgttgccctgtaccgacaccgtgtttgatgtgccgccctgcgcccggcccgactgttgggcagaccgctgaccggctcctcggaatgtactgtctcccgccacaacgcgcgcgatattgccggccgtctgcaacagcaatgtcgacttgccgatacccggttcgcccgctatcagcgtcactgaacccggcaccacgccaccgccgagcacacggtcgaattcggaaaacccggtaccgagccgctcgacgctttccgtgcccacttcggtaatcggacgggctgcagatctggcgttgtcggcaaccgtaaccgactgcgtgcgtgatgttcggccgggagcggccgtgcgagagcctgccgccggccgagcctcgtgaaattcctcgaccgtgccccactgaccacactcggggcaacggccgtaccacttcggcccgttccaaccgcattcggaacatacatactgcacacttgatttcgccatggtctcaccctaacccaaacaccagcggacggtaaatttttaccgttcacaagagtttcacgcggcttgcgcacaacgactaagattacggccgtctagcgtcacgcggctgtgagagaatcggggtatgactaatagtgagaactcctcgaccacacaatcccatggcaagttgattgcagtggtggttgccgcagctgttgtgattatcctggcagtgctttcggcctttgtgtggccgggttgggccatccagaagaatgatggcacctccactaccacccaaaacagccagcagaaaaccgaatcatccgagccgatcaagccgaccatcgacgccacagctttgccggatgatgccagtgagctgttgaaggccatgccggacagcgtgctgaattacgcgcgtaccaaggcggatgcctccacgacgtggaattccgcgtcgccgctcgaggagtacactctgacctactccactggtgatgccgccaaggatgtcacgctggtcgccgcgcagtggtcgtcggcggacaatgccaagacccagtacgatgcgttggtcgctgcgcagaccggcgatgagtcggcatccggcaacgtcaaggtttccggcaacgtcacgggcgcgtacgtggtgaaggccgatgcctccaacagcaagaacgccgctgccatctggcagaacgataccgtggtcttccaagctaccggcaccaaggaagcggtcgatcgcttctaccagaagttcccgatgtagtatctagtatcggctgtcagctgctgcacaaacttatgaacgttggggcatccacattgctgatgtggatgccccaactgcgttcagggcatatgcggactatcgacaacatactggtttcctctgtctggcaacacgtgtattatggtgcaagttgcaacttttacgattaatcgaaatggaggcttcagatgggttctgtcatcaagaagcgccgcaagcggatgagcaagaagaagcaccgcaaactgctgcgtaagacccgccaccagcgtaagtagtcttacctgcaatcaaggcattagaaaccccgtgatcgttatggtcgcggggtttctctttttggctcctttgccttgttcgggcaacagtaaagcccgcacctgcgatgtacagatgcgggcttggaaaagttcagtgatgtgagacgatcacttgttggcgttggtcaacacgcgcgggccgttcgggtcgccgacgatgaccttgtcgaccatgttgaggaacaggccgtgctccaccacgccgaccgtgttgatgaggtcttcggccagctcctgcgggtgatcgatgcgctccaggtgcaggtccaccacgaagttgttctcgtcggtgcgcacttccttgccatcggcgtcaagacgaagcaccggcttgtagccgcggtcctcgaacttcttgatgacgtggccagcgccgaacggaatgacctcgaccggcagcgggaacttgccgatggtgtccacaaccttggactcgtccacaatccacacgatctggttggagttggtggccacgatcttctcccacagcagagcagcgccaccgcccttgataccgttgaagttcttgtcgacttcgtcggcgccgtcaatggtcacgtcgatgtggtccacgtcgtcgatgtccacgatcttgatgccgtagctttcagcctggacctgcgtgcggcgagacgtggttacgccagtgaactcaagaccttcctcctgatgacggcggccgagctcgtccaccaggaacttcacggtcgaaccagtgccgaggcctgcgatcatgccgttttcaacgagcttggcggcttcgatgccggccgccttcttcagcgcatcctgctgtgccttatccatggtttctcctttgccatccttgcctccgccgcatggatcaacggcgtgaagccttatctcctatcctaacgcgaatgagcgattttgtgtcatcgtgtccgattgcggtacatattcgtgtgtttgggtgttagtgtcgtacgaatggtgcgttggcgatggtcaggttgccgtcgccgtccacatagccttcgatttcgatgctgcctttgatcggcatcggctgcccgttgaaatacgggctcgttttcggcgcgggggagaaggtcagcgtaccggataccgtcagtccgcttggctttgcggggtgtacggggtgcgctgattgtacaggttgcgctgattgtgtcgctaagggtgacgaagacttggtctctggccttgtggcatccgtcgaatccgtcgccgcagccggcttgcgcaaacttgccgcatccgccttgccatccagcaccaactgcacgtctggaggcacatcggtgccatgtgcgtattcggagcccagtagcgactgccagccttcaatcggcagatagccgtcgcgcgcacccgaacggcaatcgcccgcataggtgcgtgccagttcatcgaccaactcattgccctcgttgccggcgtgacctttgacccatcggaaatccaccgggccagggcgttgtgagatctcacggtcgatcgcctgaataagctctttgttcttcacaggctttttctgcgaatttttccagccgttcttcttccagcctttgacccacttggtcgagcaattgatggcgtactgcgaatccgattcgatgagcaatggctcagggcccgggtgcgctcgcaaagcttccagcactgcgcacagctcaccaatctgattggtgccgttggtcgcgccgcccgcatcataaccatggtcgtcgtgcttatggccgggcttgccgccggcgttctgctcatgatcggcccaggcccagcccattggcccgtttggattccctaatgcggacccatctgtggatactgtgatagtcatgttctccaccctaacgcaagttgtgcaatctcttgctgaagtggggttgcccagtgcgaggcaaaacaacgtagtgaagagtgtgaataacatcacacctattgactttgcttgaaaaacatgccatcgcgcgtgaataggtgagcgctcacaagaaaaacaagacatttcctctctgcgggtgaggccggcaacaatggcgcatccggtatctggaatgagaataagggactgtacaaaaccagtgacggcaacatcgaaatcctcaaaccagaggcggacagcgatggttcgacggccacggccgcatccaagggcaccatgcttatcgcaggcaactccaaaaccgtggcactcggtccaggcggcatggccttggctcccggcctgccgctcggtcttggctggttcatccgacgccgcttgggattggatgcctccgacattctggaccgtaagctcggcttgaagtaacggctggttcggacgtgattgctgtcacgtacggatcatgacgacagcgcgaaggtcctcatcggtttacgtcgatgaggaccttcgcgcgcattaggggagtctgttgcgggctgcgctacgcgggtcatgctgcgcgggcgtgctatgcggacaaactacgcgaacaagtcgttcagtgcctcggcaatcgtcggatgcgtgaacaccatatcgcgcaacgtgctggccggcgcgtcaagatccatcgccaacttgacgatattgatcacctcgtgcgactcgacggaaagcagcatcgcacccagaatgcggccagtattgcgttccacaatcgccttcatcagaccatccggtcgccgcattacctgggccttcggcacagcggccaccggcaatcgcttgaccacataatccaatccagccgccttcgcctcgcgctcattcaatcccacgcgcgagtaaggcgtggcgaggaatgtgctcgacggcacatgcttgcggtccttcaccgtgtacggacggtcggaaccattgagctgcgaccacaccacgcgatagtcatccagcgaaatgtacgtgtgctgcgggccgccgttcacatcgcccagagcccaaatgtcggctgctgtggtgcgcagaagctcgtcgactttcacggcaccgcgttcggtgagctccacgccagctgcctcaagatgcagtccctcgacgttcggcgtacgtccggtggccaccagtaccgcgtcggtggtcaggcagaatcgggcttcagccggctcggcgaaccgcggctcgccatcgtctgatggtttcgtttgaacgtgtgacatcgtggcgtgatcggtcgggttgctagtggggctggtggttgttgtagtgtcggtggcgtcggtggcgtcggtggcaccggtgatatcggtatgagcgttcccggtgccggcgggggtggaatcgcaagcttgcgatgcgccgcgagtcatacccttcaccgcaacggacaacctgacgccgccgtcagcagcaggcgcgatggccttggtatccgcgttgaacaggaacttgacgccctgcgcttccaactgtgcgcgaatcgcggccgccacatccgcatcctcgcgcggcaggaactcggcattgtgctgcagcacggtaaccgccgtgccgaaatcggcaaacatcgaggcaaactcaagtccaatgaatcctgaaccgataatcaccagtcgctgcggcatatcgtcgagatccatcagtccagtgctggtgtagacgccgggcgtagtgtggataccgggaatatccggaatgcgcggcgtggcaccggtattgatgaagatcttgctggcggtcacggcgaccgggccctcagcggtggcgatttccacgctatgagggccggtgaagtgagcgcggccggtgattacggtgatgttgtcttggtcggcgagcttgtgatagttcttgtcgcgcagcatcgaagtgacgcggcgcttctccttgatagcagcctcgaacgctgcttcgcgggtttcgggagtactgttcgcgccatcccgccgcgcctgttcggcggacaaaatcagtgacttggacggcaagcatccgatattgatgcaggtgccgccgtacatgtcggcgcttgcctcggcgacgacgaccttgcggccggctgcactgagcttggcagccaaggttttgccgcccttgccgaatccaatgatcagggcgtcggtggtgatagtgggggaggtgctgggtgtgctgatggcattgggtgtgctgatggacatggttacttccttacgtattcgagtgataagagtgcgttgtgctgatgtgttgtgtgccgtgcggcgtctgttttcttctttgactgccgaagcgttatcgactgatgctggctaggggaaacgcgcgggattattagcctttgcgctcgctgaatatctgttcggtgatgtcgtggatggtggtgtgttcgagttgttcgaggcaagtgcggttgagcccggcatagatgtcgttcatcactgcgcccattgaagatgacaccagacagtcctcgtgtacgtcgcccggtgtccagttcactttcacaaaagtggtgccggtggcttccgctaccgcgcgcaaagtgatttcggcggcgggccgggccagagcgtacccgccttcagcaccctctttagtggcgatgagtccggctgaggcgagcggtcgcattactttgcgcacgcgcgccgcattggtacatatgttctcggccaggatctgactgggcaggtgtgtggcgcgatggtcaaggtagaccaatgcgtgcactgccagtgaatggtcgccgttcatgaaacgacctccttaccgagtcgatactgtaactatgatgtgtacagttatgatactgtaatcatatcagatacagttagtgtgtcaaatcggggttgaagaggtggatgactatgtgtataagtgaggtgtccacatggttatccacaatgaatgtgcgtaagtgaagctaggaccacatacctcggatcggcttccgtttccgcacccactacccatatggtggtgtcatgaacaggatgaccgacggcatcaccaactatggagctctgccaggctctatatacgatcagcctccggaagaatcggaggcagtttttgttccgcccgaatttgcggggtcattttctactgactcgaaatacccgacttctcgcgactcgtcatcgccgaacagtggtgcacatgattctgcagcgacaccgaccatgagcgaaagcctcgcccagcgcagacgcgacatggtcgcacgctgcaccgaggaagcgaaacgggcgggcaagaagctgcttttcggcatgaccacttccctcgctctgcaatccgtaccgattcccgccgattgcgacctcgactcggccaagctgcacactgtatccagcgttaagggcaagcggtttcgtacacgccatgcaccactgcaaacgcatatttggaaacatgcggctaaagccgccaatgtggaaatgaaccaacacgtgtttgcgctggacctgtttcacgtatgggcccaacttgccccgtatgtttcttttgagtccctgattgtgctcggggatgccgtcatcgctgctacgagcaaacagccagtattggccaaggatcgtgatgctgctgcaatctatcaggatctggtgaagttcgtggagcaatttacccgattcagagggcgcccgtcctgcgttcgagcattgcctctgatatcacctggtgctgattcgcccaaagaatcagaagaacgactctctctggtagcgcatgggattccacagccggttgcgaactatgtggtgccggatgcggcttttgcatctggagctcccataacgttggacttagcgtggccggagttcaaggtcgctgttgaatatgatggcgatcatcatcgtacgagtaaggctcaatggcgccgtgaccaagagaaaaggggtgtgctggtcgggcggagatggctggtcttcgtcgccacggcggcaagtatcgctaacgaggacgctcgtgctgaattcgctttcaacgtggcgagggcgcttgcttcgcgcggtgccgtattcgagtttcatgtagttgccatgtctcttgaagagttggcgcagagcctgctgtgaccatgatgttcgaaacggactgatgtaaaggcaatatttgtacgacctgttgttgtggtgtgtgcttgatattgcatgccgttcgattgcgatgcctcgtagtgatggatttcgtgaatgactagtgttcgattgtggagggaaatgtgtcatagtggtcgattgggggtgttgtcggtgcattgagcgtggatttgcgccaatgggtgtgggacgctacgcatgttttgccgatttttgcgtggcgtcccacggcccctcgggtaatggctgtgacgggtgtggcaggaatggcgtctttccggggtttccagtttgagtgtgtgggatgggggaaatgtaaaacgattgacttagctgttgtcccacgcttttgtgggatggcagctctggaatgggcaaattcgtcgtggcgtcccacaacgatgttaaaactcgaccatgatgcaagccgaccgaacgcttcggcggtcatctggccgctgtgaccccacaatgatgatggtaggcaggcgaacgtttcgcggtcatctggccgtcctgccctgcagtgatgttgagaaaatgcagtcacggtgcatgaggagaaccgttgacctgcgtgtttcagtggtcgcgaactgcatatgcgctaaaaaaagctctgcagtggattgcatgaatccaatgcagagccttattggttgcggtgaacgcgactaacgcagcgatttcactcgctcagggccttgtcgaccacgacggtggcctcgtcgagtaccttgtccagagcctcgggggagacgaaggactcggcgtacaccttgtagatgttctcggtgccggaggggcgggcggcgaaccagttgtccttggtggtgaccttcagaccgccgatcttggcgtggttgcccggtgcctcggtcagcttggcggtgatgtcttcgccagccagggtggaggcggtcacgtcgtcgccggacagtgccgcgaacttggccttctgctccagtgtggtcggggtgtcgacgcgcttgtaccaagactcgccgaagcgctcgacctgctcctggtgaagctgggccgggttcttgccggtcttggcagtgatctcggcggccagcaggtcggggatcagaccatccttatcggtggtccacacgcggccatccttgcgcaggaagctcatgccggagctctcctcgccgccgaaggcgacttcgccgctgaacagcgggtccacgaaccacttgaagcccaccggcacttcgatgaccttcgcgttgatcgatgcggccacgcggtcgatcagggaagaggagaccagcgtcttgcccacggctgcgccctcaggccagcccggacggttgccgccgaacaggtactccacgcacacggcgatgtagtggttcgggttcatcacgccccagttcgggcagacgatgccgtgacggtcggcgtccgggtcggtgccgccgaccagatcgtacttgtcccaggcgccggcgttgagctcgtcgaccaggcccttcatggcgtacggggaagacgggtccatgcgaatcttgccgtcgtggtcgatggtcatgaagcgccaggtcgggtcgacctcaggacgcaccacgccgatgttcaggccgtacttctcgttgatgagcggccagtagttcacggaagcgccgccgagcggatcgatgcccagacgcacgccggagttgcggatcacgtcgaagtcgatgacgttctccaggtcgtccacgtagtgctcgcggaagtcgaagccctcgacgtactcggacttgatggcctcctcgtagggcacacgcttgatggacttgaagtcgccgagcagctcgttggcgcgagcggcgatggcgttggtggtctcggccggggccgggccgccggtgacggggtcgtacttaaagccaccgtcggtgggcgggttgtgggacggcgtgacgacgatgccgtcggcgaggccctcgccctcgaagcgctgggtgccgtcgaccgcacggttgtgggtcaggatggcctgggagaccaccggggtgggcacgaagtcgtcacgggagtcgacgcgcacgtgcacgccgttggcgacgagcacctcgatggcggtcttcttggccgggccggacagcgcgtgggtgtcggagccgaggtacagcgggccggtgacgccggccttcttgcggtattcggcgatggcctgggagatggcgatgatgtgggcttcgttgaacgaggtcttcagggacgatccgcggtgaccggaggtgccgaagatgacacgctgctcggggacttcgggatcggggacgaggtcatagtacttgccgataacctcatcgacattaatcagatctgctggggtggcgggctgacccgcattgtttgctaccatgttccctattctgccacgtttttcgccactttgggtactcttatgttaagagttgtcaacttttgtgcgaatcgtgtgccggttgtctagtgcttggtcatttccttctcgatttcctccagcgacttgcccttggtctcgggcaccaagcgcagcacgaatgggatggacagggccgagaacacgccgaaaatcgcgaacgggccgcccacattgttgccgaacgcatcgagcagcacgaggaagaactgggagacgatgaagttgcccagccagttcgccgccgagccgaaggatgagccgatgccgcgcacgctcagcgggaagatctcgccgataagcacccaggcgatcgggccccacgagaccgcaaagccgaggatatagaaagcgatgagaatcatcgtcggcactgccagtacggccacgtcgcccacgaagttcatcacggcgagcaccgcgagcgaaacggtcatcacgatggaaccgaagatcagcatgcccttgcgcgggaaacgatccatgataagcgtggccacgatggtgctcacgaagttcaccacgccgatgcccaccgacacccagatcgcgtcgccttcagggaagccgaagcccttgatgaacacctgcggcaggaagtagatcaccgagttgatgcccacgagctgctggaacagcatgataccgatggcggccaccagcgccggacgagcgatacggaacagttcgcgcacaccacccttggtgtcctgtgcggccacggccttgatttcgtccagctcaatctgcacctgggtctgatccacgtccttgcgaatcagcgtaagcactttgaaggcgttgcgggtgtcgcccttgttcaccagataacgcggggattcgggcagcaacaggccgccgagcagcaacaaggcggccggcaccagcgccgaaccgagcatccagcgccagtcgcggatgccgaagaggttgtggttcaggaatccgaggttggaggcgtaggccagcagaatgccgaaggtgaccatgagctggaacagcgtggacagtgagccgcgacgctccttcggcgccagttcggccaagtacgccggggtcagggcggaggccgcgccgacggcgagacccaggatgatgcgggcgcacaccatcatcgcgaatccggtggaggaggcgcacaggcctgagccgagcaggaacagcagcgcggagacgatgagcagcttcttgcggccgaaccggtcagacagtgcgccgatcgacagcgcgcctgcgcacgagccgatcagcaccgaggaggtgatgaagccggtctgagagacgctcaggccgaagtccgattcgataagcggggaggcgccggagatgatgccggtgtcgaaaccgaacagcatgccgccgagcgcgccgaaggtgaagatgaatgcgctgttgagcgggaagcgcgtggagaagccgtgcgattcggcggcttcgaggtcctcgattgcgttggctgccgcgtttgtggccgcgcccgccactccggccacgccggtttcgatggtttcgattgcggtggccgccgcaccggttgcgctggtttcctgcgccgcggatgccgtctgtttcgatacgggtgatgccgttgtcgtcgtcattgccttgtcctttcgccgttgacggaccgcgcctgttgcgtggcccctctgccgcgtgcaaggtcaggcttcgattgtctgcagtcgcccgaaaacaaaaaaagacctggaacaacgtggaattcgcatatcacgatacgcaaattccacgtcgctccaggtcttgcctcgttttgagtaacaaccctgctacgcaacgtgtgtgaaagatagaatacgacttccgcagtcgcgacactccgaataggcggcaaaaaacgatgatttttgacaacgattgcaggattctgcatggtggaatgatgtcggaatgggcgctgcggcaaatacggagaacgggtgtggcgaagcatcatcgcggaacattatggcgggacaccatcgcggagcaccgtagcgcatagttgccgtttcgcgatgctttgccggcattgccgtgcttttggggcacccagcgccgataatggaacacagtggcatacggcagcaaggaggaaccgtggcgaacgcatcgaacgcaacgcctgcagtgattgcggcgcgcatcgtcgatgccgtcggcggccccgcgaacattaccagcctgacccattgcgccacgcgactgcacttcgaactggccgatgccggccatgtcaaccagcacggtcttgaatccgtccccggagtcctcggtgcattcccgcgagccggcaatcgttatcaggtcatcatcggcggagcggtcgcctcggtgtacgagcagatcgttcggctgcggacggcgcgattgatgccggcagcgcaattgccatcggcagtgatgcagtcagcgtcgcagtcaacgcaacccactcagtcaatgcagcccactcagtcaatgcagcccactcagccagcgcagcccgcgcagtcagcgcaatccacacagcccacgcaacccgcgcagtccgcgccgtacctttccgacgatgccgcaccatcgcgcgatactgccaccgacgccgaacaaagttgcggcccatccaatacatcccgtcacttcacgcctcgtaccgtccgcgagtggggcagtgccgcccgcgcttgggctgccgcgtttttcgactacctgtctgactcgttccgcccgattctgggtgtactgctcggtgcctcgctggtcatcgccatcgtcaacgtgatcgttgcactcggcatcgtgcctgacggcgagacctccgccggctggatactactcaaggcgatttgggagggtgtgttcaccgttctgccgattatgatcgcctacaatgcggccaagaaactggacgtcgacccctggctcggcggcgcgattatggccgcgctgatgaccccgcagtttactggcgtgatgtccggaatgtccggaatgtccgggacgtccgtatccagcgccctctccggggcgattcaatgctcggccaacgccgtattcggcgccgaaacctgcaccgtgtcggcgttcggcataccgattcaactcaacgactacggcggcaacgtcttcgtgccgttgctcatggctgccgtgctcgccgtggtctaccacgggttgaagcgcgtcattcccgacagcgtacagctggtgttcgtgccattcctctcactggtcgtcgtttttgcgctcaccatactggtcatcgggcctctgggaatatggctcggcggtgggctgggagcggccacagcatggcttaacgcgcacgtgccgttcctattcgcgctcatcatcccgatgctctacccgtttctcgtgccgctcggtctgcactggccgttgaatgccctgatgctgatgaacattcaggcgctcggctacgatttcgtccaaggtccgatgggtgtatggaactttgcctgcttcggtgccaccgctggcgtgctcgtgctggccgtacgcggcaaggattcggccatgcggcagaccgcggtgggggcgttgctcgcgggattgctgagtggcgtttcggaactgagcctgtacggcatccatctgcatcaccgccgcgtctaccgctggctgctcgccggctgcgcggccggcggcgtgaccagcgcggtgcttggctggctgttcccgtccgtgctgccatccggtcagatggtccggggcgtcacgactacggcgttcgccttctcctcgttgctgacgattccggtgtttgacagaatgtgggtgtacgcgctgtccatcgccgttgcgtttgtaatggcgatggtgctgacggtgctgttcgggtaccgtacgccgccgcgcgccacggaggcgcagatggtctcggcgggcgagaacgtacgctcgcaggatgcggtgagagggattggcgcgacatcgtcggatgcggagtctgcggaagattccccatcgcggcctgcctccgatcggactcctgactccaacgccatcctgtcgccggtcgccggccggttgatgaatctggaagcgactggcgatccggtgttcgcctcccgcgcgctgggggagggtgtaggcgtcgtgccggagacggccggcgagacggccgtgctggcaccggtcagtggcacgctgaaaaccgtggcccggaccggccatgccttcggcattaaaaccgatgacggcatcgaagtgctggttcatgtcggcattgacaccgtcaatatggatggcgagggattcgtcgtggccgtgggcaaaggcgagcggatcgcggcgggagagccactggccaccgtggatttcggcaaagtcgcggcggccgggcacagcgttgtggtggtggtgacggtggtcaacgccgctgaactgaccgtggtcacgccgttgatcggcgacggtagcagcgacgacaacggcggcgactgcaaaaccgtatcagccggcagcccgatcatcgatgtggaacaatgacgttgcgaaaggatgccatggaaatactgcgagtgttcaacaacaacgtcgtgctcgccaaaggcggcgacggcggtgaggtgattctcaccggccgcggactggggttccaggccaagccggggcagacggtcgacgagtcgaaagttgtgcgcaccttcgtgccatcggacgggcgcgaccctgaccatctggcgcagatgctggcggacattccgcccgaaatcatccgcgtggtcgtcgaatccatgcaggagaccggactgggggagcgcgagaccggcagcaccacgctggtcatggccctgtcggaccacgtggcgaatgcggtggagcgggtgcggcgcggcatcgacatcacctacccgctgctcggcgaggtgagcaacctgtacccgcaggaatacgcgcaggggcgtgcgatgctcgcatcgctcaatgcacggctcgacgtcacgctgccggacggcgaggccaccgcgcttgccatgcatctggtcaacgccggcttcgccaccggcgacctgtcctatacgtacacgatgacgggcgtgatccagcaactgcttgacatcatcgaccacagctacggcatcacgttggaccgcagttccgtgaacgtgggccggttcatcacccacctgcgctatctgttcgtacgcatccaccagcaccagcaactgacggacgagccggcaccggtgatgaaggtgattcgtgagtcctaccccgctgcgctgcgatgcgcgcgaaccatcgcctccctgctcgaactgcgcctcgacacggatatcagcgacgacgaaatcgcttatttggcgatgcatgtcgcccgagtcaccggccacgcatcgtagtaacggattagcggattggcgaatcagcgaatcggctcgagtgtaccggtcatttcggcgaaattcgaggtggcatttgaagcagcggcctgcgcggtcttttccagcgcggaggcgtcgggcacgcgcacgatcagcgcgcggtgatccaccgagaaacggatgtggcgggtttccggcagcatgtcaccgtccacctgcgctttggccggcttttccaatgtgatttcggcactgacaccctggacctgttcgatggtcgagttcgtggacagcgggttctgttcgggcttgccgatgatcgtctggtgcacaacgtcgccgaacaggttggcccagccgaggatgccgccggtggtgtcgatgatttcgaagtccagcagaccatcgtcataggatgccgccggcatcagcgagaacatgggaatctggccgcagttgccggccatcaccgtgcggaaatcgagattcttgatggtgtgggtcgagccgtcggcgctggtgactgtcagcgtgccgcggaacttcggcgcgaacaggttcttcacgccgcccacgaagtaggcgagccagctgatgttcgccttgagctcggggttggtgtcgtcgatcatggccgcatcgaagccgatgccggcgatgatgaggaaggcgtggccgtggtcgtcctccgggtggtcgagcagggtgagacggcccatgtccaccaggcgggagccgtgggaggtggccacggtcagcgcggcgtcgatatcgtccacgggaacgcccatattgcgggcaaacaggttgccggtgccgatggggatgatgcccagcgcatggccggtgccggagacggcgctcgccaccgtgcgcaccgtgccgtcgccgccgaccgcgatcaccacgtcggcgccgtcctccagcgcctcaagcgcgcagaccctgccgtccttgtcaagctgggtgtcgtagaagcggatgcgattgagccccttggcctcgcagaacctctggatatgcagccggcgggcttcggcctgcggtttggacggattcacgatgaaggcgtactgcacctcgtcgtcccggcgcttctccagcgtctgagccagcttgcggcggcgctgcgcgcgcagggcgatgacgatgacggcgatgagcaccaccacaatggcgattgcggcgatgatcagaaacacggtgagggcaggctgaggcatggctcctattgttatcggtggggaggtcgtttgcggccatggtgcgccgtacgtgaacatttcctgcacgcaacagccccgtggggcgcgattatggttcaatcgcgtctcatctgacgaaattggccgggtggacccgtccgcggactttcccgggcttccctgtgatttccgcgtgactcccgcgcattcggccattgtcggtgtctgcttacgcggctagtctggtgcccatgcttgatattcaattcatccgtgaacacaccgatatcgtcaaggaatcccagcgcaagcgcggcgagtccgtggaactcgtcgacgaagtgctctcctccgacaccgcacgtcgtgaggcgctgaaggccttcgaagaggctcgcgcccagcagaaggaaatcggcaagaaggtcgcctccgccccggcggacgagaaggccaagctcatcgccgagaccaaggaactgtcccagaaggtctccgaatacaagtccaaggccgattccgccgccgaggaatacaccaccgccatgtggaagctctccaacatcgtggagcccgaagctcccgaaggcggcgaggacgactacgtggtcgtcaagaaggtcggccagattcgcgacttcgcggccgaaggcttcgagcccaaggaccacctgaccctcggcaccggcgtggccggcatcgacatgcgccgcggcgtcaaggtcggcggctcccgcttctacttcctgcgtggccaggtggcccgtatgcagatcgccatgctcaccatggccgtggaccaggccgaggagcacggcttcacgctggccatcaccccgacgctggtgcgccccgaggtcatgcgcggcaccggcttcctgaactcccacgccgacgagatctaccgtctgcgcgagcccgacgaccagtacctggtcggcacttccgaagtggcgctcgccggcatgcacgagaacgagatcctcgacctcggcaacggcccgctgcgctactgcggttggtcctcctgctaccgccgcgaggccggcgccgcaggcaaggacacttccggcatcatccgcgtccaccagttcgacaaggtggagatgttcgtctacgccaagcaggaggactcctacaaggagcacgagcacctgctggccatggagcaggagatgctcgccaaggtcgaagtgccctaccgcatcatcgacaccgcagccggcgacctcggctcctccgccgcccgcaagttcgactgcgaggcctgggtcccgacccagggccgctaccgcgagctcacctccacctcgaactgcaccgagtaccaggctcgccgtctgaacatccgcgagcgtatggaagatggcggcacccgtccggtctccacgctcaacggcacgctggccaccacccgttggctggtcgccatcatggagaaccaccagcagaaggacggctccatcgagattccgcaggccatgcgcgcctacatgggcggcaaggaagtcatcgagcccactaagtgggaggcctgagtctcatcgtgctttagctccctttaatgggggagctgtcagcgtagctgactgagggggagatcgctaatagccagcaggcgaatccaagaccgaccgcactgccgaatatcaacatccctcccttctgtataatgaatacttgcgcgtgtgaacgcgcatcaggacaggtgtctgagcggcctaaagagacggtcttgaaaaccgttgaggggcaaccctccgcgagttcgaatctcgccctgtccgcgaaccgaggcctgggcaacatgcccaggctctttttctttttctggaacctgtcttcttgatcgccaccggggtgctgatatattggtttgtgatgccgtaacatgcggtgtccccgttgatatgacgggccaatcggcgtgagccgataagaaaaggcccgacgtttgcggcatcgggcctttgcgttgattaccggcttgcgcctttaatcaacaaggttgcaagatgaatcatatcacgatgcacggtagtctgaccgtgaacgggcgcaccgtgatcgtccatgtgggcgatggcgaggcgaacgccacggttgacggcacgcacttcaacgtgcgtagcctgtggcagctctaccagttgctgagactgctcgtgtagcgtctcattaaggcgcggtgccccccctagtcgggtatcgcgccggcaacctgaaaaccgataatgttggcaagtgcttgcaatttgtggtggacgattgcaagctgacgtcttggattgttgccgctatccaatatctcattaggtctaccggtggaccaaaagtacgttgctttgtaaggggagttaatgaaatgaacaaacccgcacaatcgagcatcgaatcggtttaatgccactcacctcaacgggacgcgcggtaattgttagctaagttgacaataaaagagcaaaggcctaaattagcaatcagtcatcacgctgaggtgatgatttcactaggaaggagtagagatatggtatcgcacaacaagcgcatcgtggctgctcttgccgcggtagcagcaatgggtattggtttggccggttgcggcggcagcgacactgccggcgacacgaagtccggcagcgatggcggtgtggtcaacatcacctatatgcatcgtctgcccgattccgaaggcatgaccttggtcaacgacattgtggccaagtggaacaaggagcacccgaacattcaggtcaaggccaccaagttcgatggcaatgccgccgacatgatcaagaagctcgagaccgacgtcaaggctggcaatgcgccggatctggctcaggtcggttactccgaggttcctgaggtcttcaccaagggccttctgcaggatgtcaccgatgaggccgccaagtacaaggacgatttcgcttccggcccgttcgcactgatgcaggtggacggcaagacctacggtctgccgcaggacaccggcccgctgacttacttctacaacgccgctgaatttgagaagctcggcatcaccgtgccgaagaccgctgacgagctcattgagaccgccaagaagaccgctgcccaaggcaagtacatcatgaccttccaacctgatgaggccatgatgatgatgtccggccaggccggcgcttccggtccgtggtacaaggtcgacggcaactcctgggttgtcaacacccagactaagggctccaaggccgtggccgatgtctaccagcagctgatcgacaacaaggccgccctcaccaacccgcgttgggatgcatcgtttgataactccatccagtccggtcagctgatcggcaccgtggccgccgcttgggaagccccactgttcatcgattccgccggtggcactggtgctggtgagtggaaggtcacccagctcggtgactggttcggcaatggcaccaagaccggcgccgatggtggttccggtgtggccgtgctcaagggttccaagcacccggccgaagccatggagttccttgactggttcaacacccaggttgatgaccttgtctcccagggccttgtcgtggccgccaccaccgcggatgccaagaccccgcagaagtggtccgactacttcagcggacaggatgtcatggctgagttcaagaccgcgaacgacaacatgggtgacttcacctacatgcctggcttctccgcagtcggcgctgcaatgaaacagaccgccgccaaggctgccgatggttctgccaaggtttcggatgtgttcgacaccgctcagaagacctcggtggatacgctgaagaacctcggtctgtccgtcaaggagtgacctcactaggtcttgtcaacgggccggcttgaaatagccggccgtccaagacctccgatgcctcgcatcaccatagcgaaaggccggggcacatactccggccttccgtattgtttgggggtattgctgcaggggcgctgtggcccttgtcatttgttttactgttctttgcgaagacaggttttgtattatgactgcatccactactcaggcgaagggcaaagcacctaggcgtgccgccgccaagccgaagcggtccggcgctcagaagcgcgagaaccgcaccggctgggcgttcatggcaccgttcgccgtcctgttcactttcgtgttcatcttgcccatcatctgggccatctattccagcttcttccgtcaggtcaccgagggcggtggcgcatacggcggtggcgagctggtcaataaattcgtaggattccagaacttccagtatgctattacttccggcaacttctggtccggcgtcggcagggtgctgctctacaccctgattcaggtgccgatcatgatcatcgccgcactggcgttggccatcgtcatcgactcgttcgtggtcaagcatgtcaccggtttccgtctgggctacttcctgccctacgccatccccggcgtcgtggcctcgattatctgggtctacctgtacaacggccaaatctcgccgatcgtcaagggacttgccgccatcggcgtcaatgtggacttcttcaacaagaacatcgtgctcggctcgatggccaacatcaccacatggaccttcaccggctacaacatgctgattttccttgccgcactgcaggccatcccgcatgacctctatgaggccgcccgtatcgacggcgccaatggttggcagattgccacgaagatcaagctgccgaacgtgcgtggcgcggccctgctggccatgctgctttccatcgtcggcaccattcagctgttcaacgaaccgcagatcatgtctacggctgatccgggtatttccaagtcgtatacaccgatgatgatggccatgaacacttctcagggcaccattaccccgtctggtgacggtccggcctcggccatcgccattgtcatggctctgatcgcaggtgtgcttgccgtgctgtacaccttggccgaaaggaaggtgaacgagtaatgagctccgcaaccgttgaagaacgcgcccgcaaaaaggccgagcgcaagctcgaaaagcagcgtcaggctgcgcaacacgatttgcctcgctccatgcgaccgtccgcggccgtgaagaccctcaccgtggtgctgctggtactggtgttgatctacttcctgttcccgatttactgggccatcatcgcgtccaccaagacgccggcccagatgaccggtagcaacggcatgtggtttgctgtgccgcttgaccagctgcccaatgccatcgccactaactattccaagctgcttggctggactcgtggcaacttctggcgctgggtgctgaactccctgatctactcgggcgtctcggcattgatcggcaccatcgtgtctgtgatggctggctacgccaccgcaaaattcaacttccgcggcaagaacgcggccatcggcatcattatggcctgcatgctcatgccgtccgccctgctgaccatcccgatgtactcgatcttccacacgttgcacctgaccaacactatgctctcgatcatcatcccgtgctgcgtttcgccgttcggcttcttcctgggccgcacgtacgcacagagttcggtgccggacgaactgcttgaagccgcccgcatcgacggcgcgagcgaggcgaggatcttcttcaccatcgtgctgaggctcctggccccggccatggtgacgattttcctgttcctgttcgtggccacgtggaacaacttcctgctgccgttgatgatggtgtcttccgacaccttgaagcccgtgaccctcggtctgtacggcatggtctcgctggccacgttcaccgatcgcggcgccctgatgatgggtgcgttgctcggcgtgctgcccgtgatcgtgctgttcctcggcctccagcgctactggcagtccggcctcgccgccggtgccgtcaagggctaaccaatccgctgcccggcatgtcgtgtcactccttccggtgccgggcaacgtccctcccatattcagtgacacgattccaatcgtccggcgtcaccgtaagcgtcaaggatctacgcagtcagggtcccagggcccgcgatgacgccggtcattttgtatgcgacgaattcgtcgctttgtagttttttgatgaccaaccccacaaaggagcactcatgaccagcaccggccgcttcacgctgcccagtgaagagaattttgccgaaaagaccaaggaactcgccgaattgtggggtgcggacgccatccgcaactccgatggcacgcatctggacgaggcagtgctcgctcttggcaagaaaatctacagcgcctacttcccgacccgcgcccacaacgagtggatcaccctgcacatggacgagaccccgcaggtctacctgctgaccgcccgtatcctggccgagtccaacgcggtggatgtgccgctgatggacggtttcttcgaggaacagctcaagcctaaccgtgacgccgaccctcataagtactgggaagtcgtggaccgcaccacgggcgaggtcgtggacccgtccggctggacgctcgacccgggcgaggacaccgtgcacgtgaccgctgccgtgccgatgcacgaatacacggtgagtttcctggcctacatcatctgggacccggtcgagatgtacaaccacctgaccaatgattggggagacaaggaacacgagattccgttcgacatctaccatccggccacccgcaagttcgtgttcgatacgttcgagcagtggctgaaggacagcccgcaggtggatgtggtgcgtttcaccacgttcttctaccagttcacgctcctgttcgatgccaagcgtcgcgaaaaggtggtcgactggttcggttgcgcctgcaccgtgagcccgcgcgcattggacgatttcgagaaggagtacggttaccgtctgcgtccggaggatttcgtggatggcggtgcctacaactccgcgtggcgcgtgccccgcaaggcgcaacgcgactggattgacttcctctccggattcgtgcgcgagaacgtcaagcggcttgccgacatgtcgcacgcggcaggcaaggaagccatgatgttccttggcgaccagtggatcggtaccgaaccgtataaggacgggttcgaaaagctgggtttggatgcggtcgtcggctccatcggagacggcaccaccacccgcatgatcgcggacattccgggcgtcaaatacacggaaggacgcttcctgccgtacttcttccccgacacgttctacgagggtaacgacccgagcatcgaaggcctcgacaactggcgtaaggcccgccgcgcgatcctgcgttcgccgatcggccgtatgggctacggtggctacctctccttggccgccaagttcccgaagttcgtggacacggtgacccatatcgccgacgaattccgcgacatccacgaccgcaccggtggggtggccgccgaaggcgagctcaacgtggcgattctgaattcctggggcaagatgcgttcctggatggcgttcaccgtggcacacgccctgcccaacaagcagacctactcctactacggcattctggaatccctgtccggcatgcgcgtgaacgtgcggttcatcagcttcgacgacgtactcgcgcatggcatcgatagtgatatcgacgtaatcatcaacggcggcccggtcgacaccgcattcaccggcggcgacgtgtggaccaacccgaagctcgtggaaaccgtgcgcgcctgggtgcgtggtggcggcgcgttcgtgggcgtgggcgagccgagctcggcaccgcgcttccaagcgggccggttcttccagctggccgacgtgattggcgtggacgaggagcgctatcagaccctctccgtggacaagtacttcccaccggtggtgccggaccacttcatcaccgccgatgtgccggtcgacccggcggcccgcgaggcttgggaacaggccggctaccgcatcccgctgagcggttgcggcggtggccagtccatcaagccgttgggcggcatcgacttcggcgaacccgtgctcaacacgtatccggtcaatgaaaacgtgaccctgctgcgcgcggacggcgggcaggtgcagctcgcgaccaatgattatggcgaaggccgcggtgtgtacatctccggtctgccctattcggcggccaacgcccgactgctggaacgcgtgctgttctacgcctcccacaacgaagacaagtatgcggcttggagctcgtccaacccggagtgcgaggtggcgcacttccccgagcaagggttgtactgcgtaatcaacaacaccgatcagccgcagcggaccacggtgactctggccgatggcaccaccgaggacttcgacctgcccgacagcggcatcgcatggcgtgaagcctgattcccgcgttttggagaacggacccatcatgaccgaaagcaatgaagttttattcggcatcgcctcgcattttgcgctggaaggtgccgtgaccggcatcgaaccttacggagacggccatatcaacaccacctatctggtgaccacggacggcccccgctacatcctccaacagatgaacaccagcatcttccccgatacggtgaatctgatgcgcaatgtcgaactggtcacctccactctcaaggctcagggcaaagagacgctggacattgtgcccaccacctccggcgccacctgggccgagatcgatggcggcgcatggcgcgtctacaagttcatcgaacacaccgtgtcgtacaacctcgtgccgaacccggacgtgttccgcgaggccggcagcgcattcggcgacttccagaacttcctgtccgaattcgacgccagccagctgaccgaaaccatcgcccgcttccacgacaccccgcatcgtttcgaggacttcaaggccgccctcgccgcggacaagctcggccgcgccgccgcatgccagccggaaatcgacttctatctgagccacgccgaccagtatgccgtcgtgatggatgggctcagggacggttcgattccgttgcgcgtgacccacaacgacaccaagctcaacaacatcctcatggacgccaccaccggcaaggcgcgtgcgatcatcgatctcgacaccatcatgcccggctccatgctgttcgacttcggcgattccatacgctttggtgcgtccactgctctggaagacgaaaaggacctcagcaaggtgcatttcagcaccgagctgttccgtgcctacacggaaggattcgtgggcgaactacgtggcagcatcaccgcgcgcgaggccgaactgctgccgttcagcggcaacctgctcaccatggaatgcggcatgcgctttctcgccgactacttggaaggcgatatctactttgccaccaagtaccccgagcacaatctggtgcgcacccgcacccagatcaaactcgtgcaggagatggagcagaaggccagtgaaacccacgccatcgtagccgacatcatggaggctgccaagtgagccgtcagtcgaaccatacccgaaccagcatgatgggggccgagcaatgagcgatcagctgaccgaggtatacgccagcatcgacgccctagtcgattacgccttggatcatctcgacctcgatccacgcaacgcagactggacccgcaaccaaatcttcgccctcttccacctggattcctaccccggacccaaaaccacaacgtcggcggcgtcagtgtcagacgcagtccaagacattgtcggcagccgaagccaggccccctctgacgaaaagacccccgaccccctactcgccgccttccgcgccgccgccacaaccgccggcctcttcgatccggaggaaggcccggcctacgccgacaccatcatgggcatcctctccgccaaccccgccgatctcgacgaccggttcctgctcatcgagcacagggacggcggcatggccgccatgcaatggttctacgactactgtgtggccaacaattatgtcaagcgtgcccagctcgaccggaacccgcgcttcgactcgcacgggctgacggtgaccatcaacctcgccaaacccgaattcaagaacatgaagaaggcggcggccggcaacgccgtgtccggcggctacccgaagtgcacgatctgccatgagaacgagggcttcgccggacgtgacaagcgcacgctgcgcaccctgccggtcacgctcggcggtgagtcatggttctggcagttctcgccctacggctacttcgaccagcacggcatctgcgtgaacactgaccacacgccgatgcatgtggaccgcgacaccttcggccatctgctcgacttcgtggaccgcttccccggatacttcctcggatgcaacgccgcgctgcctcgcatcggcggctcggtgctcgcccacgaccactaccagggcggcggcgaactgctgccgatgcacaaggccgccacttgggccgccttcacgctcgccgactatccggacgccgtggtcgaaatcctcgactggcccggtaccgccgtgcgtgtggtgtcgaaaaaccgccagagcatcatcgacgtatccgacatcatccgcgaggcatgggtcggttatgacgacgcggcgaacggcatcgccagccatgacgcggacggcaaccgccaatccgccctctcgcccagcgcgatcatcaccgaacgtggctatgagatgagtctcatcttccgcaacaatgcgatcagcgacgagtacccggaaggtattttccatgcacaccccgaatactggccggtcaagcaggagccgattggactgatcgaagcccaaggcctgttcatcctgcccggacggctcgtcgaccagctcggcatcgtcgaggaggcgctcgccgaaggccgcgatttgcccgatgaagtcagcgaattcagtctcgaatggggcgaactcgctgaaacattggccggaaaccgcgaccgcgaggccatccaccaagccgtacgtgacgagctcggcagcgtctgctaccgcatcctcggcaacacggccgtcttcaagcagaaagccaccacgcaaacattcctcgaaagtcttggttttgccgctaggtgaaacaggtcaagtgaagtaagctcaatactgaaggaaaaccgaaggcaagtccttccaaaggaggagatatgactactgttctggttacgggcggtgctggattcatcgccacccacaccgacatcgaactgctcgacaagggctacgacgttatttccgtagataactacggcaactcgtctcccgtggcgcttgagcgcgtcgagcagatcaccggcaagccggtcaagcgttacgacggtgacgtgcgcgatgaggcgcttatggaacgcgtcttcaccgaaaacaacatcgattgggtcattcacttcgccggtctcaaggccgtgggcgagtccgtggccaagccgatcgaatactacgacaacaacctgtactccacgcttgtgctgctcaaggtgatgaagaagcacaacgtcaagaagatcatcttctcctcctccgccaccgtgtacggcacgccgaaggaactgccgattaccgaggagacgccgaccggcggcaccaccaacccgtacggcacctccaagctgttccaggagcagattctgcgcgacgtacatgtggccgatccgtcctggaccatcgtgctgctgcgctacttcaacccggtcggcgcacacgagtccggcctgctgggcgaagatccgaagggtattccggcgaacctcaccccgtacgtggccaaggtcgcggtcggcgagctcaaggaagtccaggtctacggcgacgactacgacacgcccgacggcactggtgtgcgtgactacatccacgtggtcgacctggccaagggtcacgtggccgtcattgaccacatcgacaaggaaggcgtgttcgtctacaacctgggcaccggccacggctactccgtgcttgaggtcatcaaggcttacgagaaggccgccggtcatccgattccgtacacgatcaagccgcgtcgccccggtgacatcgccgcctgctacgccgacgcttccaaggcggagaaggagcttggctggaaggccgagctgaccatcgacgacatggccgcctcctccctcaactggcagaccaagaaccccaacggtttccgcgacgccgagtgatatgagcagatgagctccctctgatgagggagctcatctgtcgtttatcacacaatgcgcctatcggcggcccagcgggtgagctcggtgcgattcgaaagctgaagctttcgcagcaccgagctcacgtgcgtttcgaccgtcttgatcgaaatgaacagttcggccgccacctctttatacgtgtaaccacgcgcgatcagccgcatgacctcctgctcgcgggcggacagccggtccagctcctcatcatgagcccgtgccgcaccatcagcgccgccatcagaccccgccgccggcacaccctgaaaggccgaaagcacaaaaccggccagttttggcgagaacacggcatagccctcatgcacctgcttgatggatgaaatcaaatcagcgccggtaatcgtcttggtcacatagccctgggcgccggcgcgaatcaccgcccccacatcctgcggcgcatccgaaaccgacaatgccagaaacacggtagtgggggagtagggccgcgatttggcgaggatctcggcaccgccgccaccttcaccgccgggcacgtgcacatccagcaacaccacctgcggcttggtctgtgcgatcatcgccaccgaaccgggcacgtccgccgcttggccgacgatatcgaaggaatcgcgcaacgtggcgattacgcccgcacggaacatctcatggtcatcgaccacggccacacgaatcttggctgtctcgttctcgctcatcgatgttctccctgcgccgctttcagcgcgatcggcatatgcattctgacctcggtgccccagccggccctggacactatctccactgtaccgccgcgccgtttgacgcggccgataatcgattcgcggatgcccagccggtcgggcggaatggcgtccatatcgaagccttcgccatggtcgcgcacgaacacttcaaccatcgtgtcgctggcctcgcaatacaaagacaccggctcgccgccatgcgtgaccgcattgaccaacgcctgacgggtggcgtccagcagcgcatcggtctgggcactcggccgcgcgtcgcccacggtgaccacctcaatcggtttgccgtgctcgtcctccacctcggcggcgatctgcttcaatccggctcccaccgaacgatccgatgtggaacgttcctgatacagccattcgcgcagctcgcgctcttggctacgcgccagggcgaatacggtggtcggttcctcggagtgcagctgaatcagcgccaacgtttgcagcacgccatcatgcagatgggcggtcatgtccgcgcgctcctcttcgcgttccttcaatgcctgctcgtgggtgagtcgttgcagcatcgcgttcgcccacggcatcaccgccaccacgataccgacgatcatcacgaatccgctggcaacaatgcgtcgaggagaggtgccccacccgggaatgctgacattatgcacatacaatgcccatcccatgaaaatcagtgcgatgccgcccaacatagacaacagctgcgtgcctcgcggactaagattcatccatgccagtgcgatgccgcccaaccctaccagcagcggaagcacaatctggacatccgcaccggtgctggtgagcagcagtccggtggccatcaacgcgaaaccggccaatgccacgacggccggtttcggagcacgttggatggcttcggacaatgattccggtgcggcagccgattcgtcgtcatgagcgtcaagtggctgattgcctcgcgcaagcggcgcctgatcaacgggcactgtgcgagccgcagccgtcaccgggtctccggcgggcatgaacacccacaggaatacataagcgatgatgcctgcgccgtagaggaaggtcagagcgatgaacgcaatccgaacccatgtcacgccgatgcccaagtgcagggcgatgcccttgcacacgccggtgagccagcggccctgccgggggcgcatcagcggcatgcgcgcgggcagcaatggttcgggagatgacgtcatactcctattgtgccgcgctcagggcgttgcggccggggttttacccggtgttcagggaacaatcagggtgttccccgagcgttgtggcagtggtcgggcggtgtaatggaatcatgagcaatccaaacgcgaatccgtatcagccacagccgcagcctggtccgcaaaaaaacaagacatcgcgacgcttcttcacttgggtgcgatccagtggactggttcgcggcgacgaccggtggatcggtggcgtatgcagcggcatcgctttacggcttggctggagccccacattagtacgtgcgttggtgattgtatgtacattgttcttcggttttggcgcagctctgtacgcactcggctggtttctgatgccggatgtacgcgatgggcacatcttggccgaggacctcattgccggccaatgggactggaattgccttggatgcttcctgttcctagccgtggcaatcgtgattccaggtgcggggtgggtttgtattgcgctcgccgccttagcgctatggttgttggccaaaagcggcattcgccagcaggaagggtacggattcggggcatctgcgccgcgaccggtttcacagcctgtgtcgtatccagctccacagcctgcctcatatccagccgcgcaaccggtccctctatctcctttgtattcagctccgcaacctgtttcacaatctgtttcacgaaccgcgcctagtgtttcacaacctgtttcacagcctgtctatcagtcgatgcccagcgtgatgccgggcacagtgcccagcgcgatgcccggcacagtacccaacgggccgtttgcccccgaccgtatgaatgcgacggtctatgcccccaccgagtccaagcgccgcaagccggcgggcccaatcgtggtcttgagcatactgggccttaccttcctctcctttgccggtctgatgggactgatttgggtaaacgacatgggcattatcggcattatgcgtctgagcaccatctggattgccgcagtatgcatagtgatggggctggtggtcatcattctcggattcagagggcggcgtaccggtggtctgattcctctcggactggttgccggtggatgcgcgctctgcatgaccatcgtttcaggcacgtatggcgtgtactaccgtgatcttggtgccagcggcatcaatactgttgtttcactgagccaatctgtcaatgcgagaaacagcgacggcatgaacgatgtgcaaaaggatggcatcttcgttgccgatgccagcgatgccacgttcgaaacattgcagcaaggtgtggcgttcaacggtgaaaactacaacaccgatcaggcaatcattgattggtccgattgggacaagacacatggaccgcacacggtgaagatgctggatggcaaaacctccatcagtaattgtccggtcggtaccatcaccatagccgcaacacaggcgcaagtgcatatcgttctgccggattcctgcacttacgccttcggcaccgccgactcctacttcacttcgagtgacgtcggcggcaaatacgagatggtatacaacaactacatgggtctaagctttgttttcttcggagctgaaagcgccaccaatcccatgaatgggcctgattacgaatggttggataagggatccgccatgccggacaacggcccagaattaaaaatcaatattccctatgcagtggaagcacgtgtcaacgtgatgtacgcctccgattggaaaggctccacgttccagccgcttgccgatatatacgacggcaacagcacaagcaagaacacaaccgggcaatcggaatgatcaagccgttacaaccaggagatggaatcatgactgatgaaaccaaggaattcgcctccatcgaggatgcgacaccgaccacggccataccttccgaaaccgacgagaccaccgagaccacaaccatggtgaccgtcgatgaccgaaccgataccacggtgctgccatccgcagcggatgatgacaaaacggctgtgctacccgtccccgacgatcatgcggatgcgccggtctcggatgtggatacgcaggcaacagctgcctctccatcgcccatcgaaccatccacagatcggattgccctggaagcagttgccgatgccgtggagggggatggtgggccgattccatctgccgatgatgtaccgatgtacgcagcatcttcagcgcaaccttcctatgagcagtctcagaccgccggcaaaccatgccagcctggggggagcgccaagaacgtccagaatgctaaggatgtcaagagtgccaagaacatccagaaacagagcatcagcgcgcttactgtggtattcggactattaggcgtgattatcggcgtgatcgcgctggttttcgggtacatatctccggatcggatgatttcgctgttctcgccgaatccgcaattgctgacggctattatctgcgccgtagtgggacttattctggtaatagtggccgttgtatgggccatagtcggtgccgtcaagaagagaaaatagcgttacaaccattgcattacggtcccagtagaagcacattatgacgggagccgaccgataagagccgaccgttctatgctgatggggggaggcatagtaactatgaaacggatttcggcgcggcgggtagcgagcgtcatcgccaccgcgatggcgatgacgctggtattcgccacacttggctgggcgatgatgccgcaatggaacacacggccctacaccaagcacatcgctatcgcttctgccgacaccaccatcacccctgcccatgcgaacattccccacgaggggcgatatcgtacgcgtgaaacccgactatccatcaagaccggcgacggcgtcacgctacccgccgtactacgtgaaccggtcgacgctcccgggccacgcccggcttgtctgttcattcacgggtccggtaccagcggtgccgaggatttcggcgatatcgccaacgccatggcctctgccggcatcgtgaccttggtgccggccaagcgcaacgacaactacaccgtgctgcatcgcgactacccgcgttttgctcgcgaatacgggcgttcgctcgacgtgctgcgtggcataagcggcgtggaccccgccaaaaccggcatctacgccgaatccgaaggcacctggatcgccacgattctaacctcgaaacggcaagacattgcctttgccatacttacatccgcaccggtgttcaatggacgtgagcaaatggccatggctgtcagcgcctatacgcatgaggccggcgcgcccaagcccgtggtcaaagacatggccaaattgatgtcgctggactacgcgccattcgatctggcctatgccgactttgatgccgaccggtatctgaaatccctcaccatgccggtgctggtgaactacggcacctacgatacggccatgcccatcgaacagggggcgcagcggatcatcgccacggccaacaagtccggcaacgagaacgtcaccgtacgctattttgccggcaaccatcagatgcgggctggtgagggcttattcaccccgaacctgccattggccgaaggctatacgcaagcgctggaaaattgggtgaacggtgtgactgccggaaccaaagccgatggatgggcaacgccccaagtcgccggtgcgacacctcaccagcgcttcgccgcgccgcaacgtaccagatccggtatcgtcggctcgctcggcgtgctggccggtctgatggtggcagggcccgtgctgatcgtgatggcggcgatattaggtattggcttgactgtgttttcttggctacagacgttgctggccgggcgacgtagtgtggcgactgtgcgggccatgcatgcgacgccgagtgggctgggagccgcccaacagcgtacgttgcacggcattgccggcttatctgccggtatcggcacagcggtaatggtgattaccgtgctgttgtatggctatatgagcgccgtaggcgtatcggctgtattggttatgcctcaaccgcagttgttttcccttgggtggagggcattgcaggtgctgaccgtgctgttggtcgtgctgttcgcgtgggaactggaacgtatgtggcggtatcgcgccagtattatcggcgtgcgtcgtgtcatttgcgtgatggtgacactggctgcacttgtcacattgacgatattgtctttctgggggttgttcagtctgtgatattcacggtcgttaccggctccttcccgaatatgtgccactgagtcgccgtgagcgtcacaaattcgggaaggtggatggggcgtgacggcgtggaggcactgtcgtcagcgctgagcggcttcagcctcatccaaagtgtcgaaaccgccgagctggactgtgtgcaacaaggtttcctcagtgatattgcgttgcgggctggctgcggcgcgctcgctaatcatcacctcgtagagctggaaggtccgttcggaatacgtaccaagctcgccgcgcagataggtttcgaatgaggtggcagatggtgtgtcttcggtggtggtgagtacgcgcatcgcctcgccgagcttggggtagcgctcgcggaaatccttggcccaggcgacctgctgggcgatgacctgttcctgacgggccacgcgctcttcagagggacgcggaatatacggctctatgttcttcgtgaaatcttccggcgcggtggaggccatcatgcggccgtatttttcggtcacgaggttgcggcccacgtggtcggccgcgtcaagatcagcggcatagctggtgagtaatggccgctcccatgtgaggaactgggccagccgcatctggtggaacaccggccagttgccttggcatgccgcgcgtccaccctcattgttggtgcgctggaactgatcccattcatggcgcacaatagcctcgcgcagttcatcatcagtcagttcgttggtcatcgacgttcctttcactaatatctccctctgatgagggagatggcacggcgaagccgtgacagagggagctctaaagcgccggatcatcagagggagcttgaatctacaaacttttaagcaccggatcatcggagacgatgtggtcctcgacatacgggcgctgccattcgaggaaggtctcgccggacgtggtcaggtgttcgcgtttgagttccctgacgatatccaccgcaatctgctccacaacatcgttgattttctcgattgctggagccgcgcccttgccgccttcgccgaatccggccccgccatagcaggctgtcgaactcaatcgcatcacggtttccaactgttcgcccacgttcggcaacagcgcgaacatcgagccagacagcttgcgcaatgctgcgaactgccacttgtaatacggcatatagcccaccaccatcggcacgttaaccaggaacaccaacgaggcggtggcctgcacgaactcgtggatggacagccatgcggccgcgccgtcgccgcgcttcaacgaacgcggcagattatattgaccggcctgggcgatcatgcccaatcgcttggaaatcaaggcaagccgcacgtcgtcgggcatatccttgaacccttggcgtgttttggagaactgcccagtggggtctgcgaatacttcgccattggtggctgcggccagagtcgattcagccagcatcagccactcgtgcggcgcggtttgcgcgggcgcagtgcgatacccggtgatcgactcaaagaagtcaccgatgcggaacacgccgtcacggcggttggcaccttgtgcgcggggcgtggtgggggagaacggtgtatcgataaatgtcacacggccttgcgcgtccatcgtgaacccgcgtggcagtgcttcataatcggcctcgagctgctcgccgattgcctcataatcatcatcggtaagccatagacagaagcgtgggccaaaatcatggtcttgagaataggcgtcgtcaaagccatagcattccgaaccatgccccaccagtccggcggcaatgcggcccacgtattgcggatactgtgccgtaatcatcggcttgcccacctgtgtccagaacgcgcgtgccaatttgagaccggacacagcgatttcggcagtagcatcgatgttggtattagtttcggtgctggttgcatcggcgctgttcgctgcatgcacgtcatcgttaccgatttgcgcctcggcttcgcgcaggttcgcctcggtgacgcgatagtaatcggtgtccttgccatagcattcggcgatcaccgccaaagcgctgcggtaatgagaggccgcctcgccatatcggtgttcgacatacagcacttgcgcacagccagccaatgcggaggcataatgcgccgagtgcgtcagcttgccagtctcatagatggtcaacgctttggtggcatggatgtgcgcttccttgagcttgctctcctgcagcagtaccagagccagattggtgttcgacgaggccacgtcgatgtcggcatcaggattcacgctcgccgcctcgacgatgtgcaacgcctgcctgagctcgatttccgcctgtggcaatcggttcgtttcgctgtacaacatggagaggttattatgcagcgcagccaggcgtcggtcgttgggagcgaagttcttattggcgcaatccaacgcttgatgatacagatcctcggcctgatcgtaccgcttggccgcgcgcatggcagtggcacaattgatcagcgtagtggcccagctttcggtaccctcaagccccatgtgcagggccaactcaagcgcgcgctgcacgatccactggttctccttgtgacggccttgcgagcggtagaaccccatcgtctcgttgagcacggtcagcagtccggcttcgtctccggcgttttccgcgtcgaccgccgcttgttcaagatacgggcccgccttttctgcggcgttgtgggcgtcgaagatggcgtcgaggccgtggaggaattcgttcacgtcaaagtcatgcagttcgttgccgccctgagccgccgggccgttttcaggcgcatcgaaatcatgtgcgtgtttcgcctgcatgccgagcagtgcctgctccagccgcgcgtccatcgcatcatcggccatacataatctccttcgtcgtgagataccgattattgctaggttccagcgtactgtgaacgatttggagaccgccgatgtgagtgtcgttacagtgtgcggcggctgccggagctggtgtatgtgcttgtcgttttccccgttgtcgtcctcagtggaaataggctcaacaggcatggaaaagccccgcatgctatgacgtgcggggctattcctcggtattcagttatcggttattgccgtacctgtacaggcgtcggacaatcgttcagcgttgctggcgacggcgcagcacgatggtcacgccaccggcggcggcgagcaggctgactgcggctaagattccagcgatggaagcaccggttcccggcagatcggtcttgttcggcttggccgtcggcttcttgtcggcgttgggtttgccgttctggttgttgttgccgccttggttgttgttcccaccttgttcgccggaaccgttggcgtgctccttttcggcggcggcgatctcggcgtccgtgtaaagcagctgcgggttgacggtggagacggtgccgccgaacgtcttggcttcatcggcgctcagcgtcttggccacggtgaactcagacggcttggcgctgccgagcttggtcacgccgaagtccacgccgttgacatacaggccgagggcgattggcttagggccattcgcgtagaccggcaggtcgaaggtcagggatgccttggtgccttcaacggaggaggacttgagctcgatgcctgcaggcgagtcatcggccttgacatccttgtgatcggcaaggtagtcgatcagaccttgcacatccaccgtgccggtcagctgcggctgaccctgcgcggtaaaaccggtgaagccgtcgccgccggtcagcaggaaggagttgccggcgaccgtcacggtgtcggtgtccttgatctgcttgccgtcaacgaacacgtcggagacggtggcgaccggtgccttggtgttggcgtcctcgaccagcgtgtacacgaaggtcacgttcgaggagatgccgagacggaccacattggacttgccgtccttgatctgccactgctgggcgagcacgtccttcagctgcttgccggtgagggtgaccacgctgttatcgttgccgaacggcaacatgctgtacgcctccttgacggtgatctgcttgtcgccgtcaagatcgaggttgtcggtgcgcaggccgcccggattgatgaagccgatggaggccttctcgcccacgggcgtcttcttggcggattcgagtgcggcatcggcgttcagcgtgccgagctgggtttcggcgctccagttgcccttggcgaaattcgctgacttgtcgatggtgccgacgaccttcttaccagcctcggcggaatccgcctgagcctgcttgtagaccttggcggccgggccgttgtcgtcaccctcgaatcccttggccggagcggtgccgtccttgttggtcacgtacgtcacgtcatactgggaggcgttctgcacggtgaccttggaatccttgccggaaccctcgatgtacagatcctggacagctgcatcctggccgtacttgccggcctcgatgatcggcgctccggacttggtggtggtgccgtactcgttgcggtggctgtggcctgcgtagaccagatcgacgttagcgtccagaccgtcgccgtcggaggcgatggtgtcgccatcctcatggatcagggccacgactgcatcggcctcgccgttggactcatcgccatcggacagctggtcggccaccttgttcacagcctgaaccgggtcggtcaccgtgacgccttgcatcacgctgggggagactacgttcttcagatcggaggtgatggcaccgacgaaggcgacctttttgccgttgacggtcttgatggtatacggcttgagacggtcggaagtcagcgagccgccggtgatgttggcggcgacccagtcgatgccgtacttcggttcggcgatgcggttgttgaagtctgcagtgcccttgtcgagctcatgattgcccaaggcgctcacactcagatcccatgcctttgccatgttcagcgtcggagtgtcttggaaataggaggattcgaatggggaagcacccacgaggtctccgctggagacgaacacgctgttgcccgggttgtgctgcacggcaagcttctgataagcggcttcgacccactggccggtttcgatgtgtccgtggaagtcggtgatgtcgaacacggtcacttgcttggcgtccttaccgggttggctggggttgccggagccgccgttgtcggaatccgggtggttgcccttgtcggcgtattcctcgccgatcacggacggggtggctgcgccgggctcgaccttgacgacatcgccgttctcgttcaacgtcacggtggagctcagagctgcggctaggttgatgcgctgccatccgtcggatgaggaatccagcgggtagccgccgtcaatcgcggtcttggtgaggatggcttcgcgctggtcgcggtgcaacttcgggtacgcgatcttcaacaagtcggcagagccttcaggcgcggtgaatgcggtgccggcggtggtcttgccgaaaccgtaggtcagacggttcgtgtagacgcgcaacgccgaggcgcggtcggtgacgggctccttgctcacggcatccacaaaggcgttctggtaaccgttggaggcgttcgcgccaaggttgttcacgcattcggtcacagtcgcgtaatcggtgtcctgtttggtggcgtggccgtccgccacgcacttggctgccagataggactgcagctggtcggatgccggcttgacgtacttgtcgtagtaagtgccccagtagtagccgtttgccacttcgccgtcgatgcggccgcccatgatgtcgagcggatagtgcacgccgagcacgatgcggttgttgcccgcttcggaggtgcgtgtcaggatctctggagcaagttgtggcagcatgcctgccagagccacgccccaggagtatgcgccggtggtgtggccggacgggaaggaaccggaaccgaccagcccgtcgtattcggcggaatgcgcgttgccttgggcgtcagtccagtcggggacgcgcatgatgttctcgttgatgttcgtgatgtcgttcttgccgccattggtgcgatcctcgaaaggacgaggatgctggaagtgcttcttggcggtagaggtggagattgtatcgtacttgaagatgtccgcgaccttcttcaggctgccgtcggccagaccggcggaaaaatattcgccgagcaccgggcccagggagtccggcaaggtctcatcggcgctcatatccgcgtccaccagagcgcgctgctgctgtgcggtagcggtcgtgccgtctccgtcttcggcggcggcgttgttgatctgttggatgtaggcgtcatcgtgatcgagcacggtcttgttgagcaccttgccgccagcggtttcggtggccggctgccagtagctgtcatattcgccaagcagctgcacaagattcggcttggccgcacgcgtctgcggaacggctgcatagccggtgacgtcattcgcgtcgaccgaggcttcgtaacggccttcggtggtggccgcgtacttggtttcactgaacgcatccgtggcgccgctggcggcgatgccgctgataccgaccgtggacgctgccggtacggattcatctgcagaagctgtcgtggtcgcaatcgcaacgctggacagcgtcgctgcggcgacgagtgcggagatcatcctcgccgtgaacctgatgggtttcactgtattcccttcctttatgaggcatcaggaaagatgctctttcatagtgagaacttagaaaggcaaggtggaatacgtgtgtaatgaaaacgaaccgcagatgaacttcagtaagaagagagcaacgtcacattccgctgattatgcgtgaatgtgacgtccggtctcatacttggatttcgcgcatgcggtgaatggcgtcggtatcggtttcgcagcgccacgagtagaaggccagcagccctacggcaagcagagccagcggcataccgcccagaccggtatagcgatagttcatcgagaaagtggtgagcatcgcgccgccgacaatcgagccgatggcattgccgaagttgaaggccacctgcacggctgcgccggcgatgagctcgccgccgccttggccggcttcggtcatca

SEQ ID NO: 910 - DNA, 4226 bp, Unknown
  R117_24m  MAG No. k141_2950
ggctggggttcgatggtcatcaccgccgcccgtcgcggcatcaaggcgctcggcgtcaccctctccaaggaacaggccgcgtacgccaacgaatggatcgcccgtgaggggctgcaggatctggccgaagtgcgcgtacaggactaccgcgaggtgcccgagcatgacttcgacggtatctgctcgatcggcatgatggagcacgtaggcgtcaagaactaccagagctacttcgaagagatgttccgtctcctgaagccgatgggccgactgctgaaccaccagatcaccatcagccatgacaagcctcacggcaagcccggcaccgacgaattcctcgaccgttacatcttcccggacggcgacctcggcgcgcccggcttcatcgaatcgtgcatccatgacgccggcttcaacgtggtgcatcaggagaacctgcgccagcactatgcgctcaccctgcatcactggaaccagaacctctccgagcattgggacgacgcggtcaagcaggtcggctttgaacgcgccaaggtatggggtatgtacatggccgcctgcgctctgaacttcgagctcgacggcatccagattcaccagttcctggctgtcaagccggatcgcgtgggccacccggacggcaagtggtaccctctgcgccaatggtggcaggcctgactccgtttctgtgggacggcacgcggtttttaccattgttcatctgccgtcccacagaagtgtgggatagcagatacatcaatcgtttgacgtatctgctatcccgcatgacataagccgagaaccgcagaatagagccgttctttgccctcagctctgagggcgttcttcgaacgctgtgggacggcacatcgaaaatcggcaaaatcacgtgccgtcccacacgattcccttcgcacgcgcatttcgcaggtgctttttctgcaatactgactctatgagcgccacagccccagaaacggctggggcggacgatcgcaccgaccatgacacgcgcggataagacccacgtttctttatttaaccctaacccgatgttcgcattggtgctgttggcgtgcgtagttgcggcgaggaagacagttgttggcgaacgcgagcctttgcattgaccggccagcccgccggagtaggtacgtgacggatatgcaaaagccccacacaaggcggggcttcattgtggtggctccgaacggcgtcgatccgttgacctagcgattttcagtcgctcgctctaccaactgagctacagagccatgaacagtcaaaaacccggataatccgggtttcataaccattccagcgaccccggccggacttgaaccggtgacctccgccgtgacagggcggcgctctaaccaactgagctacggggccattgttctcacttgcgtgaggcaacagatgtatatattactgaaattcgccggtcgtgcaaatttcggcgtgttccgcgtaatttcaaggtttttgctatcaccagcacacggacacgtctgccataaacatccacaaacgacgaagggcgcgaccggaaccccggtcacgcccttatgaacagaagcacttcacggcatccaccgcaaagcaatcgtcaatctcagtcagcctgcttccaggtgtcgacgtcgatgtggtgttcggggttggcctgccaggcatcccacgcggacttgacgatgtcttccacgtcgtacttggcgtgccagcccatctcctcgttgatgcgcttcggggagccgatcaggtgcggcgggtcgccggcgcggcgggccatgacagcctcggtgaacggcagaccggtgaccttcttgacttcgtcgacgatctggcgcacggaggtgccttcaccggtgccgacgttgaaggcgtcgtacttgcgctcgtcacggtcgaggtacttgagggcggcgatgtgggcgtcggccaagtcggagacgtggatgtagtcgcgcacgcaggtgccgtccggggtcgggtagtcgtcgccgaagatggcgggggccttgccctgcttgaggcggttgaacagcatcgggatgaggttcagaatagccgggtcttcgagttcgaccgggccgcagccggccacgttgaagtagcgcagcgcgcagaagcggatgccgaacggctgctcgcaggcgcgagccatccactcgccgaacagcttggtctggccgtaggggttgatcggcagcatcgggacgacgtcctcgggcaccacatcgaccggcggcacaccgtaggtggcggcggaagaggagaagacgagcttcttggcgttcttggactgggtcatgccggtgagcacgttgagcatgccgttgatgttctgctggtagtaccacagcggcttctccacggattcgccgacctgcttgcgcgcggcgaagtggatcacggagtcgacgccttcggcgtcgaggatttcggccagacgctcgccggcgcccggagcggcgatatccatgccgtacagacgggagccttcgatgcgggtgggcttgccgtagctcagatcgtcgacgacgacgaccttttcgccggcctgatgaagtgcgtgaacgacatgcgcgccgatgtagccgcagcctccggtgacgagaactgtcatagttgacctttccttatgcgggttgcaagtgtcggccgtgtggagttcagcggctgttcacttttggtccgctttgttaccttttgaaacaatttgagtatatcacacgaacataatcgcacaaaacggcggtgtcgtccggcaatatctgcattcattaggtcgatctggcgttcattaggtaggtcggcccggagccggcccgcacgaacaccgggtaaatggcttgatatggtggttggtatcgcacaccacccacctaatgaacgccaaatcgacctaacgaatgaacagcggtgcggcgcacaaggaaaatccgaggaatatatgaccgatcccgaatccacagcaatcgattccgtcaccgcgatggccgcggaccacaccgaggcaccggcgcaccccctgcacaaggtgctttccttcgtgcgccgctccggacgtttggacgatcgcctgcagcgcgcctgggacaactatgccgacacatatctgttggatattgcggccggcaacctgctggacgtgcgcgaaggcgtcacgctcgaccgcgcgttcgtggagtcctcatggggcaacgacaatccgctcattgtggaaatcggcaccgggcagggagaaaacgtggcggccgcagccgcggcccatccggagacgaacttccttgccctagaggtctatgaccccggcgtggcccacacactgctgctcgccggcaagcaggggctgaccaacattcgcgcggcccaggtcaacgcgcccgagctgttcaaggtgaccgcgcccggcaccgtggccgaggtatggaccttcttccccgatccatggcccaagaagaagcaccacaagcgccgcatcgtgcaggaggccatggccggcgacattcatcgcgcgctggtcacagacggcgtctggcgcatcgccaccgacatcgaggactacgccctgcacgtgcacgaggtgatggacggcctcgatggctggaagaacctgggcagcataaccgtcagcctcccgctggagcacgtgggcaagggcaatgccgacatggccgccgacatgccgcacgccgacttcaccgaatccgagcggttcgagggccgcgtgctcaccaacttcgaaaagaagggcctggccgccggccgcgtgattcacgacttcacctatcaggccgtcgccctgcactgattgcgacacgccgaaatgccgtcgatttgcataaccgaacaacctcccgtaaagtaactcgagttgttcgcccccatcgtctaacggttaggacaccagactttcaatctgacaacgagagttcgactctctctgggggtacttcattgaagacctcggtcatagcgaccgaggtcttttcgtattcgcgggaccaggcctgaaagcattcggcgggttataggccaaaatgtgtgtccgttttggcttgtgttcctttgtggcggtgggcgttcctcctgttcgagttgtatgggcggggaactcgaggtcggccagaatgtgtgtccggaatggccggtcaggccttgcggcacaacggttgagtgactttcgagttggcgtggcagattgggtggatgaacac

SEQ ID NO: 911 - DNA, 11124 bp, Unknown
  R117_24m  MAG No. k141_3290
ccggccaatccacgaatgcgatatctccatagatgattgcgttctgtgcgttacgcagtactagggaaatcttgatttgctgtccatcagatggcttgaatccatctgccacggcgcggacctcgccattgaacgtcgtgccgccgtccctgttgtctattttggatattccactgatggggaaggcggcggttccctgagccttggcgacgttgtatgtatccggattgagcacagtaaaatcaaccgtttctggggcggtgccttcgcctgcttgaccggcgtcatatacagtctgattcgggaatgccatattcagtgcttgcgtctgcgagaacacgatggaaccgtctttggcccgccccgtaatggtaatctgcggatactgcacctgctgggtcttactggtgttgcgcagggcgaaagcgtagtggacatacccttgctggtccgccgaccagccggattccactattttcagaggattgtcggtgacggtgtcttgattgtctccatcagcgccgtcagtgccgcctactccgcccgtgccattggcattgtcggttcctgacccgttcgaggagtgcccgccatcggccttatcggttgattggctgctggattgtgtcgaggaatcgggtgatgttgccgacccgataatgccaagttggcctgccaacacaatgcctcccgcaatggcggcgattatcagtgccgctccggcaatggaccacagcacgatggcgcgtttgctcaagtgcagacgccggaatagtcgagacgccgacgcgctgccgttcgttgttctcgttgatggcggatttgccgatgatgcgttcggtatgggcggattggactgggagaacagcgcctggcgaaactcttggacgctctgtggccgtttgctgggctcgaatgcgcacgcatagctgatgacggcgcgtagtcgagccggtactgcggcatcatcggcaagtcgctgctcgtagtcgctggcatcgggatatacgccggtcagcatgaatccgagtagccggcccagcgagaatacgtcggaacgcgcgtcggttttggcaaagccatattgctcaggcgaggcgaatccgtaggtgccaagcgccgtggtatcccgtgaacggttgcttgcctctgaccggatgcgcgcgatgccgaaatcgatgagatgcgcgccatcctgggccacgatgacgttggccggcgtgatgtcgcggtggataacgccgtgctggtgaagctcctgcacggcttcgcaaatttggtcgataagctgcatggccacattcggtgcaagccgcccgttttcctccgcaatttgcgcaagcgtgctgcccggcacgtaatcgtagacgatgacgaaccggtcgggcagctcgtacgtcgcttccacacgcggcagacgattactctggcaggcgctgagcgccgcccacacattgcgttgcgctaggggagagggaatcttcttgcgtacgaacgggccgttgccgtcaatgctcaccagttcggtgacgccggaaggtccgcgagcgagcgtacgctcgacatggtacgcatcgtcgatgctcatcgcatgcatcgcctgcttatcgtccatgtctctccttgatgccctcttacttgcgtctcactggtgagtgttgttgggccgaatgtcgtcaatcggccggtagcaacgtcgcctctcccatacgatacaactcgtcgtccgtggcgatgcggtcgaatccattgcgtatacaccagatgataatcgcgtcgcgtcgctgtttgcaccacagttcggaaacgcctgcaagacgaagtagccgttgggtttcacgtaatgtgcacttgagaccaagagccagcataatggcgtgatctcggccggggcggcttttgccggagaaaatgtcataaaccactgtggcgttgaggccggatgcccgcaccacgtcggctcgtctcaggtcatgggcttccatacggtcgaacagatagtcggtcagcgtgcgtgcgctgacgagtccctcatcgagatactgctcaatgctggcgctggcgagcagccgatccaacagttcctcggtcaaatgttcttcggggatgtctgccattgcccatgctccttgtcgctgtgttgcgggtgctgtgctgcgccatcgtacgcggttgctcgattcccagcgtacaggacgccgacttttcggaaacacgccgaaaaattcagttgtcagctgatgtatggcccgcgcgtgtcgccgacaatggtcgatgccatccgtgtaggtgcggtggcggaaaggatgttcatgcgcggtatcaagcatcgacaataaagctaacatgcatacaaaatgctaatttgcgtacataataacaacgccatacactggttcgatgtatcgcagagcaaagcgagcaataagaagggacgcaatgatgagcgaacgataccggcttgccatggcagtcggattgaccgtaacggttgccgggcttgcctcttctgtgctggtaatgctgctgcttaaggaaagaagggcatcatgacaacgccatttgatcaacaacctcagccggttccaccgtccgaaggcacgaatgacgcaccggaagatcgcgcgaatgcgcctaccgtgccgaatactgtaccggctggccaaccgaacgtagcgtctgatggtgctaccaccactccgatgactccggctacggcatcgcagcggcccgccggcgcgccatttgatcgtgtatatgcggtcagtccgcaacagctgttccaagttattcacgaccagctgactactggcgccacgtttaccttggataacgaaaacacccagaccggagcgttttccttccactcctatgatggggtgaactgcacgctaaccgtagtcccgcagggtgcggcaggggccgccattcgtctggaggcgactggaaacgaaagcgccaagcgcgttgatgagttcctcgccgctctggacaagcgtattggtgtggctcctgcacccgccacacatggtgccggtgctgccactggttttgctggtgccgctgcgcctgccgtgcttgctccgaatgcacaaggggtgaagaagacttccaagctggctgtgttcgccattatttggggagtgttgttcgtactcgcccaatttgtggatgtttctggccgatcctggggcggactgctgttcgccacggtgattccggcactgctttcaggcttcgccgtatacgtgacccgcccgagtggcaaggtgcaaggccgagtgctggcctgggtggcagtcggtatcaccgttgtgggtctggtaatcggtggcgtgttcgtaattcgtgacggtgcgaaggccaaggctgatcgggcggaattggaagcatcgctcgccaccaagtgcgaagcatattcatggccggagtcggatatcgcggcgctgctgccgcagccgaaatccacaaagggtgaaattagaagcgagtcttcggactatttctccatcgaggtgtgcggtaccgacgccaagcagtatgccgactacgtcaagtccgtgcaagacaacggtttcaccgtggactatagcaagtccgctgacagtttcaatgccaagaacgccgatggatacagtgtgagcgtttctcgtaacactgacgacgagaccatcatgtccatcactatccaggttccggaaaagaaggaagatacgtctacggacggcgacgccgcgaagcaggatgataagagcactgatacgggcactgattccagcgatgccaacaagcagagcgaccagtcttcggatcagaaggcgcagcagaacaccaatgacagtgctgacttcaaggccacgatggacagctacgaggcctttatcgatgagtatgttgccttcatgaacaaatatcagaaatccgacaacgtggtcagcatggctaccgactatgccagcatgatgaagcgttactctgagttctcccagaaggtagacgccattgacgaaaactccctcagcagtgaggattcggcctactacaccgaggtcatgactcgatgcatgcagaagctcgcatcggtgggccagtgatcagactggcgtatcgaggtaacggttttccaagaaaggaacgatgacggtatatgggtatacgcggcagacagtatacgccaatggatgagccggccttcaacaaggccatccccggaacggaggctctggccggggcgctgaaggacacttttggcgcattccgtagtgggcttggtattaccgaacccgtggtttcggtgaattgcgaaggttgtggcgctccgctttccggtcatcgcaaagaagtcgttcgatgcgaatactgcgatcgcgaaacgcagctataaccaacatgccagcataacggccggtcttgcgattgcatagtcgcaagatcggccatatgcatgagatatcgaggaaaaaacagatggcagttattaaggcgttcgccggcgcgctcggcggtacattcgcggacctgtggcgtgatatcatcaccgctggtccgttcacggaacacaccgtcgttgtgccgggcattccccgcggaagcaacaacgatcgcggttcgaatgaatacggttccgagggaataatcaccaatggttcgcgtatctatgtgccagagaatactgcggcgttcattttctctgaaacaggtatcgaaaacgtcatcaccgagtcgggcggttatgaatatcgcaacggggagcagagcgtgctcgccggagacggcatcggatcgttcttcaatcaggttgccgatcgattcaccttcggaggtcagcctggccgcaccaaatatgtggccttcgtcaacctgcgtgagattcgtggcatcaaattcggcacttctgcgccgctggtgtataacgaccggttctatggcgtcgatttggaaattcgcgcacgcggatccatgtcgctaaaggtcactgatccagttcgattcgttcgtaactttgtgcctgccactaccgtgtcgtattcattcgatgatgaagggccacgtaggcagattctgtctgaattcgtacagtcgtttattgtggccatcaattcgttgtccaatgaatatcgtatttcgcaattgcccggcaaggcgaatgacatcgcggcatgcgtgcgtggcgatcgggccaatgcgggtacgtggaatgatcgttttggctttgaagtgtccagtgtgggcatcgaaagtatcgagttcaccgagcaatcacgtcaactcgtgcagcagttcgcctcgaataagatgaatgttgccgcatacgagggcgtttcccagcaagctggcaatatggctgcccagcagcgcattgcgcaaggcatccaagacaacggctttggcgatggtggcatgttgctgggcatgaatatggcacaagccattaatcctatgacggccgccccggttcaagcgccggcgcctgcgccggcaccggaagccgctgctcccgccgctcacacggcatccatgtctgtggaagaacaagtcgaggcgatgaaaaaattgaaggaattggttgatatcggcattctctcccaagaagaatttgatgcaaaaaagcacgaaattcttggcctataaacggcgcattcatgcaactcgaaatagttgataatgagggaaacgctggtgcgatatatcggcgaaaacaatggatgaatatatcattgaataagcagtaattatcaggatggttggattcacattgacgtggttccgaccatccgcagatctgcgactacaagggagagaataatgttgaacaacagggttcgtttcgggaacatgaagcgtgtcaatcgtgcggtttgggcgttgaccgtgattcttatgatggttctgggtcttgtgcttgctggatgctcggggtcttctgacggtgcggacggcaaggaggaatccacatattcgaaaattgtcgccatcgccaagaaagggcgttcgctggccgatgtgaaagacgagctcaaggatgccggtttttcctcctctgattatgaggtgaaaagcgacacggacaaaatggtgctcagagcttcgaactgggttgttcaatccgtggaagatggggacaagcctgttatcaatgttcgtaaagccagcgatatagcgcaggaggaagaagcgaagaaggtagctgaggagaagaaagcagctgaagaggcagccgccaagaaggcagctgaagaggcagccgccaagaaggcagctgaagaggcagccgccaagaaggcagctgaagaagaggctgcaagaaaggccgctgaagaacaggctgccgcgcaggccgaggcccagcggcaagctgaggaggccgctcgacaggcacaacagcaacagcaagcgcagcaaaatgtgcattatgcgaattgctctgaagtccgtgcggctggtgctgctccgttgtatcaagggcagcctggatacaacggcaagttggaccgcgatcacgatggcgtggcctgcgagtaacggattcgatatttcggcgactcagcgcttgttcgggccgccgtccgggaacatcaagtaagtgatgatgccggcggcggttccactggccaatgcgccggtgatgacggcgagagcctgcatcgccgtgctgagcgtgggcttgcccgttgcggcagtctttgaagccttcaatgtggcggcactgggcttgcgtttctcggcaatggcattgtcggcagcgttgccaccgtccgtattgactggggcattgtcggcaacggcctcgccgtcctgctcttgggcgcgccgttcgcgaatgcgttgctcaatgggatcgtcgaccaaagtcttgatgatgcgtgccagatcgcggtcttcacgacgtgcgatctcggcgctgaacaccgtacgtaaagcgagatactgcagtttggtcatcgggcttttgccggtctccaagttagacaccgtctgtcgcgcgactcccagctcgtcggccagttgctgagtcgtccatccggctaccttgcgaatcggacccaggttctcctgaaacttatcaatccaccattgttcgatttcagacgccgccattacgcacctccttccacgctgtcaccagtgtacgttacctgtaccgaaatcaatccaaaaaacagtgttcatgtgaaattcactgcgtatttgcgctttcgccggcttaccgagattagccttagacaaggaataacagagtagaagcagaaggtatgcgcgtattcgatttcgacggaaccatctatgatggcgaaagcctgttcgacttgtacctgtattccgcccgccacgacccgaaagtgttccgctatatcgcccccgtgctgcggtacgcggtcaaatacaagcttggccgggccacgcttgaacaaatggaatacggcgtgggcaagatgaccgaaggctatctcacggaactgagccgatccaaacgggtggcgagcgtcgaacagctcgtggacgatttctgggaccgatattacgcacgtatcaagccttggtaccagcctgagtcggacgatgtgatcctcaccgcatccttcggtctgacggtgggggaggcctgccgcagactcggcgtgaggaatctcgtggccagcgaggtggatgtggggacgatgaaggtcacgtacctcaacttcagcaccaacaaggccaaacggttccgcgaactgtacggtccggacgtcgtcatcgacgagttctacaccgactccaaattcgatcagccgatgatcgacatggcccggcacgcgttcatggtcaaggggaacaccatcacgcaagtcaagtaggaaacaacagaaaacaacacaacgtaaccaataacgaaaggggaacatatatgagcatgccgctcgatctatacgtaatccggcatggcgaatccgaagcgaacgtcatcgtccaggcgggcgagcagggcgacaattccctgtacacgcaggacaacgtcactgtgcccgatcgctcctggagactcaccgccaccgggcgcaagcaggccgactgcatcggtcgctggctggtcagccagcagcagctgttcgaccgctacatggtctcgccatacgtgcgcacccgcgaaaccgcagccaccatggccctgcccaaggccaaatgggaggagaaccgtgtgctgcgcgaacgttcttggggtgaaatcaacaccatcaccaaggacgaattcaaaaacaactacgcacgcaactggaacttcaagaataccgatccgctgtactggcgtccgccggcaggcgagtcgattgccgatgtggccgaggaccgtgtgcacaacatcctgacctcgctgagccgcaaatccgattcggaatccgtggtcatggtcacccacggcgacttcatgctcgccctgatgctcaccatcgaggatctggccgacgaggaattcctgcatcgcgccgactcggacgactggaagatcaccaactgcacctgcctgcactacacgcgccgcgacccggaaaccggccgcacctccaagcgtgtgcgctgggagcagaccgcccggcccgtgctcgacgagacgaccggccgctgggaggtcaaggtggagccgtggcgcgaattcaagcgcccgtacctgtccaatggcgatttggtggatgtggtgcaggccgtcgatccgcacctgctggagtattacggcaaatagcctttcccggaagagagacttcacaaaatcttcgtgagctagaatggcgcgtagtgcggctggttgtgaatgccgtgccccaagcgagagcgaggagagtagtaatgtccaatatcttccaatggcaattgcatggcgacggcaagacgctggcgcccggcgaggtcgtcgagcccgatgaacgtctgacttgggtgcgcaccgccggtatcggcgcacagcacgtcatcgccatgttcggtgccaccttcctggtgccgattctgacgggcttcgacccgtccaccaccctgttcttcacggctatgtccaccgcactgttcctgcttatcaacaggaacgtgctgccgagctatttgggctcgtccttcggcttcatcgcaccgatcaccgcggtcaccaccgccaacaagggcattgcggtcgccagcttcggcatcatggtcaccggtattctgctggccctgattggcgtgctcgtgcattacgccggctccaaatggatcgacatcatcatgccgcccgtggtcaacggcgcgattgtggccatcatcggtttcaatctggcaccttccgtgtggaccaacttccaagccgcgccggacaccgcactggttaccctgctggccgtgctgctcgtggccgtgctgttcaagggcttgctgggccgcctcaacattttggtcggcgtaatcatcggctatgtatatgcctgcatccgcggccaggtcgacttctccgccatcggtgacgccgcatggatcggcttcccgaagttccacctgccgcaggccgatttttccatccttcccatgttcgtccctgttgtgctcgtgcttgtggctgagaacgtcggccatgtcaagtccgtggcccagatgaccggccgcgactacgacaaccagatcggcaccgccctcatggccgacggcctgggcaccacgctcgccggcttcggcggcggctccggcaccaccacctacggcgagaacatcggcgtgatggccgccaccaaggtgtactccaccgccgcctactggtgcgcagccgccttcgccctgatcctgagcctgtgcccgaagttcggcgccgtgatcaacacgatccccgccggagtgctcggcggcgtgaccacgctgctgtacggcatgatcggcatgatcggcatccgcatctgggttgagaacaaggtcaacttcgacaagccgctgaacatcatggtggcagccatcaccatgattattgccatcggccaattcgcgttcactgttggtggcatttccttcaacggcattgccattggcacgatcgtgattcttgtggcctaccacggcctgaaggccattggcaaggcaaccggcactatcgccaaagacgatccggatattttgtagtgtgttttagggctactgggccgtattgtggctcagcccttttgcacaatggcttctaccttcacgggtaggggccatttgcgtgttccatggggcggtgctcgccttacgtggtggtagaacccatggggcggtaattggcccatggggcggcaaacatcccatggggtggtaaaaccctcatggggcggtagacgaaaatggctttattctgcggtttcacaatttcttcaaaccgccccatgggcaagttgccgcctcatgggcgagttaccgcctcatgggcgagttaccgccccatggggtcatcagtaaagagtgggatgacagcgtggcgagcatcaagcaaagtagggggcttacgctaagctcggaaagcttgcgtaatttgcgtaacctttgacatgaaaggccactgtgccccgtaataatttcgatgatcgtgacgattccgctgatttccagatgaacgacagcgcggaatcccgcccccttacctttggcgaacttggcgtacccggaccgctggtgcgcgtacttgcggcagatgacaagaagaccgcattccccattcaggccgacaccctgcccgattcactggccggccgcgacattctcggccgagggcgcaccggctccggcaaaaccctcgccttctccattccgctggtcacccggcttggctcctatgattcgcttggcgaaatcgcgatggaggagttccgcaaggaaatcaagtgtcgcaagaaggccagcttggaagagcgccgcgccgacgacttcctgccgcacccgcgcggcctggtgctggcccccacccgcgagctcgcgaaccagatcaacgacgtgctgatgccgctggcccacacgttcggcatgaacaccaccacggtgtacggcggcgtcaagtacatccaccagatccgcgatctgaaggccggcgccgatatcgtggtcgcctgcccgggccgccttgaggacctgctgcgccagcaggcgctcacgctctcgtcc

SEQ ID NO: 912 - DNA, 3220 bp, Unknown
  R117_24m  MAG No. k141_3323
actgaacctgactcgcgagcatgaggtcgccgcgaaaatcgcgtggaccgaagcaagccgcaaaggggagtcactgagccgacaggccgggctgctgcgggacaacgccagagaagccgccgaacgccgcgcccgcatcgaggcgttgaacgatcgcagacgcgagcaggccgcacacctgcaaggcgtggccgatgacgcgcgagcagtggccgccatggtggaacatacgctgcatgacgtggccgccaaacgagacgagctgcaggccgccgcctccagccatgacgaggaactcaaggccctgcgcgcgcagcgcaaccagatcgagcccaaggtcaccgatttgaccgggcgcgaacatgccttggatgtaaaccgcgaacggttggccgccgaatccgggcagctcatgcagaaagtgtccgacgaactcggtctcactttggaggaattggttagtggttacggcaccgaacagccggtgcccgtgctggatgatgagggcaaccctgtgccgttggatgagacggaagctgaggctgggaccgaagagggagaaaccgggggagagaccggcaccaacggcgattccgccctctttaagaccgtgccgtataaccgtcaggagcagaagaagcgtctcgataaggctcgccgcgatctggccgcactcggcaagatcaaccctttggccaccgaggaattcgaagcgcttgaggagcggaacaagtatctcaatgatcagcgcaacgatgtggtcaaatcacgtgacgatttgatgcagctcatcaaggatctcgattccacgatggtccaggtgttcaaatccgcgttcgacgataccgccgaggcattcgagcagatgttcgccacgctgttcccaggcggcaccggacgactgcgcctggaaaacccggaagacatgctcaccaccggcgtactggtcgaggccagcccggccggcaagcgcgtcaaacagctgagcctcctgtccggcggcgaacgttcgctgaccgcgctggcgctgctgttcgcgattttcaccgcccgccccagcccgttctatgtgatggacgaggtcgaggccgcgttggacgacgtgaacctgacccgtttgattaatgcgttcaatgagctacgcgcccatgcgcagctcatcatcattacgcaccagcaacgcaccatgtcgattgccgacgcgctttacggcgtaaccatgagagccgacggcgtaacagccgtggtgagtcaaaaactcgaacgataaacgaatggttcccgctggcgggaactggtaccacaggtgacagagggtggtccatctcgaaagacccccctcagtctcgcttcgttcgacagctcccgccagcgggagcggggcggtattagcgcaatgccttgcgcacgccctgtacagtctgcagcgtcttgtagaagaccttcttgatgggtacgtcgcgggcgggggccaccggggtgatttcctcggtgaacttgcacttgaactcgttaaggcccttgagagacggcgcgaagtcggagccaatgcccatcagatcgtattcagtaataccctgcgagcctaggatgcagcattcggaatacagcagcttgtcggtcacatgcagacgcataacctcgttgcgcatgccggcatagtagcgcaccgcatgtgtgccgttcacggtgacaatcgaccatgccaccacacggtcttcaatacgtgcggcgaacacacggcaatgatcggcacccaacgcgccgatcatatcggaatagtcgctcatcggagcaggcgtgaatccatcgcgctggccggtctcgaccatcacgtcgtaatattcggagaaatcggccagcgccttatccgtctcatcggcaacctcggccgggcactcgcgcagagacttgcgcacgtcacggcgtccacgacgcttcatccgagccagaatctcatcatcaccaccggtgacgtcgatgaccacggtctggtcgtacggcactgtggacagcaccttctccgtaccatcggcgaaccaggtgtcgatacgcaggaacgcgatgttcttgtcggccttcttgacggtgtccacgatggcgtcgacgacctcgcgctcctcagcctcggtgggcttggcgacccacgccggcccatgcatcgagcgcagataatgataaccgtgcgtctcaaaatcgataaaggagatcacggcgaccaattcaccatcacgcttgatcagataatcgccccatggtgtgcgtccgtcgatatccgcctgaaaaccagaccaaaccttggtctgttcgataggcaacgtgatgccggccttctcggcttcggcttccagtgtggctccgtcaactttctccaacgtgatcattacgattcagctatcctttttcgttcgtatccgtatgtcgtgtttctggtttggtcgtattgcgcgtgatctgatgtgggccaatcgggatccgatcaggatctgattggccggaatcccgtcacaagccaaacatgcgttcgacgacgtgatcgtcgccgtcgaacggcacatgcttgtgatggtccttgatccaacgctcgttgcccttgccgataatcagcaggatgttgaatcggtcggcgtgcgcacgggcatcgtaaatggcgttggtgatggccgtcggacggtcggaaatcaccgtggaggccacatccttgttcgtgatgtagccttgcatttccatgcagatgtcgatgaacggctcggtgtccgtatcttcggcggtgaaaatgaagttcgagatacggttctcggcagcctcgacgatttccttacgacgatcgtaggccttgttgccggccgatccggtcaccagcgtgatacgcgggttttcctcgccccaacgctcgtagacgaagtcaagcagcgcggtgacggatgcgtagttgtgcgcataatcgacgatggcgagcgtgttcgactgcggatcgcggaactgttccatacggccggcgatacgtacggattcgatggcgtgcagtgcgccggcgtcatcgagcgatacgccagccgcatggacgatggcgatggccgccgccgcattgaggtagttgaagtcgccatcgatggacagatggtagtcgccaagggtctgatctccgtcggcgatgtggaaggaggcgtgcgccgtgtcggcgggccaggcgacgacgtccgcactggtgccggcatta

SEQ ID NO: 913 - DNA, 28053 bp, Unknown
  R117_24m  MAG No. k141_3412
aagtcgcgcgggttgttcttgatgatgtcgcgagtgtaggcacccagggtacgggtggcctcgagctggccccagccgtggccgtactcagccacttccttgacctcgtagtcctcgaggggcggcagcttcaggtcgtcgcgaatcacaccaccgttggcgttcgggttggcaccgatacgcagctcacccttcggcatgaaggcaaggacgtcgtccttgacagcgccgttggcgtcgaacagctcttccggctggtaggactcgagccagttcttgaggacctcgaagtgggcctcggtgtcgcgggcggaagccagcggcacctggtgagcgcgccaagagccctcggtcttcttgccgtcgatgtacttcgggcaggtccaacccttcggggtgcggaagatcagcatcgggtagaacggacggtgcacgttgtcggtctgagcggcggccttgatgtcgcagatctcgtcccagatggtctcccacagctcggcgaagcggcggtggatggacatgtggtcctcatcatcgaagccagcgacgaactcgtagggctcgtaacccatgccgtggaagaactcgtggagctcttcgtcggagatgcgggacaggatggtcgggttggcgatcttgtagccgttgaggtgcagaatcggcagcacgataccgtcggtgcgcgggttcacgagcttgttggactgccaaccggtagccagcgggccggtctcggcctcgccgtcgccgacgatggccgggacgaacaggctcgggttgtccatgatggcaccgtaagcgtgggacagagcgtaacccagctcaccaccctcgtggatggagcccggggtctccggagcgaagtgggacggaataccgcccgggtaagagaactgacggaagaacttctgcagaccagcttcgtccttggtgatcttcgggaaggtctcagtgtaggtgccgtccaggtaggactgggaggtaccggccgggccaccgtggcccgggcccatgatgatcacggtgttctggccgtggtcagcaatgaaacggttgatgtggccgatgaggaagttcaggccaggggtagtgccccagtggcccaccagacggtgcttcacatcttcgcgggtgaagggctccttcatcagcgggttggaacgcagataaatctggccgatggaaaggtagttggcaacgcgccagtacttgtcaacgccttcgagggcttcctcggaaaccggagcgttgagcttcttccaaggggtgccaataacaggactcgtcatgtgtactcctgtactcctgcacgtgatcgtgcgattgattatttctgttcggtcacggttcctgacccttgcggtgccaaggttttccgttcccaatcaatcgtcatggtacgaggacaacgcgacttttgaacgatttcttgcgggtgtgttcgaaattgttgcggaaatttcagtatttgtgcggttcacctgaccgtttgtcaacattagttttttcaacatactttttcagaacggcggaagcatgcggaaatctagcatctgactagaacagcgcacgttcgatttcccatgttcgaaatcggcgtgttgtccaactacaggcatgtagtttgttcgatttgcgcacatagtccctgcgtgtcggccttgtcgccttgaccagtgataatcaggggtgttcagcccacgtaaaattccaatgaacgttaggggaatatcaatggcaaacggtcctgtgcttgtcgtcgacttcggcgcccagtacgcccagctcatcgcccgccgcgtgcgcgaggcaggcgtgtactccgagctggtccctcattccatgccggtcgacgagatcctggccaaggatccgaaggcgattattctgtccggcggcccggcctccgtgttcgagcccggcgcgccgaccatagataccaaggtattcgaatccggtgttccggtgcttggtatctgctacggcttccaggtcatggcctatgagctcggcggcaaggtggataaggccgctctcggcgaatacggcaagacctcagccaccatcgacgacgccgacggcatcctcgccgactcccccgccgagcagaccacgtggatgagccacggtgtggcggtcgaacaggccccggccggcttcgaagtgctggcccacaccgaaggcgcgcccgtggccgccatggcggacgaatcccgcaagctctacggtgtgcagtggcacccggaagtcaagcactccccgcttggccagaagcttatcgaaaacttcctgcaccgttgcgccgcactgcccaacgactgggacgcctcctcgattatcgaggatcaagtcaagaagatccgcgagaaggtcggcgacgccgaggtgatctgcggcctgtccggcggcgtggactccgccgtggccgccgctctggtgcacaaggccatcggtgaccagctcacctgcgtgttcgtggaccacggcctgctgcgcaagggcgaggtcgagcaggtcaagcacgacttcgttgccgccaccggcatcaagctcatcaccgtggacgcggccgacgacttccttgaggccctgaagggagtctccgagccggagcgcaagcgcaagatcatcggtgagaagttcatccgcacgttcgagaaggcccagcgccaagtgcttgaagaggccggcgcgcgcggcaaggaagtcaagttcctcgtgcagggcaccctctaccccgacgtcgtcgaatccggcggcggcgacggtgccgccaacatcaagtcccaccacaacgtcggcggcctgcccaaggacatcaagttccagctcatcgaaccgctgcgcaccctgttcaaggatgaggtgcgcgccatcggcaccgagctcggtctgcccgacgaaatcgtctggcgtcagcctttcccgggcccgggtctgggcatccgcatcatcggcgagatcaccaaggagcgcctcgacctgctgcgcgaggccgacgccatcgcccgcgaggagctctccaaggccggtctcgaccgtgacatctggcagtgcccggtcgtgctgctcgccgacgttcactcggtgggcgtccaaggcgacgagcgcacctacggctcccccatcgtgctgcgtccggtgagctcggaggacgccatgaccgccgactggtctcgcgtgccctacgatgtgctcgccacgatctccacgcgcatcaccaacgagtgccgccagatcaaccgcgtcgttctcgactgcacgtccaagccgccggcaacgatcgagtgggagtgagccgatagggcttacctgcgctttcgagtgccgctgtgccgctgagtttcgtttcgtatgcgactcgcggcaaagccgccagcgacggcgatgaatacatacggcaatcgagccttcgttcccacgttgggacggaggctttttctttgccgttttactccctttcacctgcgattccgccatttactccccgtgtttcaaaacagcaaagtacggggcggtattcggaggaacgggagtaaggagtcatcccaagtgagtggacgcgcagtttttgtccccgagggcggaacggggtatggggctacggacgttttcttggagttaatcacgcagtcaatccatggctcagccggtattgtaccgggctcatccaaccgagcgattgcttgatgcgatcgtggttgtgccagtggatgtattcgtcgatcaacgcgagcacctccccacgggtgtgttcctcccgccgctcggggtggacggactcgaccttcgtcccgccgaggaaaccctccgcggccgcgtcgtccagcgaacggcccttcgcgcccgtcgatccggtcggcccgaaccgctccatgggttccagccatcccggccgcctatggcgacggccgcggtcggaatgcgccggaggacgcgcgtcctcgggcaacgtggcggtcgatcaccggcgagggatgcgccttgccgtccgccgtcttggtctcggtgatgtccgtcagccgcttctcgttgggacgttcggcggtgaagtcccggagcgatcaggttcccacgagagcgggagtcgtctcgccctcgtgggaaccgtacctgcgacgtccggaacatgcgccgcgagcccgtccccggccatgatccgtctgatcgccttctccgagacgccggttccgggcgcggccttgatcctgcggtacccgtaacggcccttggacgcggcggacgcggcggccacctctgcgctgggcccggcgcctccgcgtcaccgtcatcgccggggagtcgtcacgccgcggcttcgacgatgccacgccgtcctgcgcggcgttcctgttcctgggcggtgccgtcctcgcgatacgccattggcccaatgggccacggcgcccacgctcacgccgagctgccgggcggcttgcttctgcagcatgccgcccgataccggttcgatcgccttcggacgagcagacgttaccggctgtttgtgcccaggtgacaggacaataaaagaattcattatcccgttcgcagcgtctccgtcgcgtatgagcacgcctagcacgggttttatgatctatcgagtgctaaactgtcacggactgaacatcacgagcggttacttatctgcaacgatattcttgccgtttttctagcccttaggagccttatggcacgcaaaagcaccaagaagcaagaggtcgagcttacgctcgagcaagtgttgtggaactgccgcgtcgcgcttcgcggcgtcggcagcatggagaagaaccgcgacgctgtcatcagcctcgtattcctgaagtttgccggcgacaagttcaacaatcgccgcaaggagctcgtcgagcagtacggcgacatcccggcgttccttgagaagccttctttctacaacgcggtcaacgtgttctatttgcccgaacccgcacggtggacctaccttgtcgaccacgcaggcgacaacgcgatcgccaccattgtcgacaacgccatgagcgaggcggagaaggcgaacccctcgcctcgctcaggggcgctttgccgctgggcctgttcgccactctcggcgcaaccaagagctccattaagtcgctcatagacgagatcgccaagatcagcgagagacgctaccacgaggaagaccttatcggacgcgtgtatgagtacttcttgcagacgttcgccgtcggcagctcgaaggaggatggcgagttctacacgcccgcctgcgtcgttcagcttatcgccgagctcatcgagccctacgaggggatcgtctacgacccgtgctgcggctctggcggcatgttcgtgcagtctcacaaattcgttgaacgccaccacggcaacagcagcgcgatctcggtggtcgggcaggagtcgaaccccgacacgtggcgcttatgcaagatgaaccttgccatccgcggcatatcgaacaaccttggcgaggaagccgtctcgaccttcgagaaagaccagcataaggacaagaaggtcgactacatcatggccaacccgcccttcaaccttaagaactggcgcggcaccgatgagcttcttaacgatccgcgctggaaaggctatcccataccgcccgcgtccaacgcgaactacgcatggatcctgcatatgctctcgaagctcgatatgagccacggcgttgcgggctttctgcttgccaacggcgccctcaacgccgacggcgacgagggcgctatacgccagaaaatcctcgagaacgataaggtcgaggccatcatcgtattgccccgcgacatgttctacaccaccgatatctcggtgacgctttggattctgaacatgaacaagggagccagcgaaaaggccggccacaagctgcgcgaccgccgcggcgaggtgctattcatggatctgcgcacgtggaatgagaatatcgagaaatacacgtacgacaagaacaagaacaagaagaagaccgtgctcacgcctgagcagatcggtcgcgttaaagacatcttcgagagctggcgttgcgttgacggcggctacgaggacgtgcccgagctgtgcaaatccgtgcacatcaagggcgacgattccgatcagatcaccatcgagagtcgcgggtatgcgcttacgccgagcaagtacattgagttcatcgaccatgatttgggcatcgactacgagaaggagatgggccgcatccaggccgagattaaggagcttttggctaccgagaagaaatctcaggccatgcttgaagctgcgttcgaaggtattggctatggaattgactaaagctagcctgtggcattatctagagcttgttgaacgtcccaatagcgaagccgtttatggcattgatgatgttcgcggcgtcaataaccaaaagctcatgatacggacgaaggcagacgtctcttctcgggactttgcaaaatttcaaatagtgatgcctggagaatttttctttaaccatcggacttcacgcaacgggtcaaagttcagcatcacgtacaactatgacgatgtcccccatatcgttaccgaggactatgttgtatttcgagtggccaataaaggcgagctttgtcctggctggctttatctgtacgtttgtcgtgccgagtacgatcgttacgttattcaaaactcatggggcagttcgacagagtttttcaactgggaagatttttgcgaagccgaaattctgttgccgccgattgaggtgcagcggaagtacgtcgccatctatgaggcgatgttggctaaccaacgggcttatgaacagggactcgacgatctcaaactgacgtgcgacgcgcttcttgatcgctgcaagaaatcgaagacgtgggagcctgtcggaaagcatctccgtgaggttgatgtccgcaatgctagcggtaagtgcgatgtagcttacggtgtcaacatcaagaaggagtttatgctctccagggcaagcagtgacgacttacttaaatacaagctggtcaaaccaggtcagattgcatgcaatctgcttcatgtcggaagagatgcctcttatccgattgcggtgaacgaaacggactcctgtattgctgtttcaccagcgtattctgttttcatggcatcgaataccgatatggcagtgtttctaatggcttggttttctcgtgcggaaattggccgtaatggttggtttatttgcgatgacagtattcgaggcagcatggctattgatcgcttcttatcttgcgaaattcccatccccgacggtaaaacaattaaagctatcgctgaattaaggacagcgtattgggcgaggacacgaatcaacgtctacctcaaggcccagctcaaggacatatgccccatacttatccggggctcaatcgaggaggcgtcgaggtaattatggagcgcctattctctgaacgttatggagagctgttccaggatgagccaaattggtttggcggagatgacggcagcagcgttccctatagcgctaaagtcctagtcgcacgcgtcatggaggacttccgtgagccgattagttttcagccgaatcgctacgatagctacaccgttgatacagacgctcttgaccttgcgataaacgagctcaacgagcatgtcgattatcgggtcgtcgacttggatatgatgcgcatgggttcgagccttgacgaggtccacgcccttgcaaacgtttacacaccgcacctcttcgacctcgtagagctccaatacaaggagctttccgacgacgccgaaaacggcaagggcggcttccgcggtgagatcaacaaggtgtttcgcgagaatgatatcccctggtttctcgttgacgggcgactggtcaagatcgatcccaggcagtttgagcaggacctgaagctcaaggctctcagcgagatgagggagctcaaggatgcggaccccctctaccggagagcttacgatgagctgaggaaggctatagatttcctgggacgcggcgactatgcggaagccgtgatcaatgccgagaagagctacgagagcgtcctcaaggtcatctgcggaccgaagtccgagacagaggcagccaacagccttattaagcgtttgctcgaggctgacaatctgtctctcccggagagccttaagcccgaggccttccagggcagcgttctcatgtcgcttcccatcatccgcaacaaggcggcggcgcacggctccgggacgacggggcgcgagattagtgccccgatggccaaccttgccgtcaatctggcatgcgccctcgacacatacctcatccaggaaatgaccgacaaagagtaggcaagtatggaagcggcagaccttaaattcgaaaacggaaagttcaccgaggacgagcttgaacaggcgatcatcgagctgttccagcagcaggacgccaacggcgtgcgctggagctatgccaacggcgagcagctgcaccgccgcttcgacgagccgctcatggaagaccgtttgaagtcgagccttcgacgccgctatgccgatatcgacctgaccgagggcgagctccagacgctcgtgggcgagctcaagcgcattccctcggccccgctctacgacgggtgccggcgagcgttctggctcatcaacgaggggtacacccttctccgcgaggacgcaaacaagcctgccgttcacatcgagtacatcgacttcgacgacatctcgaacaacgatttcctcatcgtgaaccaatacacggtcgaggacgtgcgcacccgtcgtcccgaccttttatgcttcgtaaacggcataccgctcgccatcctcgagtttaaaaccgccatcgaggaggatacgaccatccacgatgcgtggaagcaaatcgccatccgttacgcgcgcgacatcccgagtctgctcaagtactgctgcatagccgctgtcagcgacggcatcaacaacaagatcggcactgtgttcgctccgtactcatatttctatgcctggaacaaggccaatgacgtcgacaaggtgtcgaacggcatcagttccctttacaccatggtcgagggtgccttcgcgcccgaccgtttcctgacaatcgttcgcgacttcgtattcttccccgacgacagcaaaagctccaccgagatagtctgccgctacccgcagtacttcgccgcgacgaggatgctcgacaacatctgtgagcacctgcgccccgaaggcgacggcaagggcggcacgtacttcggcgccaccggctgcggcaagacgtatacgatgcttttcctctcgcgtctgatgatgcttcgacgcagcgaggagctgggcaaccccaccatcgtgctcatcgtcgaccgcgaggatctggacaaccaggcaagcgagctgttcgtgacagcgaagcggttcctgcatgacgagaacgtgcgcagcatcgagacgcgcgacgacttggcggagacgctgcgcgggcgcgaatcgggcggcgtctacatcaccaccatccagaagttcagcgagcggatggggctcctttccgaccgctgcaacatcatctgcatatccgacgaggcgcatcgcacccagacgggcgtgggctccaagctcatggtcaccgaggagggtgccttcacccgctacggcttcgccaaatacctgcgcgacggcttccccaacgcgacctacgtgggctttaccggcacgcctatcgacgagacaatcgccgtgttcggccctgtggtcgaccgttactccatgaaggagtcgagcgacgacggcattaccgtgcgtatcgcctacgagcccagattggcgcgcgtgctcctctccggtgatgaggcgaagaggatccaggagtactacgaccgctgcgccgaggagggctcgaccgaggacgccatcgaggagagccagcgcgccatgagctcgatagaggtgctgctgcgcgaccccgaccgcctgaagaagctcgcggccgacatggtcgagcactacgagcgcctctgcggggagaagccgggcgttgtgcagaaggccatgatcgtctgctctaatcgcgcccatgccttcgacctgctcaacgccatccttgccgtacggccagaatggggcatggcgaagaaggccgaggacgagagcaggatttcgcccgagcaattggaggagctcgaggcgctgccaaagatcaacatcgtggccacgcgcggcaaggacgacccgagggacctcttcgacgcctgcggcaacaaggaatggcgcaagaagctggacaagcagttcaagaacaacgactcgaacttcaaggtcgccgtcgtatgcgacatgtggatcaccggcttcgacgttccctcgcttgccgttatgtatatcgacaagccgctgcagcgccatacgttggtacagaccatcagtcgagtgaaccgcgtgttcgagggcaaagaccaggggcttgtggtcgactacatcggcatcaaagagaacatgatgaaggcgctcaagacctacggcggcgacgattccggagccatcgacgatctgaccgtcgccctcggcatcttccgcaatcacctggccatgatcgacgacctcatggtcaacttcgactcgagcgccttccatgcgggcaagcctctcgaacgcctcgggtgccttaacagggctgccgagtacgtgcagctctcgaaggagttccagacgcgattcatggggctcacgcgcatcctgaaatccgcgtaccagatctgcttcccctcgggagagctatccgaccgcgagaccgcgatgtcccagttctatctcgcgatccgctccatcgtctacaagcagaccaaggatgacgcgcccgacgccgagatgatgaacgaggtcgttgaggagatggtacggcaggcgatcagctgcacgggcgtggagagcgtcctcgacgccgacggccccgaggacctcttcggcgaagaggcggttgccgagctcaacgccatgaagatgcctatcaccagattcaacgccttgatgaagctcgtgaagcgggcgatcaaggattacggacgcaccaacaaggtgaaagcgcggcagttcgatgagcgccttcgcaaggtggtggacgcctacaactcacgcgacgacctcaccttcacgagcaaggtcgtatctgattttgtcgacaacctgagcgaccagctcattgacatccttcgcgatctcaaggaagacaagagctcgtttgagaggatgggtgttacttacgcggagaaggcattctatgacatcttggtgaaggtgcgcgacgaccatggttttgtcttcagcgacgagaagtgtattgcgcttgcaaaagagatttcaaagctcgtaaacgacaaggcgcaatatgctgactggtcgacgcgtgatgacatcaaaagccaactcaacatggatctgaccgtactgctctataagaacggctatccgcccgagtgggatgaagaggtcttcgagaaggtcatggagcaggcagagaactttaaaagaaacgagtagacaggaggcaaaaagcattcacctatcgttccagagtccactcgcaagaacctctgagtcccttatacaataggacagagaagcaggtgctgaatggaaccaaggcatacggatgatgaatcattgcccgaattagtagcagatcttgccgacctcaagcgcgaagggtcctactgggatttcaagcgtgagtggcatggaaacaaggtggacttgcttcacggcataatctgcatggcgaataatcccgaagacacaacggggcttttgattatcggtattgacgaagaaggggacttttagctcacgggcggcgccgagctcttgggcgaacggaggaatacgcaaggcatcgttgatatgctgcgtacaaagcgacgtgtcgatgggggttcccaaagttcgtgtcgcatcgattgagctgggcaacgcttgcgttgacattgtcctaattgaccacgatagcgaatccctgccttattatttgaccgtgattatggagaggggcgcagtatcgttcgtgccggtgccgtctatacgaggaacgctgacagcaataccccaaaaaaaagaagacggctaacccgctcgagaccgagcgactctggcgtaggcattttggtttgggcaagacaccgctcgagaggctccttcagctgctctccgagccttccaaatggttcatccccttcccgttttagtgagggatgaggaatacagcggatattgctattgccacgccgactttcccgagttcacttctgttcgcaagcctgcagaaagttggaccggagtcaagtacttcatgttggctagcccgtttttctcgcatccaaactggtggacaggctacttctactatcatcagacaatgattcgcagaatgcctgatgcatattccgaccatctgtggattccagcgccaagcatctccacccttcgcgattcttgccgagcggattcttccgaagccgctcactcctacgcctattacctcaaatactccattgaatgtgtcgcgatgatgtttgagctaaggtgtgtttacactagttgggtttctggctgtgttcttcgggtagacggcgatgaggatgggccgggggttggcgaggagggtctcgtcgagcctgtcgtggcgggtggcggccttgcggtagtgcttcatgcggttgaagacgcgttcgaccatgttccgccccgtgtacgcctccctgtcgcgatcccatggggccgcacggtttccctttgggcggcacgaccggcgtcaggccgaacgactcggccggcggccgggtggaacccccgtacgcgcggtccatgagcgggcgtgcggatttccaccccgatgatccgcgcctcccgcaatgccgtgaacaggcgccccatcgcaccgttcccggaccggcggtcgaaccgccggcagacggtgatccacttgccgtggcgctccggcgggtccctccacggggctcccgcgcggcgcatccacggcagggcgttgacgaacgtgtgattgccgaccgtcacgttgccgcgccggcgcggcaacggatgcgcgacccccatgaaccggtcaagcgtgatgtcgcacctcggcgtacgcatacgacaattaccacgcaaaacctagatagtgtaaacacactctaaatcagggaagggcaccattgataaatagcagacagcccaggcgttaaaacttaaacccagggttctccttgcggatggtaccaatcttcttgtcgctgcggaccttgcgaccatcctcgtggcgcaatgtcccctcgggcaatccgcgcgacttctcaaatgtcttaactgtacaatcgcttctggtttttctgactgtcattgcgttgacctcctgtcaactatgtatcaaccgctaggtcgagagtttaacgtctggtagcagactatatttagacgatgacatgagccgactagagtcagggaatgatctcaatgcgacaacaatcctagttcaaaaccgcccggcagctgctagcacttccctggcagaggagatggccgacaccccgttcccgctcaatcgttacataacctgtttccctgtagccacccggggagagtatgttcacccgacccaagagtgacaaattccaagtgaggagcgacgactctgaactgcggaaatgctgatgtgagcacaacgaatggctatatgacgttcgtcatcgcggaatcacgaaatcgtgggggtaaaactttgagaccattcgtccaggtgccttctgatatcttcccatctaacctgtgtcgaaacaagatgcttcttcagatgaacactatccagcttatagagaataaccatgacgcactgtgcacatctccgcttctcttcatcgctatatcgcccaaagtcattcgtggggttaaactccctttcccgatcttgcaaatggctgccatcgttcagagcaagacgatacattgcatctgcgaggaagggtaactggtcaccgaggcgttcttgtaagtccggatcgcgagacagtccggacattccaatgccgtagttgaaggtactgtacccctcaagcacccttcgtaggatgtttccaattacgtatgactcctgcggatctatattctcggcgcaagcaaaatcgtaggtacgcttcaacagcgcaacatattcgttggcttttttactacgcgtttcgcaaaacatgtccttgagctcgagtaaatcaatttggaattttccgttgctgaatgtgtcatttatgtcatcgaagatgaccttcagttcgtttgccgcacccccatcgtgagtcatgaccgtgatacgactttccgggttcgagcctaatagatgtccagcacgctctctgattagcgagcagactcctatcctgttctccatgtcaaaactggaaattgggtcatcgagaatgagatactgagggtcgtcatcctcgtgatgccgctccctattttttccactctcagagaagaagtagcaaagcgcgagaatgtttctctcgcccgtggatacatcattcggctttaccgcttgccctttagatataatcttgtatttaccatcatccagggaaagctggaatctcctggtatcgaaatagacattcgcgaggtaatcgttaattacatcaactgcgatgtccatgttcttcatcttggcttcctgttcggccctgctacgagctaagcgctgaagactatcttcgtttttctttttcttgtcccgagcttcattatattcctttattgcctccttgtgcttttcaatctctgaggatgcatctgctgcagcaatcttattgttcaaatcacgaagctcgtcatgaatttttgacttctcatctatgtctttatttatcgatccaacttctttattaatggatttaatttcttcattcaacgcttgaatcacttctgacaaaccgagagcctcaatagtctttggagaataaacgcttgactctctctccaccatcaagccattgtatttttctattaggctatttgccttttgctctgcttttagcagttcggtctttagcttagcggatacttgttccgggacatcccgtgggattatttcttccaagtgcgacgccctgagttcctctttgaatttatccacttccttgctaagcactttgtgtacgctatcaacaatggaagcctttaactcagaggagattggtcgttggcacattgggcaaacgtccgcctccgatgaagaaaagacctcggctgactcctcaattagatgctgatgaccacttcgtacaagctcgaggattcgcttctcacgatcgcttaacgtggggtcttctacgcgtttagccagaagctctagaatccgagcttcatcgtataggcttggctcaagcggcagaagctcacgcagatgatttccaccggccgcactggctttttcgtagtccatcaatttttgattgaacttattgtctagacatacgcgcgatttaccaggcactgcattgcatatctcattcaaccgattatcagtgaaattaggcttcttgccgtcgactttctctgctcgcgacttccatccactgttaactgccgcgtcttgaatctttctttttagcgtctcaagagacttctcaccatttctaagctcttcgattttcttcgttagcccttggttctcggcttcaatgctttcaatcttctcgtcaatcttcttgatctcgtctgctacttcgacttgctcgccaagcatggcaaacgcctggaggccatcgtcaccaatacgcgttttcgactcgatgtaatcttcgttgaagacccttattcgtgctcggtcagcatcgtctaaatctaatttctgattacaatcgtagaaataaccagtaccattgccttccgtgatatcgttgatctcacgtgcaatagtcgattttcctgatccattacggccaaagacaatcgatgcgcgatgccgtctcgtattattgctatcgctatcgtgaaacagtcgaacgttggtcccttctgaggtaggtccttccgagaaggctccacgtcgcacttgaacaccgattatgcttgaaatctggctagccatcagaacctccaaaaaactgagatgcggcgagtaggatagcccgcagaacaatgcttcccattataacgtctgcttcttttacctaaacacagaagcactgagcgataaaaaaaaaatcgaatcagtttcgtgatgatccatgacctgacgtggcttagccgtagcttagtgcgcccgtagcctccatcaggtatttccctgcctgtcccgtccagcggacgcggcttcttgggccttgttacgaccaagagcactagatgcccgacgagaggaggtaggccatcccacgaaagccgacattctccagatgccacgcgacgcgttcccgactcaccaaggaatatcggataatgatgtcgaaagcctcaagaatgccgaggcggagatacggggtctgctgtctcctcggcatccgaagcaaacgacccgatcgacgacctcatgggcatgatgcgcatcgtgcatcccgaacttcctcattccgaagtgatcacagccgcacttcatccgtctgccggcccagcccttgccataaggggagacgcggtctgccatgaagacggcgtatccaacaggtccgctttccatggcctcgataagcaccttgaattcctcattcgtccggaacggcattgcatcggcgttttcctgcccatgttttccgccttgtggcggggatcctctctcgatccgtagaacttcaccgcaaaacatcttgggcgaacagtgcagctgcgtatatcgttcaaaagcagcgggtggttatggacggaacgctcggcgtggagtcgaaggccatgttccagacgcgcacattctggtcgacgatcgcggatcgcggcagaaagcccatgaccttgccggcggattccgaaacgctatcatgcatgttgctacgctgggagaatgcgcacttgatatagggtcgaaacacactatgatgtggccacgcagaacagaaacaaccatcaggcacggaagagacccggaaaggcgaagaggccatcgtcatgtccagtgaagtcagacaagggaagatgccgccaagacacatcgaggtgcggggcgcgaaggtccataacctgaagaacattgatatcgatatcccactgcacgagatcgtggtgatcgccggggtctccggctcggggaaatcctctctcgcgctcggcgtgctgtatgcggagggatcccgcagatacttggaatccctctccacctacactcgccggaggatgacgcaggcggaacgcgcggatgtggaggatgtccgatatgtgccggcggcgcttgcgcttcggcagcgcccgggggttcccggcatccgcagtacattcggaacgctttccgaactgctcaatggtctgcggctcatgttctcccggcttgcgagtcaccgctgccccaatgggcactactgcccgccatctctttcggtcgcagccatgcaggaaatcacctgcccggcctgcggcgggcaattccacggtcccggagccgaggagctcgccttcaacagtaccggcgcctgcaggacctgcggcggcacgggaatcgtccagaccgtgaacgaggcgacgctggtgccggacgattccaagacgatcgacgagggcgcggtcgtcgtctgggggacgctcatgtggtcgctcatgaaggacatcgtacggacgatgggcgtgcgaaccgatgtgccgttccgcgacctctcgccgagggaaaaggagatcgtctaccacggcgagttgaaaaaacatcacgtccattacgtcaatccgcgcacgctggaaccgtcggaaatggatttcaactattacagcgcggtcaattccgtcaagaactcccttgccaaggtcaaggacgagaagggaatgaagaggctcgagaaatatctcaaggagggcgtttgcccggactgccatgggacaaggctctcggaggccgcccgcacgccgagactgcgggggaatcggtctggaccgggcaacggcaatgacgctttcggaactgatcccctgggtgcagggcgtgccggcatcgcttccaaaagagatgcgccccatggcgcagagcatccgcgaatcgttcatggacgtttccgagcggctgatggatctcggccttggatacctgtcgcttgatcgggcggcttcaacgctttccacaggtgaacgtcagcgggcgcagctcgcaagggcggttcgcaaccggacgaccggcgtgctgtatgttctcgatgagccgtcgatcggcttgcacccccataatctcaaggggctgaccggcgtgatggacgatctgcgggcggatgggaattccgtcatcatcgtcgatcatgacacacgggttttgaagcatgccgactggatgatcgagatggggcaaggagccggagcggacggcgggacggtgattgccgagggcaaggatcgcaaacatcgcgaagaatccacggtccgtcatcgggccgtatctttccgaccggtatgaagcaagaatccgtccggtcacgcaggcggatcgcatgttcgacaagggcgccatacatctggaaacggggatgatccacacggtgcatcctctggacgtgcggataccgatggggaggctgaccgtggtgacgggcgtctccggttccgggaaaaccacgatggtgctcgaaagcctgatcccgtcgttcagggcgaagatcggcgggcagaagcttgcgggacatgtgaggaacatcgaggcggagggcatcgcacaggtcaagctgatcgacgcgacgccgatcggcatcaacgtgcgctcgaccgtggcgacgtacgcgaatgtccacgacgagctcagaaaggcatacgcaaagacacaggacgcgaaggaccgttccctcaaagccggagatttctcatacaatacgggaagactccgctgcccggcctgtgacggaacaggggagatctcgctggacgtccagttcctgcccgatgtgaagattccctgcccggactgccggggttcccggtacggcgcggatgctttcgacatccgcaggaaagcgaaggacggcaatgcatacagtctgccggagctcatgaatatgagcgtggatcaggcgctgaacgccctcgacggactgaagctcccccggcaacgactgcaggtgctgcacgacctgggactcggctatctgaccctcggcgaggaaacgcccggactttccggcggcgaagcacagcggctgaagcttgccagcgagatgggaaaggaccagagcgactcggtgttcgttttcgatgaaccgaccatcggcttgcatccgcaggatgtgaggacgctgctgcttgttttccagacgctgatcaatcacggcgccaccgtggtggtcatcgaacacgaccttgatgtggtggacaacgccgattacatcatcgatatgggaccgggcggcggaaaggaaggcggcagggtcgtcgcctgcgggacgccggacgagatcagacacacagatgaaagcattaccggtcgctatatatagcgtcatatgtaggagcgtggtctctgcctgacggcatcacgcgggagcaggccggtacggccctgacccgcatcgcgagtggtgtgccgcggcggcccggctgcggcacgtcggcatggggcgcgccgccagggcgcggaatacggggaatatgccgcgtacgacaggaatgatatgattcaatcctggatttgcgttacgtttgccacacgcggcggaacgccgtcggagccgcagtcagagagggaagtcccgtgaaacgtttcgtgggtttggacggcatcaaaggattggcgctgctggccatcgtgctctatcactgcatgcagcagcgtctgccgggcggattctacggcgtggacgtgttcttcaccgtctcgggattcctgaccgccacaagcctcatacggtccctgaacacgaccggaacgctcaacctcgtgcgattcatccccaagcgtgcagtacgtctctatccggcgctgtttctgctgattccggtcaccgtctccgtcggctggctgctcgatcacgacattctagtttccatccgcgaccaagtcatcaccgtgctgctgggctgctacaactggtacgccattgccggaggccaaagctatttcgaccaaatgaacccgcaggtgtttcgccatctgtggttcattggcgtgctcatgcagttctacgtcatcgtgccgttcatcgtctggctgatgtggaagctccgccagacgaaactgccctcactcatcccactgggactcgcggcgttcagcagtatcgccatgtgggcgatgtatgtgcccaagggcgaccccacccgcgtctacttcggcactgatacccacagcatgggcctgatgctgggtgtggctctcgcctggtgggtcaccgctcctcagttgggccacgctcgtcagggagctgtgccgatgccccgcaccattagatcgagcgcttcggccgccacgtaccgggctccgttacctcagattcctgtaaagcatcgcatctggaatgcgacggcaccggtattggcattcctcagcctgattgccttggtcaccatgacggttatcggcaaacaggatgcattcgccttccgcggcggcatcatattgtccagcctgttgtccgtgctgctgattgccggtaccatctccgacgattcctggatgcaaagcctcatggtgttcaagccattggccgccctcggcaagtattcgtacggcatttacctgtggcactggccgttgtggattctttccagcgcccttgccccgaagatcttcaaggcagcagggccttggcctctcatcatgaccgcgttgctcaccgccattgcggtgatgatttcctggctgatggtggagaaaccggcggcaatgcactcggtgatatccgtcgtggtgccccttcgcacgaacaagaagaatcatgcggcccgggttattgccgttgacgttatcctggcgctgtcgttggtcggctgcgcgcagggcattactcatgcacctgcgaaaaccgccatgcagatccagctggagcaacaggccgcacaactggaacgcatacagaaaaccgaacacgtgctgctgcgccatgccgtgccggcaccgcccaagcccaagcatgagatgcccaccggcgatcagattaccgccataggcgattcggtgatgctggcctcatcacagggcctttcggaagtcttccccggcattcagaccgacgcgagcgtttcccgctccatcatggtcgcccccgaactcatcggcaatgatctgtccgccggcagtctgcggcaatgggtgctgatcggccttggcaccaattcggcaatcacccctgatcagctggaccagattcgtaatatgatcggccccgaccgcgtgctggtactggtcaatgcccacggagaccgtacgtggattccacctaccaaccaggtgcttgccgactatgcggccgcacatccggacaatgtggtgctggtggattggaatgccacagccaacgcgaacgcgcaggtgctcggctccgacggcatccacccgagcatggatagcgatatctatgcaaaggcggtcaaacaggccatcgaacaatggatcgcaagcggcaggtgaacggcaggcaacgctgagttgtccaaccggtcgtgaagaacggctatgctgaagactgcatcaacgagaccacacgttgggagacatggtgagcgcaatccttgaagggaagcccgataagaatcttattctcgttacgggaaggattcatccgaaattggctgaggatgtcgccgagcagctcggcatcgacgtccttgaaaccaccgcatacgatttcgccaacggcgagatgtacgtgcgctacaccgaatcggtgcgtggcgccgatgtgttcgtgctgcaaagccactacaaacccatcaacaaggcgatcatggagcagctcatcatgatcgacgcattgaagcgcgcctcggcccgttccattactgcggtctgcccgttgctcggctactcccgtcaggacaagaagcaccgcggccgcgagcccatctcctgccgtctggtgttcgacctgctgaagaccgccggtgccgaccgcatcatgtcggtcgatctgcatgccgcgcagtcccaaggcttcttcgacggcccggtcgatcatctggtggccatgccggtgctggtcgactacatccgtgatcgtttccaaggccatctcgacaacgtcgccgtcgtctcccccgacgccggccgcattcgcgtggccgagcagtgggcgcagcgtctcggcggcggtccgctcgctttcgtgcacaagactcgcgacatcacccgcccgaaccaggcggtcgccaaccgtgtggtcggcgacgtcgccggcaaggactgcgtgcttgtcgatgacctgatcgacaccgccggtaccatcgcgggcgcatgccacgtgctgcaggacgcgggagccaagtcggtgaccgtggtcgccacgcatggcgtgctctccggcccggccatcgagcggctcaagaactgcggtgcgcgcgaggtcgtgctgaccgacaccgtgccgattcccgaggaaaagcgctgggatggcttgaccgtcctgtcgatcgccccgctgctggccagcgccatccgcgccgtattcgaggacggctcggtcgccgaactgttcgacacctaccccgagcaccacggtcaaggcttcctgttcgcctgatcacgtgcgtgtttgttcaaggaaagcacatgatgcgagacgcgacatggcgtagtctttcggtaaataccgacagtatggtataaatgaacacttgtgggccgaaagcccacgactcccccatggtgtaatggcagcacacgggtctttggaaccctttgtcttggttcgagtccaggtgggggaacggctgacggccgctcgacatccgggcggccgtctattgttttgaggtgtttccaccctcaatagacattccgatcgaagggaatacgtcagttatggcattatccgcagccatcgtcctcgccgccggcgagggtacccgcatgcgttccaacaagccgaaggtgctgcatacttttgcaggcaagaccttcctgaacagggtcatggattcggtgaccgccctgaaccccgacacgctggccgtggtcgtgcacttccaggccgagcgcgtcgccgaagccgcccgctcctatgacgagcaggtcaccatcgtgaaccaggacgacattcccggtaccggtcgcgccgtgcagtgcgcaatggcacagctcaccgaggctggcaaggtcgatggcccggtgctgatcgccgcctccgacatgccgctgctcgacagcgagacgctgcaccgcttggtcgaattccacaccgcctccggcaacggcgccaccgtgctcaccaccatcctcgatgacccgaccggctacggccgcatcatccgcgatcgcgaaggcaacgtgctgcgcatcgtcgagcagaaggacgccaaccgcagcgaactcgccgtgcaggaagtgaacacctcggtctacgtgttcgaggcttccgtgcttaccgaggcaatcgccggactgaagtcgaacaacgcgcagggtgagttctatctgaccgacgcgctggaaaccgccaaggccgctggcaaggtcggcgcgttcgccgctccggatccgctcaccgtcgaaggcgtgaacgaccgcgtgcagctggccgcgctgtccaagacctacaaccgccgcgtctgcgagcgctggatgcgcgacggcgtgaccattcttgacccggaaaccacttggatcgaggacgatgtccagatcggccgcgacgccaccatcctgcccggttccttcctgcaaggccacacggtggtcggcgaggacgccatcgtcggcccgtacaccaccctcattgacgcaaccgtggacgaaggtgccgtggtcgaacgttcccgcgtgcaggaatcgcacatcggcgcacgcacgaacatcggcccgtggacctacctgcgcccgggcaacgagttcggcgaggatgccaaggccggcgcgttcgtcgaaatgaagaaggcgcacatcggcaacggcaccaaggtgccgcacctgagctacgtgggcgacgcccagctcggcgaccacaccaacatcggcggcggcaccatcaccgccaactatgacggtgtgcacaagaatcgcaccaccatcggctctggctgccatgtgggcgccggcaacctgttcgtggccccggtcgaggtcggcgacaacgtgaccaccggtgccggctccgtggtgcgccacgccgtgccgagcgacacgatggtctactccgagaacacgcagcacaacgtcgagggctggaagcccgcctgggagcgctgaaccatgcccgcacttcaggattccatcaacgccgtccgcgtggccgccgaggccgcagaccgtatcaaggccaccgacattgtggccttcgacgtagccgacctgctcggcatcaccgacatcatgatgatcgccggcgcctccaacgagcgtcaggtactggccgtggccgaggaaatcgaaaaggacctgttccttaagtgctccggccgtcagccgcgctctcgcgagggcctgaccgagggccagtgggtgctgcttgactacggtgatttcgtgattcatgtcatgcacgaggaatcgcgcgaattctacgggctcgaacgactctggcgcgactgcccggccatcgatcttgaactcgcacacccggaaacggcggagcatgcggacgctgctgccgtcaccaccgcgtaacgtgcgaatcacataacgctgatattcgctgatactcgctgatactcgtgtgtcgggctgcctgttgccgaacgtcattgacggcaccaggcagccctcccttttccctgtttcctcactggaatcgaaaggatcgtcactatggccaatcatgttcgttccattttccttatccgtcatggacgcacttcctataacgccgctcacaagctccaaggccaggtcgacattccgctggacgccgtgggtgaatggcaggtcaagcagaccgccgcggccttgaaaagcctgtacgtcgatcgtcggccggaaatcaaccaccggttcattgtctgctccgatttgaagcgtgcgcacgccaccgcgcaggctttcgccgacgtattgggtggaatcgagcccgtcgatgatcatcgcgtccgtgaacgcagcttcggcgactgggatggccatgccgtggctgaactggccgaacgctaccctgaggacttccgttcctggatggagtctcggggcggtgaactgaagtatggtgccgaacccaaggaagccgtaggcaaacgcggtgtggaggctcttgaggactggtccacgcgtgccggagacgacacggacctgttcgtgttctcgcacggcgcatggatcgcgcagacattgcagaccctgttgggcatttccgcgatcgatccgaccttctccacggtggtcacattgcgcaatgcgcactgggtgcgcttggtgccgatggacaatcccgatggcactgtgcgctggcgtctgctggactacaatcacggtccggccatcgccgacaccgacgaatgggaacgcgaacgctgatcatgttcccgactcccctgctaatccaataggtccggtgcattcggaaccgttcaagcaataactgaatgactcaatgcctgaataatggcggaaacaagccaaaaagtgtcgccaaatcacacttttgtcatttggcgacacgccggcttttgccagaatcgacatctcgtcgtaatgtatacgaggtccgaacaacgggccaacaattgaaaacggggctatagcgcagctggtagcgcatctccatggcatggagagggtcgggggttcgaatccccctagctccacgacgaagccatcaaatcggatgatatggtggtttctccgctggttcgtggcgggtcttgtgactcccatgaatcggatagcttcactcggggctatagcgcagctggtagcgcatctccatggcatggagagggtcgggggttcgaatccccctagctccacaatcaaggccggtgcttcacacaccggcctttttcgttttctatcctatcgggcgacttttgtgcaacattcccgggaatgcgtcgcaaaacagggactggaatgcatgcagtgcgatactttccccggaaagtatcgccaaggggacgctcttccgattggcgcgacaccggcgtgagagataacagtaatcgccactacaatgaggtgtggtccctatcgtgttgatcatcaaaggagacaaaaacatcgtgaccgtcacccgtgtatatatcgccagccctgaaggcgccaatggccgcaacgtcgtcgcttacggcgtgctcaacgcattgacttccaagtacaagaccatggtgttccgccctgctgtgtccaaccatgacgaattcaccccgatcctgctcgccgcctccaatgcgggactcggcgtggccctgtccaccggcctcgacgtgcataaggtgcgcgccgacaaggacaccgcccgcggagacatcgtcggcgagttcaactacgccatggaggtctcccgcgcgaacgccgccctgatcgtcggcaccgacaaatcccacgtcaacgacccgaccacctacgagttcaacgcggacgtcgccgccgatctgaaggccggggtgttcctggccgtgtgcaccatggaccgatggccgcacgagctcgacgagaccgtcaagctgtccatcgagggcatgcgcgccgcgggcaatacggtgctcggcatcttcgtgaccggctgcgagccgcgccacgccttctccgtcaaggagaccctcgccaaatacggcctgccggtctggactttgccgcaggtgcccttcaccgacgaatccaccaaggatctggcccttgagaccttccgcaagcacgctcccatcgacgaggtgctcgccgcgctcgacgtggacgtcaccgcgccggtcacgccgtacgccttccaattcgacctgctcggcaaggccaagagcaacaagaagaccatcgtgctgcccgaaggcgaggaggaccgcatcatcaaggcggccgactacctgcttgagcgcgagatcgtgaacctcatcatcgtgggcgacaaggacgccatcctggcccgcggcagggaactggggctgaacagtctggggcgcgcccgcttccaggccatggacgacgagaacgtgttgaagcccatggtcgccaagctgtgcgagttgcgtgccaagaagggcatgaccgaggagcaggcccgcaagcaactgaccgacgccagctacttcggcaccatgctggtggtgctcggctatgccgacggactggtttcgggttccgtgcattccaccgccaacaccgtgcgccccgccctgcaggtcatcaagaccaagccgggccagaaactggtctcgggcgcgttcctcatgtgcttcaaggaccatgtggccgtgttcgccgactgcgccatcaacctcaacccggacgccgagcagctttccgagatcgcgctgcagtccgccgagaccgcccgcgccttcggcatcgacccgaaggtcggtatgctctcctactccaccctcggctccggcaagggcccggacgtggacgtggtcgaggaagccaccaagctgctcaaggagaaggctccggatctgccggtggtcggttccatccagttcgacgccgcctggtcccccaccgtggccgccaccaaggccaagggcaacgatgtggccggacacgtcaacgtgttcgtcttcccggacctgtgcgccggcaacatcggctacaaagccgtgcagcgctcctccggcgccttg

SEQ ID NO: 914 - DNA, 11013 bp, Unknown
  R117_24m  MAG No. k141_3418
cgacaggcgtgaagtttctcaacgaagcggaagccgggcacaagtcgtatgtcacaatcgacttcgtgcccagctcccgtccttctgctcagaagcggagtgcggttcaccatccagccgacatcatcggcatcatgccgcagcgggtcaacgtatcggccagcgcatcgtccagtgcttggatcggtcatagcaacgacgccaccgaacgacgatggacagtatggcgcctatcgccagagctgacacggccagaaccgaggcaagcgacacatcgccacccgtgacgggcagtgacgggcgagtgttgggcgtggttgcctccgccggcgccggtggcgtctcgggtttctccggttcgcacggtttctccgactcgcatgggggcaacacccgcacacgctcccaggcatcgtcataccggctggacgccggggaaacacggtcatccccctcgaaccgccaaacgaacacgtaccacccatgccgttcggcggtcagatgcatgggagcgccatgcgcgtccaacgccccggcgccgattttgaacgtgccgttcatcgcgggaatctcccaggtggccagcaaccggtggttgtcgtcttccgtggggacctctcccccggatggcttgtacgcctcatcgttggaggggttgtcgggatcgccggaccaccatacgctcaccgtcgcatacggctgatccgccgcgaaaccataggtttcatcacccatgaactggccgtggtccgccgggaaccccgatacggtgatggtgtcgctgagttcggcgccgatatccgccgaatgttcggtaaccgtcgacatgacttcgaccttcccgcgccccacgttgctttccgaagcctccatgaacgggctcacccagtcgccggtaaggtattcctgcgcccgtttgctttgctcgctccgccggaacacccacacccaggtgccaaagccgccggtcttcggagtcagataggcggcgtcaccgtccggcttggccatggcccgcacacgaacccgctgccccacaccggtgaaggacgccttgccataagcactcggctcataacccgaggacgccagccgggcgagaaaagcgtccgcgctctcccgcgcgttcggcgcgatgaccttgcccagatcgtccttgccgagcccgtcgaaatagtatccacgcgcctgcagcttcagaccgggcacccaatgactgccctcgtcccccacgccgctggtcacatcatcgaacaccggcgaagccgcatcaagcaccttatcggacacctgcgtggacaccgacggaacgaaatccttgcgcacctggaacgtcgacgacgaaccgccggcggaagccatcgaatcgaaggccagcatgtcctgagtgctgtccatgacgtgcatccgcccatactcgtatgtggtgttcaccgtcacctcgccggcgccggtcgcctcccacgcgatcgaggatccggcgctcgtcgacacccccgagaacgtgttgccgccttggatgaaccgcgccggcccctgcaaggtgacggtgaacggcactcccgcgatcgcgtcaccgtcgcggttcaccactttcaccgagatggaaccgctgcgcaaagcctcggcatcggtgcgttccaccgtcgtgcccgcaggcgtcttgccggccgattgatcccatatctgggccgccttcgccacgatctcgggataccggccttgaatgaccgccatctgtctcgcccactcgtcccgatcgcgcccgaagtgatcctgcacgatgatgccgatcgccgcatgggtggcggcatccgtgtcgcggtaccggtcaaggatccatgccatacgccgggcgttctcatcggaggcaagcaccgtggtggggcctatcacatagtcgctcagtttccccgcttcgatgcagtagtacttgttgcccgaagcgtccagccccgcgacaccgacgtaatattccatatcgttgtatggaaacgtcacgtgatatctttcgtcggcgggcgtcaacgtcgcggcatacgccgtattcgccgagccgaacaccactcccaccattattatcagaccggtcagcatcgctacgatggccatgccccgttgccgccatgtcgttatcatcattcgtcctttcctggtacgttccccgcatactgcactgtgtgcgggtaggccacgatcatggcagattttcattcgctacagccggtttttcggcctatgtggtccgagcttgccgtttgtcggcgagttgtggataactcttccgccgagttatccacctcatgcggttgaccgaacgtttacctgcaagttatccacaatgtgcaacatatgttcaaaagcctctagaatagggccttatggcagcagtacaacatcgcgcgaccacgcgcactagtaataccgataacaacaccacgaagacgaagtcaaagacgacttctgcccgaaagagccccgcaaccaagcgcaagagagtcagcgccgaaacggcacgcgccgcagcagcgctgaaaggcctggctgtcgaagcccccgcaccgtccatcgaagcaaacgagcccggccagttcggccgcatcaatgtcatggacatcactcccgccgaggagcgtggcatcttccccgcccgtgtggaactcggcgaaccgtttgagatgaccgcccaagtgttcatcgaaggccgcaccaaggtgggtgccaccgccatcgtgcgcaacccgcgcggcaaggaaaccatgcgccaggccatgacctgcgtaaatcccggcctcgatcgttggaccgtgatggtcaagtgcggcgagcacagcgatctgaagccttgggaggatggctacgcggccgtcaagcgtcagctcggcgaatggaccgtgaccatcgaaggttgggaagacacgtacgtttcttggctgcatgacgcccgtatcaaggtgcgtgtgatggacgacgtggacaacgcgctcaattccggtgccgagctgctggcccgttgggccgcaaccccggacgccggcctgaccgcacgcgatcgcaagaccttggagaaggccgctgagaccatggccgatcagacgctgagcgccgaggatcgcctcgccgccggcgacaaccctaccatcgccgccctgcacgagactcacccgctgcgcgatggcatctcccccagccagccccagcgtttcaaggtggaacgcccgaagtccagcttcgcggcttggtaccagttcttcccacgttccgaaggcgccaccatcgatccgaacaccggcaagatcattcagggtacgctgaagacctcgatggccggcctcgaacgcgccgctgccgaaggcttcgacatcgtctatctgccgccggtcttcccgattggcgtgaccaaccgcaagggccgcaacaacacgctggtcgccggccccgatgacccgggctcgccgttcggcatcggctccgagctgggcggccacgacaccgtggatccgctgctcggcaccatggacgatttcaaggccctgtgccagcgtgcacatgaactgggtctggaaatcgcgcttgatttcgcactgcagtgctcgcccgatcacccgtgggtcaaggcccacccgaactggttccgtcacaagccagacggctccatcgccttcgccgagaacccgccgaagaagtatcaggacatctacccgatcgacttcaacgccgacatgcccggcatcgaaaaagaagtcgaacgcatcatgaatctgtggatcgaggcgggcgtcaccatcttccgcatcgataacccgcacaccaagccggtgcgtttctggcaggacgtgattgccgccgtgaccaagaagcacccggagatcctgttcctggctgaggcattcacccgcccgggcatgatgcgtgccctgagctacgtgggcttcacccagtcccactgctacttcccgtggcgcaacaccaaggacgaactggaagagtatctgccgatcaccaatggcgacgacggctactaccagcacaacaccttctggcccaccacgccggatattctcaccgcttacgtgcgagacaacggtgtagccggccactgcgtgcgtgcggtgctggcagccatgggctcgccgtcctggggtatctacaacggttacgaactcatcgagaacaagcagcgccccggcttcgaagagcagatcgacaacgagaagtacgaggtcaaggttcgcgattggagcaaggccaagcagtacggcgtggccgagatgctcaccgcgctcaacaagattcgtcgcgcccacccggccgcgttgagctaccacaacctcaccgtgctgcctacgtccgaccagaatattctggctttcgcacgccacacgccggccgaactgaccggtaccggccaagcggacacgctgattgtggtcgtgaacctcgatggacacaacgcacaccagtcgatgattcacctggaactcggcgagctgggtctgcccaccgaccgcccgctcaacgtgcgcgacgagctgaccggccgcgaattccagtggggttgggacaactacgtgtctctggcgccttgggcggatgtggcccacatcctgtccgtgcagtgatgcggtagtgcaacggtaatgcaacagcgatgccgttgacgtgcatgggtttatcgtgtgcgtaaaccgctagaaatcctccccttgaggggaggatttcgtctgtttagacatagtgtcggcataatctcagcacggtttcttgagttccgcacctgttttgcaggcgcaaacagggtattgtggtgagacgataacgtaactgtcgattttcaaggagaaatgacatggcagaaaccttcaacgtcgttgtggaaattccgcgcggctccaagaacaagtacgaagtcgatcacgagaccggtcgcgtcttcctggaccgtaccctgttcaccgcaatgggttacccggatgactacggctacatcgacggcaccctgggcgaggacggcgatccgctggacgctctcgtgatgattccgaactccgtgttcccgggctgcgtggtcgagtgccgcgccgtgggcctgtaccacatggtcgacgaggccggcggcgacgacaaggtgctgtgcgtgcccgccgacgttcgtttcgatgacatcaaggacatcgacgacgtcaacgagtaccacaaggccgaaatcaagcacttcttcgagcagtacaaggctctggagccgggcaaggaagtcctgccgggcgactactggaccggtgctgacgccgccgagaaggaaatcatcgcggcacgcgaacgcctcgccaacgaaggcaagtgattcgattccgaatcgtcggcgggagacctctccggaggcctcccgcctttttgattcgacgtgcatcgcgtgatatagtgctggtgtatttttcagctaggcgtaggcggcgtgtaggaacgctggtcgaggcccatcgcacggtaatccggcgatgaaccttctgtcgcaccatgattccgataatcattcaaatcctgcttatttctgtttccgtagctatggatgcattcgccgtatccattggcaaaggtctggccgtatcccgcgtacgagtgcaagacgccgcgaaaagcgccctctggctcggcggattccagatgctgttccccattctcggctatttcgcggcatctacattcagcaaatacgtaacccgattcgatcattggatcatcttcgccctgttggtgttcatcggcggcaacatggttcacgaagccttcgaagaagatgaggaaaactccaaggagaccgcccagttcgattggaagcatatgcttcccctggccgtggcctgcagcatcgatgcgttcgccgtgggcgtgagcctgaccttcatgttcaccaaagcccatatggcattcgccatcctcagcatcggtgtggtcaccggactgttctccgctgcgggcctgtacattggccgcgcgttcggctcccgctggcaggagccggcgcagatcgccggcggcgtggtgctgattctacttggcgtcaaagtgctgttggagcatttgggcgttatcgcgttctgatttagtgtcataagccccttcaccagaaagggctattttgtttgatttcaccgttccaatgcccgacgtaggattgggatggaaattcgattatctgagaggcgtatcatgaccgagatcacccaggagggttggaagaacaaagccctgagcatgttgttggcccaactgacgtcctatgtactgctcatcgcagccacggtcattccctcccctggcaccgtccccatcatccctttgattatcgccgctctgacgttggccgcatttgtcgtgttctggccgttccgcggcagcatgctggatcgtatcgtcactttggtgtttggcgcgatttctctgattttcgtcatcgtacctttcccgaccggcaaggttccgccggatcagaccgctgcggatggctcggtacttccttggtattcatgggcactggccatgggcctgctgctggtggtgctggtggtcttctccttcgggcgccagatggctcgtgagaagcgcgaacatctcatccgcgccctgtcccacgccgtgacttcaggtgtggcggctctcgccgtggccggctggtgcttcctgcctgatttgggcgcgatgctcgccaagggcaccgttgcgggaaccgttgccctgatcatcctcatcgttttgggactggccttggccgtggcctccacgttgtgggtgcgtgacgccgatccggacccggatatccgctatccgtggatcggtaccggcctgatgccggtaatgctgatgggcgtgaccatcgccgcaaccgcactggtgctcggccgtgtcatcggttgatggacgtctgccgttccatattccgcaaacttgtaacccatgtgtccactacaagcgcgtagaataatgaaaaaccgcgcgaaagcggcataacgccgctgacgactcgtacagccacaccaagcaattgcgtaacacattgcaggataaagggggattagcgtgacggatcttacgttgatgactttcgccagcgaccccgccaccgttttgccatcactcgccctgctttctcatcgcgtccgcgtgctgccgatggatgcagccagcttggtgaagatgccggagaacaccattctgtttctggatgcacgcgatgatctggcgaccgccaaaaccttgtgccgtctcatccacgcctccggcctgtccacgccaatcgtgctggtgctgaccgaaggcggcttcaccgtggtcaactcccagtggggcattgcggatgtggtggtcgccaccgcttccccggctgaagtcgagggccgattgcgattggtctccgagcgcggcaacgctcccgcagccgcagcagccggttctcccgccgaatccaccaccacggtggaagatggccagattcgctccggcgacctcattgtggacaccaacggctataccgcctccctgcatggacgccccatcgatctggcatacaaggagttcgaactcctcaagtacttggtccagcaccccggccgcgtgttcacgcgcgcccagttgctgcaggaagtatggggctacgactactacggtggcactcgtacggtcgacgtgcatatccgtcgtctgcgcgccaagcttggcggcgaatacgaacacctcatcggcaccgtgcgcaacgtgggctaccgattcgacccgccggagacggataaggaaactgccgccgcacagcaggccgccaaagcatcctctgccgccatcggcaccgatgacgatacccccgatctcaacaccgccgcctgacagaccagcagcgctacaaaccatcaatcatcgacattacgccgcttaggtccatacgatgagagaaaccaaatccgcgcgtctcacgcgcatgcatgacgaatacgacattctgcgccaggtgattccggcacccgcttgcgcactgcatttctcgaatccgctcgaattgctgatcgccaccgtgctcagcgcccagaccaccgacaagcgtgtcaacacggtcaccccggaactgttcgccacctaccccaccgcccgtgacttggcggccgcgaacccggcccaagtcgaagacatcattcatccgctggggttctaccgttcgaaaacccagcatctcatcggactggccacggcactggacgaacggttcggcggcgtggtgccgcgcacgatggatgaactgaccagcttgccgggggtcggccgcaaaaccgcgaacgtcgtgctcggcaacgcgttcgatatccccggattcccggtcgatacgcatgtgatgcgcgtaaccggacgactgcgttggcggtcggattggcggtccgcacaccctgatcccgtgaaaatcgagaaggaaatcaccgcctgttttccgcccgaagagtggacgaatctcagccaccgactgattctgttcggccgggccacctgccacgcacgtacccccgactgcgccaactgcccgctgtccgacacctgccctagctatgcgccgcccgccggcaagagcacgtccaagcgctaactcatacctcatcatggtgaattgcggattctaggctgaatccaccgctagactgaaaaccatgcagcacagcaagcggaacaatacatggtccaagtgggggatttttctcggagtcgccgtggcactcggcgcactcgtggttgcgggatggacgttcatgcaaaaccggttccagccgggatcatccctcgatgccgatgtgaccattggcatcgacgatatgccgcaatccttggatattcggtccgattcctctgcggcagccgagcgcctgctcgtcgacaatgtgtatgagacattagtgaccgtcgatcaagacaacaagattcagccgggactggcgacaagctggaagacttccgatgacggactgaccgtcaccctgacactgcaatcgggcgtcaccttctcgaacggtcatacgttggacgcctcggacgccgtgtggtcgttgcaacagaacgtgaccaacaaggtggcggacgtcgacgaattgggcgatctgacgtcggtcgccaatccgaacgccaccacggtggtcattacgcttgccaagcccaatccgacgctgctgcgagcgctgtccggcaaactcggcattgtctacgattccgagtcgtccagtgccgattatcaacgcaaggccataggttccggaccattcaccgtggccgatttccagcctggccattccctgaagctggcgcgcagcgatacctaccatggcaccaaagcggccagcaatatcgttgaatttatgcaatactccgacgccgatgcgctcagcaaggccctgaccgacggcagtctcgatatggcggcaccggtttcggcttcgacggccaccggtttgaacggcaaggatggcctgaccgtcaaggagggggccactacggataaggtgatgctggcctacaacaacggcatcgattcgctgctctccgacgaacaggcgcgtaaagccttccgctatcaaatcgacgcagccggcatcgcctccgcccaacccgacgcagccggagcattgggcggccccatcagcccgctggaacccggatacgaagatttgaccggactgtatccgcatgacgaaaaccaagctgggcagatgttctcctacttcggtgcgcaatatctgactacggtgaatctggtggttcccgaagaataccggtcgttggccgaaaccatcaagcagcagatcgagcggcagccgcgccccacggtgaaccttgaagtgctctccgatgaggattatgccaaacgaatcaaggacggcaaatgggaactgaccgtgatgagcatggacggcacggatgatgccggcatattcgccgaccccgattccatgttccattacgaccataccgaagcgcaacaggcctatgcggatgctcgcgccgccactaatgacgccgattatgaggcacgaatgaaggcgtacgcccggctgatcagcgaggatgcggccagtgattggctgtatacccgcaaatgcttcactgtggcgtccaccaaggtctccggctacccgacctcgatgatcaatcgtcgcatgccgctggccgggttgacggtgaagtaggcaaccttcagtcacggacgggctacgcccgatagtccttggctcactatcgttcgatcgttcgtatctcgcctgcgaacagcctactgggctgtttactgtacagttcggcttgtcatgcaacgtgcataaactttggctttatgactgaaggcaaatccatcatcaacgccaacctcaccccgctgcccgacaaggtcggtgtggacggacttgaggacaagtggcgcgccgtctgggatgaagacggcacctacaaattccgcaatacccgcgaccgcaaggccgtctactccatcgacaccccgccgcccaccgtctccggttcgctgcacgtgggtcacgtgttctcctacacgcacaccgatgtgattgcgcgttacaagcgcatgcgcggctacgacgtgttctacccgatgggctgggacgacaacggcctgcccaccgagcgccgcgtgcagaactactacggcgtgcgcgtggacgtgtccctcccctacgacccggacttcaagccgccgttcgagggcaccgatggcaagaagatcgacgccaaggatcaggtgccgatttcccgcaagaacttcatcgagctgtgcgagcgtctgactgctcaggatgagaagctgttcgaggccctgtggcgcaagctgggcctgtccatcgactggtcgcagacctaccacaccatcggccagcacccgcggcgcgtggctcagaaggccttcctgcgcaaccttgcccgcggcgaggcctaccagcaggacgcccccggcctgtgggacgtgaccttccagaccgc

SEQ ID NO: 915 - DNA, 23231 bp, Unknown
  R117_24m  MAG No. k141_3560
gacgcagtgtgaggttgagggcgttattgatgtgcccatggggcggttacaggctcatcgggcggtaacttgcccatggggcggtttgaagaatatgtgaaaccgcggaattaagccattttggcataccgccccatgagggttttaccgccccatggggcaattaccgccccatgggggatttcccgccccatgaggtatggcgttttacttgtgatatggctcgccagcgttgatcttataagcgcgatagatctgctccagcagaatcacgcgcatgagctgatgcgggaacgtcatcttcgagaaactcagcagaaaatcagcacgacgcagaatcgcgtcgtcaaggccgattgagccgccgatgaccagctgaatatggctggtgccacgcaatccaaggtcgttgattttggcggccaattcttcgctagacagctgcttgccattgatggcaagggcaataacaaacgcgccgtccttcagatgcttggcgatgcgttcgccttctttggccttgatctgtcggtcaacgccttcggaggcgtggtcaggcgttttctcatctgccacttcaatgatgttgagcctgcagtagcgcgaaagtcgcttggaatactcgtcgatggcgtcgcgaagatattgttccttcacgcgtcccggcgcaataatgtcgatttgcataaaaagcccatcacattggctcccctctctgaggggagccaggaaaatcagtcaattacgccatagagacggtcgccggcatcgcccaaccccggcacgatgtagcacttgtcgttgagcttctcgtcgaccgcgcacactacgaccttgaagtcgatggacggatcgatgtgctcttccacgaacttgatgccttcaggcgccgcgatgatgttgatcgcggtcacgtccttggcaccgcgctcggccagatagtgcgtggcagcaaccagcgtgccaccggtggcgagcatcgggtcgatcaggaagcactgacgaccggacaggtcctccggtagacggttcgcataggtgacctgctgagtggggtgttcctcgtcgcgcttcataccaaggaagccgacttcggcggtcggcataagacgggtcatgccatcgagcatacccagacctgcacgcagcaccggcacaatgatcggacgcggtttggccagcttcttaccggtcatcggagcgaccggtgtttcgattggtgcggcaactacggacaggttgcgggtggcctcataggcctcgagcatcacaagctccgagacgagctcgcggaaagtggaggaaggagtgttcttgtcgcgcagcacggtgagcttgtgctcgaccagcggatgattcaaaacgtgaagttccatactctccagcctacccgtagttcgcggggaagtcacttgggcggcagtcgcgcgcgtatcgcacaccaatgtaaacagcgttcgacggcgggccgcgtaacaccgttgattttgtaacgtgagcgttatgtatgagacgcatatgaaatattcaggcaacggaaattcacgcaggcactgccatcgtatagtgcagtcggccggaagccagccgtcgatatccggcaagtggttcagcacgatatcaggcatcagggcacggtacggcaatcagcgtagacattccgcgggcgggcaacgttcgcggaatgtagtcgtatgtggggaggaagagccatatgactcgattgcaaagactgaagatgggtgctgcggtgtgcattgttgccgcagtgcttgccaccagcggttgtggctggggtcgcaccgtggccgagaaagaggcccaagagaacaacgcgactgcggcaagcgacacctcatcatgtgtggacacctcaggcaacaccatcaaaatcggtttcgtgaattcgctgtctggcacgatggccatttccgaacagacggtgagtgattcgctgcacatggccgttgatgagattaacgcaaagggcggcgtgctgggcaagcagctcaaggtagtgcagcaggacggcaagtccgagccggctgtgttcgccgaaaaagccaagaccctcatcgaaaaggaatgcgtggccgcggtgttcggcggctggacgtcctcttcgcgtaaggccatgctgcctgtgttcgaggcggataacgcgctgctgttctacccgctgcaatacgagggcatggaagccagcccgaacatcttctactcgggtgctgcaccgaaccagcagattgtgcctgcgcttgattaccttaaggagcaaggctacaagaagctgttcttggttggctccgattatgtgttcccgcagaccgcaaatcgcgtggtcaaggcgtacgccgagggcaatggcatggaagtggtcggcgaggaatataccccaatgggctccaccgacttcaccaccatcgtcaacaagctcaagttctccggcgcggatgcggtggtgaacacgctgaacggtgattccaacgtcgcattcttcaaggaatacaaggcttccggcctgaaagccgccaccacgccggtgatttccatgtctatcgccgaggaagaggtttccgctatcggcgttgacaacgtcaaggaccagctcactgcttggaactactaccagacgctgaacaatgcgcaaaacaagacgttcgtgaagaacttcaaggcgcgctacggagccaatcgccccacctccgacccgatggaatcggcgtacacatctgtgtacctgtggaagggcatggtcgagaaggccaagtcgttcgatgtggacaaggtcaaggctgcagcagacggtgtcaccttcaatgcaccggaaggcaaggtcaaggtggacggcgaaaaccaccacatctacaagacctcatacatcggcaagatcggctcagacaagctcatccacaccgtctggaagtcggacggtcccatcaagccggacccgtacctgaagacctacagctgggccaagagcctgagcgccagcgtcgagagcaactgagagaagaggacacaacaacatgggtatgttatttccacaaattgtggcaggtctgtccaacggatcgattctgctgctcgcagccctcgggttgtcgttgaccttcggccagatgggcgttatcaacaacgcccacggcgaattcatgatggccggcgcatacaccgcatacgtcatgagcatggtcatcggcaataaaacagtgtccctggccgtggcgctggtggtcggtttcgtagtagccggtttgcttggtttactgctggacgtgttgctgctggagcgtatgcgcaatcgtccgcttgatacgctgctggttaccttcggtgtatcgctggtattgcagcagctcgcacgcgatattttcggtgccactccggtctacgcttcggctcctgaagcgctgaccaatccggtgaccatctttggctacagcttctctgcaggccgactgttcatctttattctgtcgattatctgcgtggctgcgctgtacgcgatcctgaagctcacgccgctgggtcgccagattcgcgccacttccgagaaccgcgacctcgctgaggtttccggcatctccaccaagatggtcgaccatgtgacgttcttcctgggctccggcatcgccggtatcgctggcgtggcgctgagcctgctgaactcgattagcttcaacttcggtacgaccttcatcgtgcaggccttcctggttgttgtggccggcggcgttggccagctcaagggcgcggttatcgcctcgttcgtgctgggcttgtgccagtcgtccatcgaactgccgacctctgcctcgattggtcaggttgccgtgttcctgattgtggtggtgttcctgcagttcaggccgcagggcttggtctccatccgctccaggaacctcgcgtgagtgcttcagaagggtaaggaaacgacaatgaagatgactttgagcgaatacgccacgaaatataaggctttgatcggtgtggtcattgccgtggcgctgatcttcctttctccgactgtgctgagcgtgtacaacctcggcctgctgtccaaatacctgtgctacgcgatggtcgcggtcggcatcggcctggcttggggccaaggcggtatgctgacgctgggccaaggcctgttctttggtctcggcgcgtacgtgatggctatccacatgaagcttgaggacattggcgtgggccaagtgccggacttcatgtcccagtacggcatcaccaaggttcctggattctgggaactcttccgcaatccggtcatcgccgtgattggcgtggctgcggtaccgggcattatcgccgcaatcctcggtctggctgtgttcggccgtggcgtgcgtggcgcctacttcgcaattctttcgcaggcgctggttgccgcgttcgccgtgctgcttatcggccagtcgaaaaccaccggtggcaccaacggtctcaacgatttcaagggattctttggttacgacttgactgataacgccaacaagcagatgatcttctacatctgcgcgttcctgacgctggccatggtgcttatcgtctactggattcgcaaatcgtttatgggcgacctgattatcggcgtgcgcgaccaagagaaccgcatgaagttcttgggctataaccccgcctccatcaaggtgttcgccttctcggtggctgcaatgttcgccggcattggtggcgcaatgttcgtgccagtggtcggcatcatttcgccgtccgatatcggcgtgacgccgtccatcctgatgctcgccggcgtggtgatcggcggacgtgccactttgctcggcccggtggtcggcacgctgctggtgcgctttgcggaaacgcagctgtctgaggcgtatccgtccgcgtggacgtacatcgaaggcctgatcttcattctggtgattgcctttgtgccgaagggcttgggacagttcaagggcgtatggccttggattaaggagaagatcgggctcggaaagagttcggttggagcttcggctggtgctggtgctggtgccggtactgctactgcaaaggcggtgaacgcatgagtgaggagaagaacatgagctcgaatccatcggctcccgcacctgcatcgcaggccgatttggagcagttgcgcgccgaaatgattgagatgcgcgacgaagccaagcgtatgcgcgacgaagcggcccagatgaaggccgaaatcgttgaagagcgtacgaagctgcacgatcagcttgcggtgctggatgatcgcggcggccagtggagcgattatctggaagttcgtggactgcacgttgagttcgatggattcgtggccgtcaagaatcttgatttgactgtgcagcacggcgatttgcgattcctgatcggcccgaacggtgctggtaaaacgaccatcatcgacgcgattaccggactggtgccggccactggttccgcggaattccgtggcgagcagctgttgggccgcaagccgaacgacatcgtcaagctgggcgtcgggcgtaccttccagaccgcatcggtggttgaagagctgtccgtgttggagaatctgcagctggccgagggcttccgcaagaagggtcgtgagctgttccagccgatgggcggcgtttcgcagaacatcgaatacatgatggacgtgtgcaatctgactgtggatgcaaacaagcccgcaggcatcctgccgcacggcaagaaacagtggctggaaatcggtatgctgctcgtgcaggacgcgcacctgctgctgctcgacgagccggtggccggcatgactccggccgagcgtgtgcagaccggtgagctgctcaagcgatgcagcaagaaccgcacggtcatcatcgtggaacacgacatggatttcatgcgtcagttcgccgattcggtcacggtgctcaaccagggcgaaatccttgccgagggttcggtcgaagacatccaaaacaacgaagaagtagtccgcatctacctgggcggcggagaaaactaactccctgtctcccctccctgaggccgaggcgttaagcaaacagcccggtgggctgtttgtagccgaaggcgagacgatagtcgaaccagcaggttgcaggcaaggcccgtccttaattgcggacgagctgtcaccgaaggtgactgaggggagtgggtaagaggaagaagcgcaatatggaccgcactgacaacaaccatcgcatcccggaatgcgctttttcagtgcatattgagggtgatacaacgcgcctcaacatcaatatgcacgacgccgtagaaagtgaataatcatggcaatgcttgaagtaaaggatttgaacaccggttacggcaaagtgaccgtcgtcaacgacatcagtttcgacgtggccgccggcgaatgggtgagcatcgtcggcaacaacggtgccggtaagaccacgctgttgaaggcgattctgggcttgctgcccgtttcgtccggttcgattagtttcgagggcaaggacattaccaaggctgcaccgaaccaacgcatccgcaagggcatggcgttcgtgccgcagggccagcagtcctttggcaccatgaccgtggacgaaaacctgcacgtggtcgccgaccgctacggttcagaggccaaggcccgttacgacgaagccgtggaaatgttcccggtcttgaaggaatttgctggccgacgtgccggtctgctgtccggtggccagcgtcagcagctttcgattgcccgcgcgctgatcacccgccccaagctcatgattctcgatgagccgaccgaaggcatccagcccaatatcgtcgccgaaatccagaaggccattcgcatgatggccgaagacaagggtatcggtgtggtcttggttgagcagaaggtccaattcgccgtcgagcgcgccgaccgctactacgtcctggcctccggccgtttcatcgccaccggcgaaggcggccccgaccaagtagaagccgccaaggaatccatgagagtgtgattaattcgacccccgtttatggccatagagcgttatgagaaacgtcccgttcttataacgctcttattattgggcgatgttagggctcacattggtgtgcctgaaaaactccagtcaacaacagaggatgttatgagacttacaccacgagagactgacaagttgatgctgtacttggcggggcagcttgccaaagaccgcaaagccagaggcgtgaagctcaactatgtggaggcgattgcgttgatttccgccgaatgcgttgagcgggcgcgtgagggaagcactgtggcggagctcatggcatacggtcgcacgctgctcaagcctgaagatgtgatggatggcgtggccgagatgctggaagtggtggaggtcgaggccacgttcccggacggcaccaagctcgtctctattcataaccccatcgaatccaccgagaagttggtgccgggggaatatctgctggctgacgatgatttggaactcaatgaaggttccgaagacatcgagctggacgtggtgaacactgcggatcgaccgattcagattggttcgcacttccacttctttgaagttaataagtacctgaagttcgaccgtaaggcggcgtatggcaagcggttggatatcgcggctggtacggctgtgaggttcgagccgggtgaaacgcatcgagtgcggttgattgatattggtggcacgcgtgagattcacggcttcagcgcactggttgaggggaagttggatgaccctgaggtgcgggaggccgcgtttaagaaggcgcatgagcttggattctcgggaatctgagctaagggccaccctcagtcagcttcgctgacagctcccgccagcggggagcggactacctctcagtctcgcttcgcgagccagctcccctgacaaggggagctgaaaaacagcaaggacttttgacatgaagattattacgcgcaaggattatgcgggaatgttcgggccgaccacgggagaccgcgtgcgactcggtgacacgaacctcattatcgaggtggaaaaggactacacgcactacggtgatgaactgaagttcggtggaggcaaatcattccgcgacggcatgggccaaagctccgtgcagctcgacgttgaatcgccggataccatcatcaccaacgccctcatcgtggactacaccggcatctacaaggcggacatcggcatcaaagacggcaaaatcagcgccatcggcaaggccggcagcccgcagaccatgagcggtatcacccccggtctcgaagcgggctccggcactgaagctctcgccggcgaaggcctcatcgtcaccgcaggcggactcgacacccacatccacttcatctccccgcagcagattcgcactgccctcgccggtggcgtgaccacgatggtcggcggcggcaccggtccggccgacggcaccaacgccaccacctgcaacccgggagccttccacctgacccgcatgatcgaggccgccgaagcgctgcccatcaacatcgcctaccttggcaagggcaacgactccagccccgaaccgttgcgtgagcagattcgcgccggtgccgcaggtctgaagatccacgaggactggggtgccaccccggccgtcatcgacactgcactcggcgtggccgacgaaaccgacacgcaggtggctatccacaccgatactctgaacgaaggcggttgtgtggaagacaccatcgccgcgttcaagggccgcaccatccacacctaccacaccgaaggcgctggaggcggccacgctccggacatcattcgtgccgctggcttcccaaacgtgctgccgagttccacgaacccgaccatgccgttcacgcgcaacaccatcgacgagcatctcgacatgatgatggtctgccaccacctcgaccgcaatgtgcccgaagacatctctttcgccgactcgcgcatccgccccgagaccatcggtgccgaagacgtgctacacgacatgggcatcatctccatgatgagctccgactcgcaggccatgggccgcgtgggcgaggtcatcacccgcaccatccagaccgccgacaaaatgaagaagcagcgcggtccgctccccgaagacgaacacgacaacaaccgcaacgacaacttccgtgtcaagcgctacgtctccaagttcaccatcaacccggccatcacccacggcatttccgaatacgtgggctccatcgaagtcggtaagatggcggatctcgtgctttggcagccgtccatgttcggcgcgaagccggaaatggtcatcaagggtggctccatcgcctactctcgtatgggtgacgcgaatgcttctatcccgaccccggaacctgtctactaccgcgatatgttcggcgcgctcggccgtgcgcttggcaagtcctgcgccacgtttgtttcgcaggccgccgtggatgacgatatcaagggcaagctggagctgcagcgccaggtgttaccagtgcatggctgccgcacggtaggcaagaaggatctgaagttcaacgacgtgctcgccgacattcaggtcaatcccgaaaccttccaagtgacggtggacggcgaaccggtccactctgacccggcgtacgagttgccgcttacccagcggtacttcctgttctgagagaactggtggctctcctcaaaggggagagccacttggttttagccttcggccacgaaatcggtcacgaaatcggccacatctcgaatgaggtcgaaggcgtcgtcgcctcgggtggtcagtacacgcaagcagatgccattgattacgcggctcacgccgagctcgccggtgaagccgatggcgtctgcgtgttcatggatgcgagtgatgagcgcgtcttcggcggcgatgcgggcagtctcgatgcgctcgcggatggcggcggaggatgcttctttagttgcggcatcttgtacagtgtcgctagggtcgagttcgggcaggtgagcgtagagaacgccgcagtgggtgaattcgcgccacatgccgagttcggtgtagtcaaaagcatcaggttccaacagcatgcggtcagcaaaggccagatgttcgcgcggttgggcagcggcggcttccgccttggaaggccggcctcggcgatgtgcgtgctgttgcgccaattcggctgcggcggccttggtcacggcttcgggttcggccacatatacgcgcatacgattcgtaaaacgtttcatggcccaacgctcatccatcccaacgcggccacatgtcgccacatccgcatacacgaatgctgactcggcggaaatatgcgcggtggtcaggttcatgaatgagctgttcttgaacggaatcactgggaacggcaggaacacggctttggcattgccacgcgccctgagttcgatggtgcgttcggccgagccgtccgcggtgtcgaacaccttctcgtagctttgcgttttgatggtcgaatcggtgcctgggccgaagtcgatatcgatatgggcttcatcgcccctcaggaagccaggggaggcgagcatcacgacgaaatccgaatgacgtccgttggtgaacggggtcatcagtttgaacggcgcctcgaaataaatatcgtcgattttggtacgtccgtggcggaatgcagtggatagacgaaaagtgctactgcccatggacgaatcgctgccttcttatgattggtgcctgacgatgacatgggcaattatgccgcacttggtgcaacggtatgtttcggcccgtccgtttttggatacgggcgggccaaaacatcacatgtcctcgaacagcacgctcttcttgatccatgcgatgacgtcgtccactccggcaccgcccatcaggtcggtgaagatgaacgggcggtcgccgcgcatcttcttggagtcgcgggccatcacgtctagatcggcgtgaaccaacggggccaggtcggccttgttgatcaccagcaggtcggagcgggtgacgccggggccgcccttgcgtgggatcttgtcgccctcatcggtggcgatgacgtagattgtggcgtcggccaggtccgggctgaacgtggcggacagattgtcgccgccggactccacgaacatgatctgcacgtccgggtgggtgcgggccatttcctcacaggcctcgaggttcatcgagcagtcctcgcggatggcggtgtgggggcagccaccggtctccacgccgacgatacggtccggcgcgaggcgtgagtgctcgataaggaactcggcgtcttccttggtgtagatatcgttggtgaccacgcagatgctgtattcgtcagccatcttgcgggtcaggcgttcgataagcgcggttttgccggaaccgaccggtccggcgacgccgatgcgtacgtatgacatggggtttctcctttatgtgggaattagttaggtatgtggtttgcgggtgaggttatcctggctcccctccttgaggggagccaggataattagctcatgtagagcctcgagtacaagatttcatgctgcatggcggcgatgtcgaggtaagctccggagatgccgagatcctcgggcttcaacgtcatcgcgatattcaccgcgcgcacgaggcgcgggaacgaatcatgcagggcgacttggccagcgtactggctgagcggaatcgccttcgcggcgcacatggtaagcgcgctcaacagcgaatatccatacatgatggccgcgtcgcgcacgtcgttcgcatggtcagccgcgtacaggcccatcgcgatcgaatgcaggccacggcagcggcgctcgtgaatcagcccggcatacaggtcgagcgacggcgagccgtacaggccgtcggcggcatcgtgcagctggtggcgttcggtgtgatgctcgtgcacggcgatgatgctgttttcgcgcgaatccgcagcggatgcggtggcattgtcggcaggacttggcttggcgaacccacgatgcccatccgaggtctgcgcctggccggcatccatctgctcggccagcttgaccaggcgggtacacatgcgctcgctgccttcacggatttcacgtgcggattgcagggccgaggccagctcgtcaagttcgatgagtcgctcggccagccctttgcgggagactcgcgaatcggtggcgtacttgccggccagcaccatctgcccgatttccttgtacggtgcgacttcgaggtagttcttcatatactcctcgaaatcggcgccacggcgcaagaagtcgcgctgtacgaaggtctccatgccgttggacagcgcgaacgcgcccacggggaagacgctgtcgcacacctgcagcatggccagacgtcgcgattcggtttcgttgatgttcatggggctatcagtgggtgtgccaggtgcggccgccgtcgtggctgtgggagccgtccgggcggtgcagcacgccgttcatctcatattcgccgggctcaccctcacctgcgtcgtgtgtatgcacatccagatggccggcggcctcctcggccgggaattccttgtcggcctcggcttcctgctcctcctcggccacgtcgcccgtggtcttgttggtgcccggaatcagtgtgccggtgccggcgtgggccttgacgatcaggaagccgtcaaacccaccctcgatgatatgcggttcataaccgatcttcttcgtgtattccatggtcggatggtcgtacggcaccagcacgcggtcgttctcgaccttgagactcaggtggcggttgcccagttcgaagcacaggcgtcccatttccttcatcgagttaaccggaatctcaatcagctgtgcggttttaatgcgtgcgaaatagcgcttgtcttcggtttcggcgagcacatcgccatccttgatggtcttgccaaccatgatgccgaactcggtgccgtcctcggccaccttgcgcatgcgcttcttatcggtttcgaaccagtcgaaggcaatcgacacattaagtttgccgtcgctgtactgctgactgatgatgttgccggtgatttctttggcgatcatccgttctccttggagaaaattgcttgtggcgtgagaatccccacgtccttcatgccacagtgtagagagcctgttgcgtcactttgtaacgaatgatcgaaatatgcaaaaaatatagcggaaaaatatccgaaaacacggaaaccggatatatggtacacggtgtgtcgctagtaattgcaagctattttgcatggttgtgcattagacgaatcacagttgtggtattacatatcacgttcctggagcgggaggttgtggtcgagctccgaaatcaacaaaaagagggaagttggatataatcgaagtacctgacaccgtcacattggcgatgcacattccggataatttcatttcgccgtccaccggggcgttgttctacgtcatcatgattccggtgtgggtgctgtgcctacgctacgtgatccgcaacagcacgccggagaagatggcctacctgggcgccggcgcggcgttctcgttcctcatcatgatgttcaacgtgcccacgcccggcggcaccaccgcgcacggtgtcggcggcgcgctgatcgctctgctgctcggtccccagtacgcgacggtcgccgtgtcggtggccctgctgctgcaggcgctgctcttcggcgacggcggcctgatcacgctcggcgccaactgcttcaacatggcgttcgtgctgccgtttgtggcttacggactgtacgtgttgctacgcaaggtgctgcccgacggctggaaggaacgcgtggccgaattcgtgtccggctatatcggcatcacgctcgccgcattctgcgtggcgctggaactcggcgtgcagccgctgctgttcaaagccgctgacggccaggcgctctacttcccgttcacctttaacgtgacgattcccgccatgctgatcccgcacctggccgtagccagcgtggtcgagggtctggtgaccgtggtggttgtcgaattcgtgcgccgcaccgcaccggagattatcgaagacaatgcccgtgtgaacttcgccgagaccgccggtgctgacggcaaacaggtcgcgcacgccggactgcgcaagtctgcgtggattgcgctggccgtggtggcggtgctttccccgatcggcctgctcgccaccggcgacgcctggggcgagtggggcgccgaggacttcatgagtgccacggggctcaactacgtgccgcagtacatcgcccatggcttctcgtgggatgcgctgttgcctgactactcgctgcagggtctgccggacatcgccggctacattctctccgcagtgattggcatcgccgtgctcactatcgtgttccgtctgctggcgctcgcggtgagcggcaacggcaagacatccgcgcgttgacgatacctgcatggatgcgtgagtcggaggattacgatcctccggctgacaagtcatccttcatcgaacacaacctggggcatttcggcagcgtactcgagcaggttggtcatgcgttgccgattgagtcgagcccggtcgacaaggtgctgggctcggtcaatccgggcgtgcggctgctgggcatactggccgcgattgtctgcgtcaacatcacatgcaacatgctgttctcgtacatcatgctggcggtggtgctgctgatgatggcgacccggccggcgcgcctgatgaaggcgttgctcggcccggtgctggccgtatgcatcctgagcctggtcgtggcggtgccgagcctgctgattgggcagtacagtgcgccggtccggctggtggtgcgtgcgttcgtggcggtgtcgctggtgatcgcactggcgcgtacggtgccgtggaatcgcctgattgccggactgcgcgcagttggctaccctgattcggtgatttatatctgcgacgtgacgattcagttcatcgatattctcggtcgttcgatggtggagttgctggatgcgctgcggttgcgcagcgtgggccgcgaccggaccaagctgacgtccgccggccagttgatgggcgcgctgtttctgcgtgcgaatacgcaggcgcggcaaatggctgaatcgatggtgtgccgggggtttgacggtacgtatcatatccaccacgagcgtctgctgacgtggcgcaacggggtgtatgccgtgtgcattgctgcaatgattgcgctggcggtgtattcgggatgagggtggttcgaatgaatggagcccaataatgttcggattaaagcgtaatcataaacaaactgcaaccatgcagccagataactcatggttccgcggcgacccgctggtcgaactgaatcacatcgacttttcctataaagattacggcgacgccgacgatgaaacctcgtcgcacgccgtgctacgtgatttttcgctgaccgtcgaacgcggtgagcgcgtggcgctgctcgggccgaacggcagcggcaagaccacgctgatgcgcatcatcaatgcgctggaatttccggactcaggcgagtatcggtttggcggtactccggtggttcgcgaggaagtcgaggcgaagaacagcctgttcgccaaagcgctgcatcagcgcatcggattcgtgttccaaagctccgacacccagctgttctgcccgtcggtggaagaggagattgcgttcggtccgttgcagatggggttgccggatgccgaagtacagcgcagagtcgatgacatggtgacgttgttcggcttggatcggatgcgggagcgggcgccataccgtctgtctggcggtgaaaaaaagcgtgtggcgattgcctgctgcatgtcgatgaatccggacctgcttgttctggacgaaccgaccgacggcttggacgagcgcaataccgacgtagtggttgaggtattgcgcgccttcactgatgccggcaagactgtactgttctccacgcatcaccacgacatcgtggagcggctcgacgctcgcatcgtgcgcgtgcatccgtcactatggcaatgacattcacgtggcgtctattggatatcttcatcgaaaaaagcagaaaggcatcggcgaggatcgcgagtccggcgagaactgcgatagtcgctttggtgatggttgccttcatgagagtttccccaaggtgttgacgttgatttcatgagattcgaaaaagagcgtatctaggccgaaccggacagtaagtcaacggtttctggaaaccagctgaaaaagctacggtattgtgaaatatgtctcatcggaatgggtcaagtttggcctagcgctcgcagtcgtgcgcgaagattcgttggattgattctcggtggattaagtcataggaagaaactagacaccttgcggtgtaaaaccgggaatcggaatggtgtaaaaccgggaatggaaatagtgtaaaaccgggaatgagaaaggtgtaaaatctatattgaggtgattgggtagctgagaaaggccggaaaatgaacgatttgaacaatcgtagtgataccttgactcaacctgattatcgtgctcgcgtggtcgatggcaggttaggtaagttacttaaagcattcggcgcggtggaaatcgtcgggccaaaatggtgtggaaagacatggacggcgctttcccgctcgcgaagtatggatcgtctggatgatgccgctacctttgcggccgcacagactgatccggcattggtactcatgggtaatgaaccgcatttggtggatgagtggcaagatgtgccgcaaatttgggatgccgctcgtcgtcatgtggatgacaatgcgaatcgcaaggggcagctgattcttacgggctcggccattccgaaggaccgagaaacaattcaccacagtggcacaggtcgaatttctcgcttgcgtatgtggcctatgagtctgtgcgagtcagggcaatctaccggtgtagtgagcttgtctggtttgtttgatggacaattcgagcctgccgaatgtgcaaccaacattgaagatattgccagatggtgctgtcgaggtgggtggcccgcaaatcttgatttggatgacgagtttgctctggaaattccgagtgaatatatcaagagtgtgcttgatatcagcgtgcccaagatgaacaagaaccctgaaaccgcgcgtgcactcatgcgtgcgctcgccgtgaacgtatcgcaggcaccaaaatatgcgacgctggctgcggatatggcctatggcgatgagcgccgtgaaccggatacgcagacagtaaagagctatttgggaatgctcaaggacttgtaccttctgacggatttggagggttgggagccgccactccgcgcaaagagtcgtgtgcgaaccaagcccaagcgatatttcgtggatccttcgttgcctgctgcggttttaggtgccgcgccgaatactctgatgcgcgatacacagacgctcggcgatctgtttgaaacgctgtgcattcgtgatttgaatgtatatctgtcggccatgccgggcgcgaacaatcgcatcgcctactaccgcgatgacaaggggcttgaagttgatgtcattatcgagttgtctgacggcaggtggggtgctatcgaaataaaactcagtgaccttaaggtgaacgatgacaatgcggataagctcaaatccttccgcgacaaaatctgtggcaaccccatggcccaagttcgcgaaccagagttcatgatgttccttaccggccgaggtgggaaggcctatcgccgcaatgacggcatactggtcgtgcccatcgcaacattcggggcgtgaatcgggtaaaagaaaagaagcgccgaaccgcgaaagcgcctgtcggcgcaagggccgctcgcggcggcaaaaaatggagcccggggcttaagcacggtccgacgcggatacttagtatagcttgcgatggggctcgccgcgccgggggaggtgtggtgttggctggtagctgattgttggggtgcggttggtgggtctctccctcagtcacgggcatcgcccgtgacagctccctcatcagagggagcctggagcagggctactccaaccgtccgcgacgccagaggttggcaccgtgctggaaatccttggcggtggccatgaggctgccggcggtgtgcataaggcgggcggctttggtgcgcacggccttctcatcggcatccgaggagaaggcgccgttggcctcggcccgggtcaccatgcgccgcgcctccacgcgcaagcccaacgccaccacatcggtaaacgccgccgcacgctcaagcgccacggcaaaatcgcccacaaaagcaccggagagaatcgaatcggccaatcgcacgatgtcatcttcactgggagcctgatccacgccggcgatggcggaggcggtagtggccaccggctcacccaagcgccacagatgcgcgatcgagtcgcgattcgatcgcatccacgtacgcaacatatacagtcgccacagcacaccaggcagcgaatccggctcggcatcgctccatagttcggcgatttcatccacgccgaccgtctccaccaacgtgagcacccgctcaacaaccgccgggtcttcgctatggcgcacacgatccagcaatgcggcagcagacagatgactcatctcgctcaacgcctgcgggtccatgccaccggccaatccatcggccacagccgggtcgagctgagccgggcgcgaggggcgtgaagaacccatgcgagcaggtccgaatgccgctccggccgcacgcaacgagccgaagcccgggcccagactgccggcggcaccattgtgcgcggcatgagccgcggcggcagcggccgaggagttggatgaatcaggaaatgcgggtctagtagacaagcggttgaaccttctgaatatcgatgattttgggaccatgaggcgtcggagtgacgaacagcgccaccgccgtgccggtcggcatgaacggtgtcttggcgatcaggcgtttgcttagagacggcgcaacgcacatgctgcgcaggtgtccgaacataccaccaatcaccggccggtgcatgcatatcgctatgggctgacggcgctcaagtgcgaactcgatttcgctgagtagacactcccatgcggtgtccggcgcagcggcgtatgcatcttcggtgagcggatcgagatgaaccatgtctcgtccggtctgccacgcgaacatttccaacgtctcctggcagcgcacccaaggcgacgtggccagtcgggtcggattgaaacacgccagctcgcggttcagcgcgtatgccgcagccgcgccgcgcggcgtgatcggacggttcgcgtccgaacccttccacagcttgcgcgcttccgctttgccgtggcgcacgataatcaccggcaccgcgtccagtgcaccttcttcgacccgatcaacgaatagcgcgaggatgtccttatcggtggaatggctgagcttcttgcgggcctcggccggcgtcagccacaaaacttcgtcgatttcgccgatgtccgcccgatgcaccgggccaaacgcatgggtacgccgcaggttgtcgatggcgctgatcggcgtggccatccagaactggatatgcttggtatccgccgaccgatccttggtatggcgctgtttgctgccttcttcggacagcgggtactcgatgtcgcccagataggggccaagttccacggacaggcccgattcctcgccgatctcgcgcacggcggcatgccggtgtgattcgtttggatcgaccttgcctttcggccagctccagtcgtcgtatttcgggcgatgcacgacgcacagttcgatgcggttgagtacgttgtccgccgcggccgggctgtcggcctgcgccgggtccggggtgggagccgcgtccgatgcgccgtgtgctgccgtggccttgccgtcagaatccgtggtattcgcgatgatggtgccatcggtggcaatattggatttcgctgatggagacgatgcctgcgtcggctcggcatcatccttccaccggtacagaataccgccggcggcttccacgattcgtctcatactgttcgtacccatctcttgtattgtaggtcacgttggaccgctgctacgtagttttgcgcgctgaacaacgatgcccggcatcctctcgaaagaggagccgggcatcgtaaccaccctcagtcagctcgtgctgacagggagcatcgagtgaaatcagttgtgcgaattggggcggcgctggtgcttgcgaatcaggtattcctgactatcgaccagcgggcggccctcgtcgtccttggtgtgcagcacatatgtgccgtcgggctgcatgtgccagctcatggtggagtcggccatctgcaggtccacgtacttgatgagcccgtcaatctgctccggggcggtgacacgcaccagagcctccacacggcggtcaaggttacggtgcatgaggtcagccgaaccgatgtagacctccgggccggaagccggaccctcgccgatctgcgggccgtccgcattgcagaaggcgtagatgcgggagtgctccaggaagcggccgaggatcgaacgcacgcggatgttctcggacaggccgggaacgccgggcttcagagcgcagatgccgcgttcgacgatgtcgatcttcacgccggcctgagaggcacggtacaaggcgtcgatggtcttctcgtccacgatggagttgaccttgatcttgatccaggcctccttgccggcgcgggcggcgtcctcctcgcggcggatgcgctggattagaccggtgcgcacggtgcgcggggccaccagcagacgatggaagctggactttggcgcgtaaccggagagctggttgaacagacgagtcagatcctggccgaccaccgggtcgcaggtcagcagacccagatcggtgtacagtcgcgcggtcttcgggttgtagttaccggtgcctacgtggcagtagcggcgtagaccgtccgcttcctgacgcacgacctcgatgagcttgcagtgggtcttcaagcccacgatgccgtacaccacgtgcacgccggcgcgttcgagcttgcgggcccacgcgatgttggcgtcctcgtcgaaacgagccttgatttccaccaaagccagcacctgcttgccggcatgagcggcgtcgatcagggcgtcgatgatcggcgagttggagctggtgcggtacagggtctgcttgatggccagcaccttcgggtccgcggcggcctgcgcaaggaaggcctgcacggaagtggagaaggagtcataggggtgatgcagcaggatgtcgcgctcgcggatggcggcgaaaatgtcctgtgcgcgggaggactcgacctcggcgatctgacggttcgtggtcggcacgaacggacggttcttcaggtccgggcggtccacgctgccgagctcaaagagcacggtcaggtccagcgggctgggcagacggtatacctcgtcctggctcacgccgagctggtcggcgagcagctgggagaggaacgggctagtggtgtccgtgatctccagacggatcggcggtccgaagcggcggcgcagcagctccttctccatggcgttgagcaggttctcggcgtcatcctcttccacgtcgatgtcctcgttacgagtcacgcggaaggagcgggcttccttgatgatcatgcccgggaacagggattccagatgcgcggcgatgagcttttccatggcgatgaagccgtaacgctcgtccttggactcctcgtcggtcatgtcgtccaccggcaccaggcgcggcaggttgcccgggatcttgacacgggcgaagtgcgacttgccggaggccgggttctccacaatcacggccaggttgatggaaccgccggaaatgtaggggaacgggtgggccggatccacggcgagcggcgtcaggaccgggaacacctgctggcggtagtagcgcgagagacgctcctgctcggaggaggtgagcttgtcccacgtcagcaggacgatgcgctccttctccaattccggcagaatggtgtcgatcgcgtaatgtgcgtgctcgtcttgcagacggtgtgcggtctcgctgatcgcgcgcagctgctgacgcgggctcaggccggcggcagacggcacggcgatgcccgagtcgatacggcgcttcaggccggcgacgcggaccatgaagaactcgtcaaggttcgaggcgaagatcgcggcgaagttggcgcgctcgagcaggggcatgtcttcgttctccgcgcattcgagcacgcgctggttgaacttgagccagctgagctcgcggtcgaagaaacggtccttgggcagcggtgcctcgccttcctgatcgacgcggcggtcgttgttgtcgttttcggcaatatgctctgcgatttggctgcgcagaattgccttcgagggtgcgtcaaatatctgtgccatagtctatatcgtaagctctggcgtggccggaaaacggctgaacgcgccagaattcaacgggtgttcatgttagttcggtgttggttggttctgagtgtgctagcgtgctcgcgacacgccgtgagcggcggtgaaacgaacgaaaccgaacatcagacgggttcgatgtgaacggttcagctcgttttccgatagccagaaagtgcgattgaacagttgtgataaaaaacgcacaacgactctctgcaggttgcgagaaacgggagtgatgaatagattatgaggtacaagaacaactgaacagagcagagcccacaaatagtgtatggtcacgaggactgttacgttggacgggcattggaaagacttaccgttacgacgatgatgttgtgcagagattctgctccagtagttgaacttgtagaaaaggcccgctccggcgggccttttcgtttgtgtgtacagtggagggcatgacggaaacacagcgtacgccagaggggatgtcgtcgaaaccccgtatcaagccggccgatgccgaagacggccgcccggtctctatctctgcgcgtctcggacgactgcaattccactattccggcaagttccgcgtgctgcagattgccgacattcaggatgggccgaaagtctccaaagacaccatcgccctgattgaggccagccttgatgccacacggcctgatctggtgattttctccggcaaccagatcgccggctacgatccggc

SEQ ID NO: 916 - DNA, 35848 bp, Unknown
  R117_24m  MAG No. k141_3641
atataaaggaggaccatcatggcaacgctcaccgctgacgagattcgttcgcgcgtcgaaaccgattggaaccgcatcgtcaaggtgctggccgaaaaggttgcgctgcagtcgatttccgccaagggcatcaccgccgaacatatgaagcgctccgctgaattcgtggcagacgaactgcgcctcgtgggtgtggatgccaaggtggtccaggcttccaatgccgacggcactccgggcgcatgggaggtcatcggctcgcatatcgtttctccggacgcccccaccgtgctgctctacgcccatcacgacgtgcagcctgttccggacccggccgagtggaacaccgacccgttcgtggccaccgaaatcgacggccgtctttacggccgtggctccgccgatgacggcggcggcatcgccatccactccggtgcgctgaaggctttgggcgacgacctcaacgtcaatatcaaagtgttcatcgaaggcgaagaggagatgggctcgccaagcttcattcccttcatcgaggctcaccgcgacgaattcgccgccgacgtgattatcgtggccgattccggcaactggtcggcggacattccttctttgaccacctcgctgcgcggcaacacctgcgtggacgtgaccgtgcagggccttgagcacccggtgcactccggtcagtacggcggcccgattctcgactccaacacgttggccgccatgctcatcgcttccatgtacgacgagaacggcgatctggccgtgcccggcgtggccgcggaagagccaatcggcggtttgcaacgcgaccttgacgaaaccaccgtgcgcgaggattccggcgtggtggccggttacgagttcgccggcaccggttcgctggcctcacgcctgtggaccaagccgtccgtgaccgtgatcggcttcgacgcccacccggtcgagggatccttcaacgtgatcgccccggagacccgcttccgtctgtcgctgcgcaccgcgcccacccagcgccctgaagaagcgcaggaagcactggctgcattcctcgaatcccacgcgccgttcggtgccaaggtcactgtcgaacgcggcgaaaacggcatgggctgggccatggacccgaccgccgtggccaccaaagacgcgctggaagccatgaccgaggccttcggcgttgagcccatcaacaagggcgagggcggctccattccattcatccccgaactgcagcgcattttccccaacgctcaggtgctggtcaccggccccgaagacccgaaggccaacgcccacagccccaatgagtccatctccctgcccggcctcaagaacaacgtgatcaccgaggctttgctgctggacaagctcggcaagtaaccgaaccgcatcggtaatggtggcgagccgccgtccggtaggtcacggatgtggctattgcctttgacggcggcttgctttatagtcggggagttgacacgggagctgccgttaggcggctgagaggagattcatagtctcgaccgatggaacgtgaccggataatgccggcgcacggaaatgtcgctcttacccacccgtgcctgaaccaacccgcgcgtggccacgaacatgtgcatcatgtgcgtacatatatccatgtatgttcggcctgcgtacgagcagaagaaaggcacattcatgactgaagctgtggccaaagccaattacaagtggcgcgtcgtcgatatcgtcgtcgccgcaatcatcgccgtcgcatccggcgtcattttctggggctgggacattgtctgctccgccccgctggccctgttcgagggcgtgacccccggtttcgagggtctgctcaacggattctggctgttcgccggcccgctcgccgcaatcatcgtgcgcaagcccggtgccgcactgttcgccgaaaccctcgccgccttcctcgagcttacgctgggcaaccagtggggtgtcggcggctcgctgatcgtcggcatcatccagggtctgggtgccgaaatcgccttcgccgtcttcgcttggaagaagtggaacatcggcaccaccatcctgtccggtgcgctcgccggcgtgggctgctgggcctactactgggccaccaacccgggctggaacggcctgcgcgtcacttggtatctggttggctccatcatctccggcgtcgtgatcgccggcgtggtggtctggtacttgtctcgtgcgctcgccgccaccggcgctctggaacgctttgaatccggccgcagcaaggcgcgcgtctgatgcaggttaatccggctgcggtagaggccagcggctggggatggcggcacgccacgcgtaaggacttcgcgttgcgtgccgtcgatttcaccatccggccaggtgaacgtgtgttgctgctcggtgcttcgggggcgggcaaaagcacgatgatggccggtctcgcaggcgtacttggcggcgatgaggaaggcgagcaggagggctcgctcaccatcgatggcgtcgatgcgcgcgaggcgcgaggccgcgtgggactggtgcttcaggacccggactcgcagatcattcttgaacgactaggcgatgacgcggccttcggctgcgagaacctcaacgtgccgcgcgaggagattcggcagcgagtgcgcgaatcattggatatggtgggactcggcggactcgaactggatcggtccacccgccatctgtccggcggtcagcgccaacgtctcgcgttggccggcgtgctggctatgaagcccggtctgctgttgttggacgaaccgaccgccaacctcgaccccgaaggcgtggtcgaagtgcatgacgcggtcaaaaaggtcatcgaggccaccggacagaccatggttgtggtcgaacatcatatcgatgtatggctcgatctggtcgatcgcgtgatcgtgctcggccgacccgatgcaagttcgcccacgggcgcggtcatcgccgacggcaagccggacgaggtgttcgccgagatgggcgacgtgttggccgccggtggcgcgtgggtgccgggccgtgcgattcccgattactcgccgaagcgggagcctgcgcacgatgcgccggtgctcagcaccgagaacttaagctttggccgtggaaccgctcttggcgttggcatcaatctggatttctatcccggcgaagtaacggctctgatgggtccgaacggcgcgggcaaatcgaccttggccctgaccttggccgggctgctcgagcctatcgccggcaaggtgctcatcgccgacaacctcaagcccgcgcatgccgggcgtgagccgattgactggaaaagcaaggaactgctgggccgtatcggcatggtgttccaggagcccgaacaccagttcgctgccaatttcgtgcgtgacgaagtcgccatcggccccaagtcgatggggcagagccaagacgaggcttatcggaccgccgaccgcatgcttgagcagatgaatctcacgcgcttcgccaaagccaacccgtataccttgtctggcggggagaagcggcgactgtccgtggcctccatgctggccgccgcacccaaagtgttggtgatggacgaaccgacattcggacaggatttcagtacgtggaatgaaatggtcaagctgatcgccgccatccgcgaccaaggctcgtgcgtggtcatggtgacgcacgatgaggcgctggtggatgcgctgggcgcacgacgcgtgatgttcgaggaggcgaggcatgagtgacgtggtaaccgtcagcccgcaggaaacgcgcgtggagccggtcaaagcctcatcgccctcatggttcatagcgcgcatcaacgcggtcagtcgcatcatcggtgcgctgttgctgtgcgttccgatgttcatcagtctggatgtggtatccgcatccacggcgctcggcatcgaattcgtgctgctgtggattggtggcgtggctccgtggaccgtatgccgtaagacctggccggtatggatcgccgccgccggcagttttatctccgtgtttctctacggccgtacctcgggcgagatcctgtggcagggtggctggattgtgatcagcgagggatccattaatctggccatcgccacggctatcagggtggcggccattgccgtacccggcgtgatcctggccctgggcctcgatcccactgatttggcggacggtttggttgagattctgcacttctcaccgcgattcgtatacggcgggttggctggattgcgcatgtttacgctgctgcaggaagattggcgcgcacttggcttgtcccagcgttcgcgcggccttggcgacggtaacgccatcgcccgtgccctctcccaagcgttcggactgctggtgctttccatccggcgcgccaccaaacttgccaccgccatggaagcgcgcggcttcggctccagcgccccacgctcccaagcccgtatctcgcgtctgaagcctatcgactggatcttctacgtcatctgtctggctgtcccgctggcctccataggcgtagccatcggcaccgggaattggcacttcgcctttcaaggtgtctgaaaggcgacagactggcacagtgcctttcaaggtgtctgaaaggcttacgatgcctccgccagcgggagcgagccacgactgacgtaatgacccggcagtagggtagtggctatgcccatcaacgcccagattcttgataatccgaaatccgaccgcgttcgccgcatcgccgatctgacccgcgccaaaggccgcgaacgttcgggccgttttcttatcgaaggcccgcaatccgtgcgcgaggccgtcacttggcggccggacgtggtgcaggacctctatgtggaggtttcgcaggcgttggaacatccgcgtatcatctcctccacgttggagaagatcgtcgaaacctcgcaggatgccacgatttatgtgcactactgcaccggcgacgtgatgcaccgcatcagtccagacgcccagggcatcgtggccgtcggcaatgccgagtccatgcacgccggtgccgatgacgtcgaacttggcaagaacggccggggcccgcagatcgccgccttctggcaggtgcgcgacccgggcaacgccggcaccgtgatccgtgcggccgatgcggccggttgcgacgccgtaatcttcgtggacgactgcgtggacgtgctgaaccccaaggtcatccgctccaccgcaggctccctgttccatctgccggtactcgccatgagcaccgacgaattcttcacctggacaggcgaccataatatgggcgtctgggccgccgacgtatacggcaccgaagaatgcaagccggaaagcctgcccgcagtactggcggacaaggcggcggtcgaggctccgaaagccgtgctgttcggcaatgaggcgcgtggcttggaaccggacatcctcacacgctgcggccgcatcgtctccatcccgctgtacggcaaggccgaatcgctgaacctcggcacctcggccgcggtgatgttgatgtcgctgtctatgtcgggtcatgttgaaagaatgtgaaaccggtaaaaacgctgtgaaacgctgagaaaacatcagacgaaagggttctcgtggcagaacaaatggtgttcgacgccgaccaggtgaccgctgaggttgccaagggcatcgagaaaatccagaacgcctccaacctggaggagctcaaggccatcaagacaacgtacgcaggtgccgattcggcgatgaccaaggccagcaaggccattggctccctgcccgtcgaccagaagaaggaagccggcaagctcatgggcaagctgcgcgccgacttcggccgtgcctatggccccaaggaggtcgagctcaaggaagccgccgagaaggccgcactcgccgctgaaaccgtggacatgacgctgccggtgaaccgcaagcctctgggcgcccgtcacccgctgcccaagctgatggaagacgtcgaggacttcttcatctccatgggctggcagatctcctccggtccggaaatcgaagccgaatggtacaacttcgactccctgaacttcggcccggaccatccggcccgccagatgcaggacaccttctacgtcaagggcaatcaagccaaggacgccgccggtttcgtcggctccaacatggtggtgcgtacgcagacctcctccgatcaggtccgtgccctcctgacccgtggcgtgccgctgtacatcgcgtcccctggccgtgtgttccgcaccgatgagctggacgccacccatactccggtgttccaccagtgcgaagccctcgccgtcgacaagcacctgaccatggccgacctgaagggcgtgctggacaagctcgccgtcgccatgttcggccctgaagccaagacgcgcctgcgcccgagctacttcccgttcaccgagccgagcgccgagctcgacctgtggttccccgacaagaagggcggccccggctggctcgagtggggcggctgcggcatggtgaacccgaacgtgctgaagtccgccggcatcgacccggacgtctacaccggtttcgccttcggcgtcggcatggagcgcacgctcctgctgcgcagcgacatcaacgacatgcacgacctggtcgaaggtgacgtgcgtttcgccgaacagtttgtgatgggggagtgattcagccatgcctatgatcgatatcgattggctcaaggaccatgtcgaggttcccgaaggcctgacctacgaacagctcgccaaggaccttgtcaaggtgggtcttgaggaagaggagatccactcctcccaggtgaccggcccgattgtggtcggctacgtggtcgacgccacccccgaaccgcagaagaacggcaagaccatcaactggtgccacgtggactgcggagacgaatggaacgagaccgacgaagacggcaacaaggtgccgcgcggcatcatctgcggcgcgcccaacatgaaggccggcgaaaaggtcgtcgtcaccctgcccggtgccgtgctgcccggcgacttcaagatcgagccgcgcaagacctacggccacatctccaacggcatgtgcgcatccgagcgcgaactgggtctgggagacagccacgacggcatcattctgctgcgtcagtacggcttctccgaggctgaatatgaggctctgaagcctggtcaggacgccatgcacctgctgcacctcgaccagcctctgcttgagatcaacatcaccccggaccgtggctacacgctgtcctaccgtggcgtggcccgcgaataccaccactccaccggtgctgcctacaccgatccggccgtggcactgaacgagaaggccccggaacctgctgactaccagcccggcaccccggtggacatcgatgttgaaatcgacgataacaatccgattcacggcgtgcccggttgcgaccgctactacgcgcgtatcgtcaaggacttcaatcccaacgcccacactcccaactggatgcgccgccgcctgattcgcgccggcatgcgctccatctccttggccgtggacgtgaccaactacgtgatgcttgacctcggccagccgatgcacgcctacgacctcgacaagctcgaaggcccgattgtcgtgcgccgcgccaacgagggtgagaaactcaccaccctggacggcaaggaacatgacctgagcgtcgaagatctgcttatcaccgattcgccgaacggcgaacgcggctcgcgcatcctcggccttgccggtgtgatgggcggcctgtatggcgaagtgaccgctgacaccaagaacattcttctggaggcagcgcacttcgatcaggtgaccatcgcccgttcggcccgtcgccacaagattccatccgaggcctcccgccgcttcgaacgtggcgtcgacaccgcgctgcagcccgccgccacccagatggccgccgagctcatggccaagtacggcaatggcgagcccagcgaacacccgaacgacgtgaacaacacgccgcgcgccaaggtcatccacttcaaggcctccgaagtggcccgcgtggccggcctcgacgtggacatcaaccgcatctccgacatcctgaccgacattggctgcacggtggccggcggcggcaacggcgagttcgccgtaaccgcgccgagctggcgtccggacttgaacgagccgtgcgacctggtcgaggaaatcgcccgactggtcggctacgaccagattccgatcaccgtgccgccggcaccggtcgagggtctggtgggcctgaccccggaccagcagcgtcgccgtcgagtggcggacgagctcgccgagttcggcatggtcgaatcgctgagctacccgttcgtgggcgacgacgattacaaggccttcggcttcgacccggaagccaccaagaaggtcagcgtcgagatcgccaacccgctctacggcgaccgtccgtacctgcgtcgcgagattctgccgaccctggccaccaccgtgcagcgcaacatccgccgcggcatcgaaaacgtgtccctgtatgagctcggccacgtctacctgtgggatccgaacgcgcccgccatcccggcactgcccggcggcgtgcgccccaccgacgaacagctcgccgcgcttgacgccggtctgcccgaacagcccgaccatgtggccggcatcctgaccggtctggccgaggacgatggctggatgggcggcaagcgcccggtcgactggtccgacgccgtcgaggccgtgcgccgcatcgccggccgtatcggtgccgcgattgttctcgaccagcccgccgccgacgatgtgcccgtccagtggcaccccggccgtgccgcccgcgtcatggtgggcgacgtcttcaccggctgggtcggtgaattgcacccgcgcgtcaacgaggcgctcggcttcccggcccattccgcggccttcgagctgaacctcaccgcgctgttcgccacgctgaccggtaagcccgtccaggccaagccgatctccacgttcccgccggtcaagcaggatttggccttcacagtggacgagaccgtgaccgcaggccagcttgagaacgtgattcgcaaggccgccggcgcgaacctcgaatccatcgaactgttcgacgtgttcaccggcgaacaggtgggcgagggcaagaagtccctggcctatgcggtggtgttccgttcgccgagcaagacgctgtccgccgaagacagcgacgccatccgcaaggccatcgtggctgaggccgccgaaatcggcgcccagctgcgcgcctgacccaaccaatcatccgaatcgaggagcgccatgagccaaccggagcaggacaagccgaaatacgggcagtaccagcagcctgaatatggtgctatgtctggccaatacgggccgaattacaacccgtatatttatggcgctcccgagccggataccaagaaggattccgccgcagccgctggcaacaacggtggcgcggcacaatcccagcaggccggccagccgtacggtcagcagacgccgtggcccggcaatcagcaggcgggcggctggccgtatgctcaaggcggccaacagtccggtccgggcgcatatccgggcgggtacccgggcatgcagggccagccgtatggtcaacagccgaacggtcagcctcaccagccgcattattaccacggcatcgacctgaacgatccaaaccagaacccgctctacgggcactgggattcgtatgcgatcatctcctttatcctcgccctgttcttccctgtgccggtgctctcggcactgatgggcgcggtggcaatgtggcgcacgcgcaccttccatatgaagggcttcggtttggccgtggccgccgtggtgatcaacgtgctatacaccatcgccgtcatctggatggccttcaatggctatgacgccatgagcctctaccaggaagccctccagcaactcaccggcggcaccggctcctcctccgactccatctccgcataagtggcgttcacataccaacacacccactgcataaatatgcaatagtctgcataatcgcgtatactcatcccaagacacatcagtgaaaagagatgagtatggcgaaatatacagtggccgtggccggtgccacgggctatgccggcggtgaagcgctgcgcattctggccgcgcaccccgacttcgacatcacctgcgtggcaggccattcctcagtgggggagtcgatggccaagcacatgccgcatattccccaactggccaatctggtcgtcgaagataccacgcccgaagtgctgaacgggcatgacgttatcatcctcgcactgccgcacggtgcttcgggcaagctcgcctcgcagctcgatccaaatgccgtggttgtggatttgggcgccgaccatcgtctcgaagagcaggccgcttgggatgagttctacggcggcgatttctatgagcattggacctacggcatgcccgagctcatcaccggcaaagccgcggacggctcatacacccgccagcgcgcggcgcttcctggcaccaagcgcatcgcaggccctggctgcaacgtcaccgccaccacgctggccctccagcccggcatcgccgaaggactggttgaatcgcaggatatcgtggccgatctggtcgtcggatactcgggtgccggcaagaatctcaagcgcaccaacctgcttgccgccgaggccctgcaatccgccctgccgtattcggtgggcggcaagcaccgccacattcccgaaatcctgcagaacttcgcccacgcggccggcaagcgcgcggccgaagccagcgaattcacgctcggcttcacaccgattctcgcccccatgtcccggggcatcctcgccaccgtgtccgcccgcatgacggacaaggccaaggcactgagcgatgaggagattcgcgccgtatggtccaaggcctatgaaggccaggacttcatggtgctgctgcctgagggcacactgcccgccaccggcaacatcatcggatccaacgcagcccacctgcaggtcgtcgccgaccgcaaggccggccgcatctacgcttttgccgccatagacaacctcaaccgtggcaccgccggacaagcggtccaatcactgaacatcgcactcggcctgccggaagacgcgggcctgaccaagatcggagtagcaccgtgagcgttacatttgcacaaggtttctccgccgccggcgtggcggctggtatttcatccgtcgaaggcaagaaggacttggccctcgtggtcaacaacggcccgctcgacgcggctgcaggcgtgttcacctcgaaccgtttctgtgccgccccggtgcagtggagccgtaaggtcgtcgccgacggtcacgtcaaggccgtgattctgaattccggcggtgccaacgcctgcaccggcgaggccggttacgcccagtccgtcgccaccgcggaaacggtcgccggtctcatcggcgccgaaccgaatgatgtggctgtctgctccaccggtctcatcggtgaactgctgccgttggacaacgtgctggctggtgccaagagcgcccatgaggctcttgccgccaccgccgaagccggcgccgacgcctcccacgccatcatgaccaccgacaccaagccgaagacggtcgaactgaccggctccaacggctggaagatcggcggcatggtcaagggctcgggcatgattgccccgcagttggccaccatgctgtgcgtcatcaccaccgatgcggtcgtctccgccggccagatgcaggccgcactcgccgtggccgccgaacattcgttcaaccgcatcgacgtggatggctgcatgtccaccaacgacacggtcctgctactcgcctccggtgcctccggcgtcgaaccggacaaggacgaattcaacaagctggtgcgtgaggcctgcgtctccctgtcccgccagatcatcggcgacggcgaaggttcctcccacgacattcgcatcactgtcaccggtgccaccagcgaagacgcggcacttgcctgtggtcgtgccgtcgccgcctcgaacctgctcaagtgcgccatctccggcaacgatccgaactggggccgcatcgtcagctccctgggcactgtgccgcctgaagtcgcgccttacgattcgaacaaggtgaccgtggacgtcaacggcgtgcgcatctgcgagaacggcggcgccggccgcgaccgcagcgaggtcgacatgaccccgcgcgaagtccacatcgacatcgacctgaacaccggctcggacgccgaggccaccgtctggaccgacgacctcacccacgaatacgtccacatcaacgccgactacgaaagctgacaaacagcccagtgggctgtttgtagcagccggcggcgatagcgtcgccggcgtcgcagaaaagagaaaaattggctacagaattgaagggacctgggttccatttcgacgtgcacaccgatttgcgcgccgatcagaaggcagaagtgcttattgaagcgctgccttggctggaggagttcgccggccagcgtatcgtcgtcaaatacggcggcaacgccatggtcgatgaccatctgaagcagtgcttcgccgaagacatggtcttcctgcgtcaggtgggcctgcatccgatcgtcgtgcacggcggcggcccgcagatctcccacatgctcaaggccctcggcatcaaatccgaattcaaaggcggcctgagggtcaccacccccgaggccatggacgtggtgcgcatggtcctgaccggcaaggtgtcacgcgaactggtcggcctgatcaacgcgcacggcccgctggccgtaggcctgtccggtgaagacggcggcctgttctcggccatgcagcgcaagcccatcatcaatggcaagcccaccgatatcggcttggtcggcgatgtggtttccgtcgatgcctcggcagtcgaggatctggtggccgccggtcgtatcccggtcgtctcttccgtggctccgaacgaagaagatgccactgaagtgctcaacgtgaacgccgattccgccgccgccgctttggctgccgctgtgggcgcacgcaagcttgttatcttgaccgatgtggatggtctgtacgccgattggccggacaagaattctctgattggccggatcggtgtggaaaacctgcgcgatatgctgccggacctggaatccggtatgcgacccaagatggaggcctgtgtcagggccatcgacggtggcgtgccccaagcccatatcatcgacgggcgcaagccgcattcgattttgaatgagatattcacctccgcaggcatcggtaccatggttatgcccgatgaaggactggaaatgaggagctcttatggctactgagcatgaggaaaaactaggtacggaggacagcaagtggctgggagagtactctcaggtccacatgaatgtgttcggtacgccgttgcgcgtcatggatcacggccaaggtgcccacatctgggatgttgacggtaacgaatacctcgatttcctggcaggcatcgccgtcaattccctcggatacgcccaccccaagtgggtcaaagcggttgccgatcaggctgccaaggtggctcatatcagcaactatttcgcgtccgagccgcaaattgagctggcatccaaattggtcaagctggctggtgcacctgaaggctccaaagtctacttcggcaactccggtgctgaaggcaatgaagctgccctcaagcttgccaagctgtatggccgcaccttgcctggtgccctgccttccatcggcggcaagcccgcacgcattctcgcaatgactcacggcttccatggccgtacgatgggtgcgctgtccgccacatggaaacccggtatccgcaagccgtatgatccgctggtgccgaacatcgaattcgtacgcgccggcgacaaggtcgccctgcacgacgcttttgcacagaccggtctcggccgctatggcaagggtccggtggctgctgtgattctggaacttatccagggcgaagccggcgtgcagccgttgggcgccgattacgtcaagttcgtgcgcgaactgtgcgatatcaaccacgcgctgctcatcatcgatgaagtacagaccggtatcggacgtaccggcaagtggttcgcattccagcgtgacgatctgtccggcggcgtgacgccggatatggtgactttcgccaagggcgtggcaggcggattcccgatgggcggcatgatcgctttcggcgagaaacttgcggctctgttcactcctggttcccacggctccacctttgccggcaatccgctgggtgcggctgcgggactcgccactcttggcgtgattgaagacgagaatctggtggccaacgccgaagctcgcggcgaacagctgcgcgatggcattatggccaccggtaatccgctgttcgtttccgtacgcggtcgtggtttgctggacgccgtcgagctcaagcatccctgctcccacgcggtgatgaactactgcctcgaacacgggctcatcgtcaacgcggtggctcccaatgcgctgcgtttcgcaccgccgctgattgtaaccgttcaagacgtggatcaggcacttgccatcctcaaggatgtgcctacggacctgcccgacgactgatttctctccgtcactgccgacccaccgatccaaggagatcatcatgaccccagaacttcgccacatgctgcgtgacgacgacctcaaccatgaggagcagaagcaggtgctcgaacttgccatcaagttccaccatgaccgcttctacaagcagccgttcgccggtccgcaggccgtcgccgtactgttcgacaagccatccacccgcacccgttccagcttctccatcggcgttgccgagcttggcggctacccgctggtcatcgacaagtccggctcccagctgggccgtggcgagcccgtggccgataccgctcgtgtgctcgaccgcatggcttacggcgtggtgtggcgcaccttcggccaggaccgcgtcgaagaaatggccaagtactccacccatccggtggtcaacgccctgaccgatgacttccatccctgccagattctcgccgacttccagaccatcgccgagcaccgaggcggcgtcgacaacctgaagaaccagaccatcgcctacctcggtgacgcggccaacaacatggccaactcctacctgctcggcggtgccgtggccggcatggacgtgcgcgtggccggcccccacggctacctgccccgcccggacatcgtggccgacgccaagcgcgtcgcggccgagaccggcggctccatcctggtcaccaccgatgccaaggaagcggtgcaggacgccgactgcgtgttcaccgacacctgggtctccatgggcgaggaagccgaatacgccatccgctccaaaccgttctgggattaccaggtcaacaccgaacttatggcattggccaagccggatgcgctcttccagcactgcctgcccgcctaccgcggcaaggaagtcaccgctgaagtgatcgacggcccgcagtccgtggtgtgggacgaggccgagaaccgtctgcacgcacagaaagcgttgctgacttggttgaccggcaaggcccgtggagacgaaagcctgctcgcatgagtgaaaccggtccgtccctgcagcgccctgccaccagggcggcgcggctgagtgccatagaacaggcgctcgccacgcatatcatcacctcgcaatcacagctgtccaaaatccttatcgacgagggcattgcggtgactcaggcgaccctgagccgcgatcttgatgagatgcatgcggtgaagacccggctgaaggacggcacggtggcctacacggtgggtcgcagcgtcgttgcttcggaaggtgaggatgtaggggagcgcggtgaggcacagatgtcccgcgtgctgaacggactggtcacctcggtggccgccgccggaaatctggttgtggtgcacacgccttccggtgccgcacaatacgtggcctcggtgattgacaggcagccgatcgaaggcgtgctgggcaccatcgccggagacgacaccgtcatggtgatttgcaccaatgacgacaccgccgtctcccgctccgactggctactaagcctcgcttccaaataaccaacacgccgtgcataaatatacagtcctctgtatatacttgcatcagtttgttttttcagaccttgaatgaaagggaaccaatggcagataacaagcgcattgttctggcctactccggcggtcttgacacctccgtcgccatctcgtacctgaaggagcgcaccggcaaggacgtcgtggccgtgtccctcgatgtcggccaaggtggtgaaagccttgagaccatcaagcagcgcgccctcgcctgcggagccgtcgaatcctacgtggtcgacgcccgtgacgagttcgccaacgaatattgcatgaaggccctcaaggccaacgccatgtacgaaggcgtctacccgctggtctccgccatctcccgtccgctgatctccaagcacctcgtgcgcgccgcccaccagttcggcgccgacaccatctcccacggttgcaccggcaagggcaacgaccaggttcgtttcgaggtctccatcgcctccatcgacccgacgctgaaggccatcagcccgattcgcgacctgtccctgacccgcgacgtcgagatcgcgttcgccaaggagcacaagctgccgatcacccagaccgagaagtccccgtactccatcgaccagaacgtatggggccgcgccattgagaccggcttcctcgaggatccgtggaacggcccgaccaaggactgctactcctacaccgacgacccggccttcccgccggtcgaagatgaagtcgtcatcgagttcaaggaaggtgtgccggtcaagatcgacggacgtgacgtcaccccgctgcaggccatcgaagagatgaaccgccgcgccggagcccagggcatcggccgcatcgacctcatcgaggaccgcctggtcggcatcaagtcccgcgagctgtacgaggctccgggtgccgtggccctgattaccgctcaccaggaactcgaaaactgctgcctcgaacgcgaacagcaccgcatcaagcgcgacatcgacaagcgctggggcgagctggtttacgatgcgcagtggttctccccggcaacccagtcgctcaacgccttcatcgaagacacccagaagtacgtgtccggtgagattcgcatggtcctgcacggtggccgcgccgtggtgaccggccgtcgttccgactcctcgctgtacgactacaagctcgccacctacgattccggcgataccttcgaccagaagtcctccaacggcttcatcgacatctacggcctgccgtcccgcgtggccgcagcccgcgacgtcaagttcggcaacggcatcgaggtcccgaagaacaccgtcgagtaattcttactcagtcgcccccgctgcgaggctgtcggcatagctgactgggagtggtctttgaaaggactgtcctcagtcacactccatgtgacagccctcgccagcgggggcaactgtatgtttgaacacattgctacgcttaaacacagctattttcacttttcaaggagctttcatgactgagaacaacgaacatctggccctgtggggtggtcgttttacatccggtccgtctccggagttggcccgactgtccaagtccacgcagttcgactggcgcttggccgacgacgatatcgccggttcccgcgcccacgcccgtgctctcggccgtgcgggacttttgaccgccgacgagctgcagcgcatggaggatgcgctcgacacgctccagcgtcatgtggatgacggctccttcgcccccatcgaagacgatgaggacgaggccaccgccctcgaacgcggactgatcgacattgccggcgacgaactcggcggcaaactgcgtgccggacgctcccgcaacgaccagatcgcctgcctgattcgtatgtggctgcgccgccactcccgtgcgattgccggactcctgcttgacctcgtcaacgccctgatcgagcagagcgaaaaggccggccgcaccgtgatgccgggccgcacccacatgcagcacgcccagcccgtgctgctcgcgcaccagctcatggcccacgcttggccgctgattcgcgacgtgcagcgactgatcgactgggacaagcgcatcaacgcctctccgtacggctccggcgcactggccggcaacacgctcggcctcgacccggaggccgtggcgcgtgagctcggcttctcccgcgtgaccgacaactccatcgatggcaccgccgcacgtgatctcgtggccgaattcgcgttcgtggccgccatgaccggcgtggacatctcccgcctgtccgaggagatcatcatctggaacacccaggagttcgccttcgtcaagctcgacgacggctattccaccggctcctccatcatgccgcagaagaagaacccggatatcgccgagctcgcccgcggcaagtccggccgactcatcggcgatctgaccggtctgctggccaccctgaagggcctgcccaccgcctacgctcgcgacctgcaggaggacaaggaggccgtgttcgaccaggtcgatacgctcgaagtgctgctgcccgccttcaccggcatggtcaagaccatgcacttcgacagcgagcggcttgaagaggaagccccgaccggcttcgcgctggccaccgacatcgccgaatggcttgtcaagaacggtgtgccgttccgccatgcgcacgagctctctggtgcctgcgtcaagctcgccgaaggccgcggccaggaactgtgggatctgaccgacaatgacttcatcgagaccttcgccgcgttcctgccggccgacaaggctccgggagtacgcgaagtgctctccagccacggttcggtcgactcccgcaacggcaagggcggcaccgcttacggtcgcgtgcgcgagcagatcgccgacgccaaggccgaggtcgaagaactcaagctcttccccgcatccacgtcggatggctccgcctacaaagcccccggcacgttctagtcccaatagagctccctcgtcagagggagctctattttgctgttgtcactgcaacggcatacactgagaaatcgtaacgaacgggagccgtgaggctgagaggaagtcgccagacttcgaccggggaacttgacgcgggtcatgccgccgtaaggaatcgttgttgcagatttgccgggttctccgatacagctttcattccgtttgcataattcagccgtgagacggtcgtgatggagccaatacatcacagcggtcgaacggtcgcatgattgggttcatgaatgggcgcaccacttaaggtacggttcgtttcgtgcacccttttttactatctgaaaggatattatgcaggtcaacggagagcaggtcacgctcgagacgccggtcagcgtcgccgattatctcgaagcgcacggattccgcgccgagcgtgtggccatcgaactcaatggtgagattatcccgcgcgataagcgtgccgacgccatgctcgacgaccagtgcgtcatggaaattgtgcagtttgtacagggtggatgaaaggaaaagctatgagcaatattaatccggttactgaagcatctgttgaggcgactccgctgccgccgcagcccgccgtcaccaatccggtcggcaccgccgcgccgattctgccagtggaagacaagccgctgaccctgggcggtcacgagttccagtcgcgattcattctgggctccggccgctacgacctgaacctcatcaaggccacggtcgaacatgcaggcacgcaaatcgtcaccatggcactgcgccgcgcgcagaccaccgagaacagcgtgctcgactacattcccgaaggcatcacgttgctgcccaacacctccggtgcgcgcaacgccgaggaagccgtgcgtatcgcccgactggcacgcgaagtgtgccacaccgacttcgtcaaggtcgaaattgaacacgagaccaagtacctcctgccggacaacgccgaaaccatccgagccaccgaaatgctggccaaggaaggcttcgtggtcatgccctacatgttcccggacccgattgccgcacgccagctggaggaggccggtgccgccgccgttatgccgctcggttcgctgatcggctccaacatgggcctgcgcatgcgtgacttcatcgagatcatcatcgccaatgcgcatgtgccggtcatcatcgatgccggcatcggacgcccgagtcaggcatgcgacgccatggagatgggtgcggatgcggtgatggcgtacacggccgttgcctctgctggcaatatcccgctgatggctgaggcgttcaagcacgccatcgatgctggtcgtgcggcgtatctgtccggtctgggcaaggtgaccgagggacaggccgtgccgtccagtccgactacgggatatttgcactgacacttttattagctcccctctctgaggggagctggccgcgtagcggactgaggggagctggaaacatggagaaaacatggcattgactgatgaacaggtggagcggtacgcgcgccatctgattttgaaggggctgggcgtcaaagggcagaagcggttgttggcctccagcgtgctcatcattggagcgggcgggcttggctctccggccgccctgtatctggcggcggccggcgtcggccatatcggactggtggacggcgatgtggtggatatgagcaatctgcaacgtcagatcatccataccactgcacgtgtcggagcgcccaaagtggaatccgcggccacggccatccgcgcgctcaacccagatgtgacggtcgacacctactacgagctcgtcgatgccagcaacatcgccggcctcatcgaaccgtacgatctggtgatcgatgccaccgacaacttcgccgcaaaattcctcatcaatgacgcatgtgtactggccggcaagccgtatatccatgcgggcgtggtcgggttctccggccaggtgatgaccgtcatcccaggcgaaggcccctgctaccgctgcatcttccgcgatatgcccgccgcaggtgaaattccgacctgcaaggaggccggcgtgctgggcgcggtggtcggtgtgatcggcagtctggaggcgactgaggccgtcaagctgattgccggcgtgggggagccgctcgtggctcgtatgctcactgtggatgccctgaccatgaacatccgccgtgtgccgttgccgaaccatgtgcccgactgcccggtgtgcggtgagcagccgaccattactgctattgatccggccaactatattcagccggcctgcgcgatttagagctatgtggcacccctccttgaggggagccaagatcggaacgagaggggaagaacatgcctattgctttgcgtaatgcggtcgatgacgatgagagcagtgaagcatcgtaccgccgcatcacgccggcggaatttgccaagctcgacccgaatacggtcacgctgctcgacttgagggaaccagccgacttcgccgcccacccggtcgaaggtgccatcaatgcaccactcgaccctctggcccatgtgctcaaaaccgtgcccacagatcgaactgtcgtagtctattgtgctcaaggatggtggagcgaggaagtagctgaaatccttgccgatcgcggttacgatgtagcaagcctcgatggcggttttcagggttatctcgactatcttgaaacccaccacgattaacggttcccgttgtcgttcttttggatgagtgtgcacggacatacgtgtgccctacaatcggtcacggtattactcgatggattcttgaatatcgtcgggtaatcgtaattcacaacaagggattgcactgaaccaacccgaacggagggtcgaaaccgtgggacatctgctcacccgaacgcagattcaacgcctggtcgccaagcacggccgtgaggtcatcgagcatcgccacatgcagatcgaacgctgctgctaccagcacggcaacgtcaccacgttcgaacattccgtgcgtgtcgcctgcctggctgtgtggatggccgaccgcgcgcacctgtggtaccgcgtcgacctcaaatccctgattcgcgcggccctcctgcacgattacttcctgtacgactggcacgactgggataacggcgaacaccagtggcatggcttcacccatggccacgccgccctggtcaatgccctgaaggacttcaagctcaacgatatcgaacgcaacagcatcgagaaccacatgttcccgatgaccctggtgccgccgcgctatatcgaaggctatctggtcaccttggcggacaaatgctccgccaccgccgagaccttctcgttcgaccggttcaacaagcgcgcgttgcccgccgcgaagccctacgccgagatcgaagcccgtcgatgatcatcacactcgaacattatttcctctggtttctgttctacagtttcgtcggctggatgtacgaatccattctcgtctcctgccaacagcaccgcttggtcaaccgagggttcctcaacggcccgctgtgcccgatctacggcaccggcgcgatactcggcgtcgccattctcggcaacgtacataacccgatcatcatcttcctgatttcgatggtgggcgccacgatactcgaatacacaacctcgtgggtcatggagcagctgttccacgcccgctggtgggattactcgaatttccgcttcaacctccaaggccgcgtctgcctgctgggcgcgttgatcttcggtctcggcggcgtgggcgtggtacttggttcgcagccatatgtcgagcgggtcacggatatgattccgctgccgatgctgcatacgctggtcacggtcctggccctgatcaccatcatcgacttggcggtcacggttgcgggcatgctcggattcgagcaggtgctcgattccgtctctcaggtggtgcaggatgtggcggcacgcgccggtggcacgtggcagtggggctcccgtgcggtatccgacaggatgcgtgagctttcgcaggatacggttgagcgtctgcgctgggccatcaatggcgtcatcaacgcacagcagaagcgtatgctcaagtccttcccgaagttccaggtgccggatcgtcaggacatcatcgactctttgcgcgaacttatgggcccgcgccgctagaataaggcgttttactgaatcgcgcggctcggctggtgttcggcactgtcgccatgttctgcgaaacttgactgtgcccaattgggcagtctcattcacaattcgatagggagaagcgacaagctatggctcacgtcaccgacttcaaggaagcgggtttcaacaccctgcttgaggaactggaatggcgcgggttgatttcccagtccacggaccgggatcgactcgcagaagcactgaacggcgagcccatcacctattattgcggcttcgaccccactgctgcatcgttgcatatcggcaacctcgtgcagctcatcaacatgcgtcacctgcagcttgcgggccatcatccaatcgccctggtcggcggcgccaccggactcatcggcgacccgcgccagtccggcgaacgcacgctcaacccgaaggacgtggtggccggctgggccgatcgtctgaagaaccagatcggcggcattctggacaccgaaggcgcgaacgccgtacgtttcgtgtccaattacgattggaccgcctcgatgaccgtcatcgacttcctgcgtgacgtcggcaagaacttccgtctgggcaccatgctcgccaaggacacggtcgcccgccgcctgaactctgaggaaggcatctccttcaccgagttcagctaccaggtgctgcagggcaacgacttcctccacctgtttgacgaataccactgcacgctgcaactcggcggctccgaccagtggggcaacctcacctccggcctggacctgatccacaaggtgcgcggtgtggacgtcaacgtgttcaccagcccgatcatcactgatgcttccggcaagaagttcggcaagtccgagggcaacgccgtctggctcgacgccacgatgctcagcccgtacaagttctaccagttctggatcaaccgcccggacgtggagatggaaagcctgctgaaggcgttcaccttcctgcccaaggccgaaatcgaacgactggtcgaggaatccaagaccaaccccggcaagcgcgaggcccagaagaccctcgcctgggaggtcaccagcttcgtgcatggcgaggccgctacccaggctgccatcgatgcttccggtgcgctgttcggccgcggtggcaacctcgaagacatcgacgaggaaacgctggaatccgtgctcgacggcttcaaggtggtcgacgagaacggcgagcacgtcttccccgtctccaagccgggcgatcgcgtaatcgacgccgcccaggctgccggactgttcaagtccgcttccgaggcacgccgcgccatcaagtccggtggcgtgtatctcaacaacaaccgtatcgaggatgaggagcaggtgctggccgaagccgacttcctggcaggccgcttcgcgctcatccgtcgtggcaagaaggcgctcggcgccgtggaaaaccgttaatcaacaacgaattaaggaaaacaagtaatggcagaaggtaacgagcgttccggcaagtcctacggcggcggtcataaggggtatggcgatcgtcgaccgggcaaccgcggcggcaagggtttcaagccgcgcggcaagggcggtttcaagccgcgtcatgacggtgagggtttcaagccgcgccgtcgtgaggatggcgaaggctacgcgccgcgccgtgatggtgacggcgagggccacggcggctaccgcaagtcgtacggcaagggtggcgacttccacaagggcggccgctctggtttcggtggcaagggtggctatcgcggcaacggtccgcgccgcgatggcgacggcttccgtccgcgccgcgaccgcgatggcgagggcttcaagccgcgccgtcgtgaggatggtgagggttacgcgccgcgccgtgatggtgatggcgagggccacggcggctaccgcaagtcgtacggcaagtccggtggcttccacaagggtagttaccgcggcagtggtccgcgccgtgacggtgaaggtttcaagccgcgccgcgaaggcggctaccgttcccacgaaggcgagaacggcgagaacccgcgctaccagcaccgtgacaacgatcgtcgtgatttccgtcgcgatgatcgccgtgacttccaccgcgatggtgagcgtcgtgacttccaccgcgatggtgagcgtcgtgacttccgtcgtgacaatgatcgtcgtgacttccgccgcgatgaccgaagggataacgatcgccgtgatttccatcgtgatggtgagcgtcgcaacttccgccgcgacgacgatcgccgtgatggcgatcgccgcaacttccgcagggacgaccgccgcgacaacaaccgtcgtgacggcgaattccgcgagttttcgcaggaagagaagcgccagtaccgtgaggagaagcgctctgaatacatgaggcgtccgcgccgtaactccgacggcacgatgagcttcccctcgcagaacccgtacaccgaccgtcgtcccgacgagcccaagatgcccaagggcatggaatggtcgatgctgtccaaggatgagcgcgaacgtctgcgcggcctgtccaaggagcatgcggagaacattggtctgcacatcctcgccgctttcgcgctggaggagagcgatcccgaacttgccttggagcacgccaagtgggtggcccgtcaggcctcccgcatcgactttgcccgcgagacgctcgcgttcgtggcctaccgtcagggcgactacaagctgtccctgcgtgagttccgtaccgcctaccgtatgaacggcttcctcgactacctgccgttcatcgctgactgcgagcgtggtgtcggtgaaccgaagaaggccgtggaactggcgctgtccgatgagggcaagcagctgcatggcgctcccaaggtcgagatgttcctggtgtatgccggtgcccttggcgatttggagatgtgggacaaggccattgaagtggttcataccgtcggccgctctcagggtcttccgggtgagtaccgtatgcgtgccgtgcaggccgagcagtacttccttgaagaggccggccgcagcaaggaagccgagcagcttaatgacctgctggaccgtcttgaggatcagtatgccgacgaggagattgacgaaaacagcgacgacgtggtgattgaccacgatctcgaagacatcaccgacgactccgacgtgctcgagaagctcggcatcgatccggacgaggcgcagtacgccccggatccggagcaggaatacggcgatgaggacgacgaggctgaagacggcgatgccgagtctgatgaggccgatgtcgaaaatgctgagtccgaggatgcatcggaagaatctgaggaatctgaagccgaggagtcttccgagtccgctgacggtgccgttgaaccggctgagtccgacgagaccgagaccgaaaccgaggagtgagcggcgtaatgacccgtttcctcaaaggcaccgatcgcccgctcgccgaggcctatcagcttgcgctgctggacctcgacggcgtggtgtatcgcggcaagaatccggtcgaatacgcagccgattccattcgtgcggccgaagccgccggcatgaccatcgaatacaccacgaacaactcctcgcgcttccagcacgtggtggccgaccagctcaagggcttcggcttggacgtggagccgtggcaggtcatcacctcttcggtggtggccgcccgtgtggtggccaaggcgttgcccgccggcgcgcgcgtacaggtattgggcgccgagcatttgcgcgatgaggttacccgcaacggcctgaccatcgtggacggtcctcagaaccgcccgcaggccgttattcagggttggtatccggatatgacttggcagatgatggccgatgccgcgttcgcggtcgaggccggagccacgtatttcgtgaccaaccgcgacctgacgattcctcgtgaactgggcatcgcccccggttgcggatcgatgattcgcgccgtgatcacggccactggcgtcgaaccggtcgcctccgctggcaagccggaagcgtacatgtacgatgaggcccgcgaactgaacgccgccgaaggccacgatctggtgcccaaggaggcgtccatcgccattggcgaccgactcgacactgatatcgaggccggtaaccgcggtgactatgattcgctggcggtgctgaccggtgtcaccaacccgaccgaactgatgctggctccggcacacctgaggcccacattcatcgcccttgatctgcgtgaactcggcgaagcccaaccggagccggtccgcgacgagagcggtacttgggaatgccgcaaggctagcgcttggtttgaaaacggccaggtacacgtcagcgaccccaccagtatggacggcctgcgtgccgccgtatgcgccgcatgggaagccgccgaccaaggcgcacagctcagcgaggccacggtaccggtgttcgccatcgaggcatagtcctatgcctacggatagcgaacacgcgccggtcaccgagcgataccccgaacttgcggatattgatgaacaagacaacgaccgcaagcttgagacctatcgcaacgtgctggaatcgttacaacacgagcttgataacagccgcagctagcagaggagattcattctcccgccagcggaagatgacgtgaagtgctggatggtgggtccatgccgagccaccccgttggtggatggtgggtcgaaaggaaggtatatgaccgagcaacatatcgatcccgcgaccccacttgatcgcctcgacatgatgctcgtggcttcgggactggtcgaatcgcgggccaaagcgcagcgactcatcaaagccgggcatgtgcgcgtggacggcgagaccatcaccaagccatcgttcatggtcaaagccgggcacagcgaactcgccgtggataagggcgacgactacgtctcccgaggcgcttacaaactcttgggcgcgttcgagacctttgccggcaatggccttaccgggccggaaagcttggaatgtctggatatcggtgcctccaccggtggcttcaccgatgtactgttgcgcgggggagcggccaaagtcgtggcgctcgacgtcggccacggccagctcgacccgcgcatcgccaatgacgagcacgtcatcgaaatgagcggcgtcaacattcgcgaagtagaggccgacgacctgccttaccggccggcgatgatcgtctccgacgtctcctttatttccctgacctatgtgattccggtaatcgcgcgcatcgcggctcccggtgcgcagattgtgttactggtcaaaccgcagttcgaggtcgggcgggcaggactcggcaaaaacggcatcgtggaagatccggcattgcgggagcgggcattgcacgacgtggtcgcctgtgctgaacagcacggacttgacgtggtggccactgccgatagtcccatcatcggcacccacggtaatgaggaatacctgctttacgctgtcttgagatgaatgcgtcggcagtctccgttcaccagcagcacgctggaggtacggtcgatgcctattgcggtggcacacgtggcgctttccaccgcactgccgttgcgtagcatggcggagtccgccgtcaaagtccggcattgcagatggttggcttcaaccgtgacggctgtgatatggcgaaccatgctgccatcctcatacccatccatatcaaaacgagaaaacatcgtactgcgcagtggatgaacttccagagccctgctgttgacgtcatgacccttcaacacgccgttcaagcggactgtctgaccgctaatatgacgggtgcctagggagccattgacggacagatttccggaacaaacgatatcgctgttgcatcgcagtttgccggtaaaggttatttcatcgcaaataatgtcgccgccgacttcgatgtcgccgctgccgctgatgctggatacgcgaatatcaccatcacaccgcacaatgccactcttgatgaccagtttgtccccttctataactgaggcctcgagggtgctggtcacaatcatggtgtgaaaatgcgcgccatcggcaagacgggaacgttggtccactcctatggtgccgtagactcctttgcctatcaacgtgcaattctgcgtatgcttgcccatgatgataaaactccctcaatatggacgtacagctttatggcttattgccacaataatgagcgcatccatgttgaggggggttatatcggtcacgatgtgagcagatagggggtatagcgagcgcagttaggggggggttagccttggatgaagtggtcgatctgatcctgcttgcccatgaggatgagttcgtcgttgcgatgcatgaccagttccttggagccgtactggaactccttgcctggggccttgaggcccaccacggtcacgccgtatttgtcgtgcacctgcacgtcctcgatgctgcgacccaccgcgtataggggcgtgtggatcttgacgacggtgtacgggccgtcgatttcgatgtaatccagataattgccggccaccagatgacccacgcgcttgccggcatcggtctccgcattgatgatgtgacgggcgccgatgcgctgcagaatgcgcgcatgctcctgggacacggacttggcccacagatcggaaacgccggcatccagcaggttgccggtgatgatcaccgaagcctcgatgctgtcgccgatggccacgacggccgtgtcgaactgggagacgtcgatctgctcgatggccagcacatcggtcatgtcggcctgaatggtgggcagatgcgcggaccaacgggccacaagctccgggttcttatccacggcgagcacatcctgacccatctggtcgagggtggcggccacggacccgccgaaacggcctaggccgatgaccagcacgcttttgttgccgctcggttttgctgccatgatgatggtcctctctatgccggatttctgtgtgccgattgaatggccgatcagccaacgataatgttttcctgcggataacgaataggttcgggagccatcggtctgctgatggagtaggcgatggtcaacgggccaagtcgtccgacaatcatctcggcggacagaataaacaggctggccggattgccggcgcttgccacgcccaccgaataaccgcccaacgagaaggccgagcaggcctcgaacacggcgtccacgaacgcgcagccggtggtgaacatcagcatcatcgcaccgaccataaccagcgcaaagcaggccgtggtcacggacacggcggtcatctggacgcggcgggggatacggcggcggaacacggtgacatcgcgatggccggtgaatgcggcgcggcaaatcaagagaatcaccgcgaacgtggtgacacggatgccgccggcggtggatgaggagcctgcgccgatgaacatgagtatgctcatgaacaccttggtctcattcgtgacttcgggcacccaggaaatatcgaaaccggcggagcggggcatgacggcggcgctcatcgcacggcgcatcttcatgccgggaccgtctgcggggaacaggccggtattgccccactcgaccagcaggaaccaagccagtgaggtggccaccagcacagcggtggtcaccaaagtgagtttggtgtgcaacgtccaacgtttcgggctgagatgtcggcgtgcgcactgcaccagattcagcaccacggggaagccgagcgttcctatgaatgcgctgatgagaatcggcagtcccacgccccaacggttcacatgcaggccggtggcgtcaggcgtgaaaccggtgttgttgtaggccgataccgcgtagaacagcgcctgccacaatgtacgtcccatattgccgtggttcacgcggaacaggtcgggcagcagcagcacgaaggtaagcacctcggcgatgatggaggtgcccaataccacggtgagtacgcctttgacctcggaaagcttcgtggtgcccagttcgttcgcggtaagcatgcgctgggagaccttgagtctgcgggaagcgccaagagccgccatcgaggcgaaggtcatgacgcccaggccgccgaactggatggagaataggatgacaacttggccgaacgtcgaccagtattcgccggtgttcaccaccggaatgccgcaggtggacagggccgagacggcggtgaagaacgcgaccgggaagttggtgaagatgatgtccgatgtggagatcggcagcagcagcaagccggtgacgatgatgatcagtgcgccgaaatacaccatggacagacggcccgggtgcctgagcagacggtcggtgatgctgatgcggcgaatgcgcttggcggttttatcgcttttgtctcggctcagtacatcggccgaataccaccatgacaggcccttcgaggcctcctcattggcggaggattcgtcgaagtcattggccatgggtcctcaagctcctcaactgatactgctgtatgctcatacggcatgccatcgcgctgcgcacggcacgcgtacggtgatcgcgcggctgtatgccattgtatgccgaagccttacgttaatcgactctgcggaacgttgtcggcgacgcgccacgaagcggcatttttcgaacacctgtacgagtgatgacggtgtctgcggctagaataatgagcagtgcgaccgaatcgacaggaggatgccatggccaagcgcaacgcggtggtggtgacgcataccaggctcaggcagaccggaaccgtagtggccgaggcggtgagccagctgcgagtggccggtttcgaagtcaccatcatcgacaacaccgaggcccccgatttcggcgtgcagccgccgtgcgtgtcggacgacaccgaaatcgtcgtggtcctgggcggcgacggcacgatactgcgcgccgccgaactcgtccactgcacccaggtgccgattctcggcgtgaacatggggcatgtcggcttcctggccgaattcgaaagcttccagatcgacgaggcgatccgccgggtcgccacccacgactattcgatcgacgaacgcatgatcgcccatgtggacgtctggctgcctggcaccaccaagcccattgaggattgggcgctgaacgacatcacgctggaacgcgccgaccggggcaagatggtcgaactgtccatccgcgtggacgatgtggagatgaactcgttcggcgcggacggcgtcatcgtctccacgcccaccggttccaccgcctacgccttctccgcgggcggtccggtcatgtggccgaacgtcaaggccctgcagttgattccgttggccgcgcatgccctgttcgccaggccgctgatcatcggctccggttcgacctttaccatcgatattctggacgattccatgtccgaaggctggatttgctgcgatggccgccgccagcgcgccctgccgcagggtacgcgcgtcatggtgcgcgaatcgcgcgataccttgcgcctcgcccgactctccggcgtgccgttcaccaaccgtctggtctccaagttcgatctgcccgtggtcggctggcgcgagcacgcgcgcaacgaggcctcgagccagccgctgcatcacgggcacacgttcccggcggccgcgtatgcggctggcgttgccggtgacgctggcgtcgctggtaccgatcccgacaagccgggcgaacgtgacggcaaggcaggagcctgatgctcgaagaactcgatatccgcaatctggggccgattcgagaagccgccattgcgccggccgcaggcatgaccgccatcaccggtgagaccggcgccggcaaatccatgctgctctccgcgatccgactggtctccggtggggccgccgaatcctcgcgcgtctcggccggggcggacgaggcttgggcccaggcgattttcgcgctctcggatgatgccgtcgcatctgaatattccggcgacaccaacgatgccggtgacgatgccggttctgacgattctgacagcgggctcaccggtgctgccgcggccgtggccaaagcccacgacgcgggcgtcgaccccgaagacggcgaactgttcctttcccgcaccgtacgcgcttccggacgttcgcgggccgtgctcggcggcaagtccgtaccgcgttcggtgctgggggccatcgccggcgaactggtcatcattcatggccagaccgatcagctgaaaatcgcggccgccgcacggcaacgcgagtttctggaccgggtggccggagacgaagccgaactggccgcctaccgcaaggcgtgggatgcgctggccgccatggatgagcggctggaacgcctgcgctcgcaggaatcctctgcccgccaacaggccgactacctgcgcgaatccatcgaccgcatcaaccgaaccgacccgcagccgggggaggacgaggagctgaaggcgcgccgcgaacgcatcgaaaacgcggccgacatcgcccaaggcgtgggttcggcgctgggcgcgctggatgcctcgcaggtggatgtggatgccgccgacggcgcttcggccgtggaactcatcaatcatgcggtgacctcgttgcgcgcgattcgcgtcggcggcacgttcgccgagcaggccgatcggcttgaatccatcaatgccgatttgggtgacgtggtgttcgccctgagccaggagctgggcgacgaaggcagcgtggaggatctggaccagatcaacggccgtatccacgagcttggcgacctcacccgtcggtggggccccaccttggccgacgtgctcgcttggcgggacaaggcggcgttcgatttggaggatctggacgcctcgccggaaaaggtcgccgaactcgaatccgaacggcagacgctgtacgatgcggccctcgccgccgccgacgtgctgagcgccgcgcgcgtggctgccgctgccgacttgggcgcgcgcgtcactgaagaactcggctcgctcgccatgctgggcgcctccttggaagtgcgcgtcacgccgcgagacaaggccgatgatccgctcggcccgtatggtcgcgacgatatcgcgttcctgtttacgccgttcgaggggtcgccgcagttgccgatgggcaaaagcgcttcgggcggtgaactgagccgactgatgttggccttggagctggtggccgccgacacgcgcggcggtgccgaccagaccttcatcttcgacgaggttgacgccggcgtgggtggcaaggccgcggtcgaactgggcaaacgtctggcacggctggcccgcagcgcgcaggtcatcgttgtcacccacttggcgcaggtcgcctcgtgggcggacgcgcagttcgtggtcaccaaggagccgccggatgccgatgacgacgatttgggcgtggtcaccaccatcgccgaagtcaacggcgaaacccgcgtccacgaaatcgcccgcatgctctccggcagcgaatccgaagcctccctagaccacgcccgagaactgttgaaggaaagtgtcctatgaccaaagccgccatattcgacctcgacggcaccctcctagactccatgggagtctgggaccaagtcgacatcgacttcctgaacaagcgcggaatcgaagtgccgcccgactacatgaccaaagtctccgccatgcaattccgccagatcgccgaatacaccatcgcacgcttcggccttacagacacgcccgaagagctcatgcgggaatgggacgacatggccagcgtcgcctattccaccacggtcgaagccaaacccggcgcgcttgactatctgcgcgatctgaaagcctccggtgtcaaactgggtgtcgccacctcgctgcccccgcatctgcgtgagccggcgctacgccacgtcggcatgttcgatctgttcaacgatatcgtctccgtcgatgacgcgaacgacgtcggcaaggaccagcccgacgtctacctgctcgccgccaagcgcctaggcgccgcgccggtcgactgcacggtgttcgaagacctgctggtcggcatgaagtcggccaaatcggtcggcatgaaggtctgggccatgcacgacgattcctccgcctccgactggcccgaaatctgccacctggccgacggtgttctcttcgacttccatgacgccccgcgcgtgctgtgataaaaaagttacacccccgctggcggggctgtcggcgtaacggcgttgtttggcataggtgccccttcccgaggccattgtaggcgcggcccatgtttcgacactgtatgttggcaaggtgtttgttcactgtttagctgttatgtaacacaccttgacagttaagcagaacagttatactgtgttgtataacagctaaacagctggggtgctagtcaaccacaatcgaaaggggcataggtgaaactgatcatctcatccgtgtccggtgaacccatctacgagc

SEQ ID NO: 917 - DNA, 48836 bp, Unknown
  R117_24m  MAG No. k141_3665
cgaactgggcaaacgtctggcacggctggcccgcagcgcgcaggtcatcgtcgtcacccacttggcgcaggtcgcctcgtgggcggacgcgcagttcgtggtcaccaaggagccgccggatgccgatgacgacgatttgggcgtggtcaccaccatcgccgaggtaaacggcgaagcccgcgtccacgaaatcgcccgcatgctctccggtagcgaatccgaagcctccctggaccatgcccgcgagctcctgaaggaaagcgcactatgaccaaagccgtcatattcgacctcgatggcaccctccttgactccatgggggtctgggaccaagtcgacatcgacttcctcaacaagcgtggcatcgcggttccgcccgactacacgaccacggtctccgccatgcagtttcgccagatcgccgaatacaccatcgcgcgattcggcctgaaagatacccccgaggagcttatgcaggagtgggatgacatggccagtgtcgcctactccaccacggtggaggccaagccgggcgcgctcggctatctgcacgacctgaaggccgccggcgtcaagcttggcgtcgccacatcgctgcccccgcacctgcgtgaaccggcgctgcggcatgtgggcatgttcgggctattcgatgacatcgtctctgttgacgatgtgaacgacgtcggcaaggaccagcccgacgtctatctgcttgccgctaaacgtctgggcgtcaaacctaccgattgcacggtgttcgaggacctgctggtcgccatgaaatcggccaaatcggtcggtatgacggtctgggccatgcacgacgattcctccgcggccgactggcccgaaatctgccggctcgccgacggcgtcctcttcgatttccacaacgccccacgggtgttgtaaaaaactggctcccctccctgaggggagccatatatgaagcccctaccgccgcgcgatcctatccgaccgccgttgcgcctcaaaccgctgccgctccagttcctcgcccttgttccggataatcggtcggttcggtgtggtgtagcgtaacggcgttgttcggcataagtccccctttccgaggccattgtaggcgctggctgtgtttcggtgctgtattgttgcacggaaacgacatacaacaattgaaaaaatgaggagagactctgaaagccaagcaccaagatctttcatcagacccaggaatcgtcgcgcatttgtcattgtgacgtttacatgactacttctcaaacgtcgattaacagaataacttctatacagaagttcaacagattcgctgaatttcacaaagtcaaaggattaaacaatgattcagaatcataatcgtgtcgcgttgcttctatcaggaggcccggactctactactctcttgtatgacctattaaatcaggggaaagaaatatatgccgttactttcaattttggtgaaactgagggatgtaatgagagtcaacatgcgcaaagaatcgttacaaatctccactctgaacgactccatcattatcaatatgatttttccgagcaatttaagcgtttctatgaattgcctcagcctcagttcctccgcaaagcatttgggccatttgtcgttgcccctaataaggaagagcatgttcagccttttggatcggcaattgcgcttatgctaatggcttcatgggcgcttaagcatgatatcgttgatgtttattacgcagttcatagtaacgatgctgtgttccacgataatcatgcatcatattttgaagctcttcatacggttaccgtagaatgtgaaggagatgaatacggggtaacgttccatactccttatcttagtatcaataagtgtgccgtcattcaaaaaggtatgggtcttggcgtgccgttcggcgatacgtggagctgtgccttgggcgggacagttcattgtggagtatgtgacccgtgtcgtgatcgacgaacttcttttgagattcttggaattaaagatcccgtcttatatgagcacgatattttcgccgaatctcgcgaagaagtgaatattttagaatccccaaagcatatttcggtagtggcctgaataaaaggcaatatagttacgttttaaatacatgataaaacaaaaggaggctgttcgagcatggtgaagaatgtcgggagtgtcgtacgctggcaggtagccaaactggcattggtccagggcatgcaagcaatgtcctcggcgttcttcacatgcggtgttgtattcactggagcggcttcatctgacagcttgggcctagccttggtactcatgttcaagacgctgcccaccttggtcatggcttttctgggtggtgttttagcggatcgattgccgcggaaaactcttgcctcaggaatgctgggtggtctagctatttcctatggagtcggaacatgggtcgtgcagttgagtggtcttggatggcccgtgcaagcaatcagtttggccgcaggtatcattggtgcggtcggctcgccagccttgttcgccttattgccttcgattgctccccctgaagatattgtacgtgccaacggcttgatacgtacgtttcgcaatgccggctcggtggtcggtccacttcttggtgcatggcttgctcaactgatatcaccttcttttctatttctggatggtgctgtgtgtctggctgtctccatgccgcttgttctatcgttgaaactcatgcccagctgcgatgacgaggctaataacaacgatgatgatgcttccatgatttctgcattacgttctattcccagtttgttccatacttatatttggttagcagtgggagtgccgttctgggcgttgttccttgccgtacaatccggggcaacagacgtcacaatgcccttgtgggtcgtgcaagagagtggccggggcacatggtccctgatggcatctatcacctcatctggatacatttgcggcagtctcatcgcgttaaagttggaaaggcctaggcacatgttttctaaatcagtgttatttggcgctttagctattatgccgatttttgttgtaggtactttggacatccaagtactgtggtatgtggcgtcatttgttgctgggcttggactggaattgtctggcgtgttctggggatctactatgcagacatgcgtcgataagcggcacatgggacgagtttcctcaattgattatgcaattagcttcggtctaattcctctcgcctacggtttatacggcttcactggcactattcatgctgccgtcgtacttactgtatcctcctcaataatgattgtcctggtcatcattgttttcccattttgttaccttatagatcaccgttcgaattcctcagggattattaatagtagcgatgtttaatcgccattagctcgatgttcacaacgatatagccgattgcggcccacacggtgcaaggtcgaacatcctgaaaaggtccgtttacgcgaaacgccaaggacggtgaagcagtatactacgtcgtttggggaaacaaagatatcgtgaactagctgataactgaccttaccagatgcgctttgcgcgttacgtctcaacagttgccatgttcgggcattaatgtcatcgctcacataggtgtgccgtcgtcttttgaccaataaacgttcttggaggcggctagaacatgccgtttcgtattgcttcgcataggggtttcccgtgacaaacatcgtttttcgatgaacggagatggagtttatggggtatttagtactccctgacagtgaacgattcaaggtgttatccggctggatgtgttgatatgtttgttgtggttgggtatccattcggtgctgtgaatctgcttgtttagtcgaacattcggaaaacaggaagccctttttttctggtgatggtagaatatgataaatattagtgtcttggataccctctgctgctatgctaaaaatcggttatgaagcgcggagttgggctagggttctctccattaatgtcttcgcaaaatacatgacttttatatgattgtagaacgtgcgcatatagaggtaagtcgctaaataccttcaatacatatgacatcctctcaggtaattatgatgtaattctgacgattacacgattccatacgactcggtcattgtacctatataataggtttcaattaaaccagttgttattgttctaggagtattaatgagcttcgttatatctgtaatcactacttttgcgctttgtgctccttccgtgccatctgttccctttggcattcaacagagcgcgtctttccccttttcctcggtgaatatttctcgtgttcgttgtcctccatggattccgtggctgctttgtccggtgaaaccatagttaaaggtatacgcgcataaacaatccatgtgtcgccatccacttcgtgatcaatttcaccaccgattaggttaagcttgcgcctgcgtgactctagcccgcggcccgacctttcttcgtccggtattgtggacatgctattggacatgactatttctgtttgtgatttctgcagggctatgctggactggaattcgctatactttggcgcgtgtttaataatgttggagcatagttctctcagtacttcatgcagaatatcgatattctttacggtcacctgttgctgtaccgtaaacccaccattaatgatttcagtagtgccagtaaacccatgttggtggagtatatagtcgcattcgtcggttaaccgttttaccgctaaccaccattcggacgactctatgggtattccattttcattattatcttgaatcattgtatcgataatatctctggttgcttctaatccttttcgtgcaattttatctatcttctcccaggcatcattctggggatcatttgattgccgttgcgcaatcaatcgtatactcgtcaaacactgggcaacggagtcatgaagcatgatagcgttgtcgctattttgcagagaaaaagaatgttgcagttcgtactctttgctttgataattttgaaggtgttgttcatttgtcgtcttccaccaatgaaaaccatatccgacaatcacggtggctgctgcatacatcagaaacactgttatgctgattatgtctatctcgccattattccatcgcgctatctgatagcattgaattcctaagaatacaaatatacctaaaactgtcgtgatagagatacccgtttcatatgcagtgagtccgatagtgcaatagatgccccagaaacggcttggcccatttaggacaggtaagctacacgcaactgattccataaaaattaatcctacgaaactaatgcgtgggaaccatagggcgattaacagcaatccgatgtggatgaagccaaataatatttcatacgcagatgtggtgggtctctctgtccaatcaattatcgaaaaaaataaggagagtaacactataattaatctgaatggatgttttttgatgttactgttcataatcacctgtccagatagctactgcttggcgcactgtttccgctttgagcttacgacgagctctattaagatatgttgctgcactagcctgtccaatttgcatgcgattcgcggcttctgatatggatagtcctttgctgagaagaatcatgatttcttcttctctgtcggataacagcatgcggatgtcatttgtctcgtgtttcagtcgcatatgcgcattacgggccgtttcgaacccatttccgcagccccccttatttaatacccaacgcgtaacttcagcgatttgtctttcttcgtcttttgcaactagtccttgtgccccagcctgaatcagccgagaaatgtaccgttctagggggaaagccgtgatgccaagtagcagcacggatgcgcttcttttgcgaatctgacggcatacgtctataccagacattccgtcaagagacatatcgaacagcagcaaatgcggtgtatctacggcacttgagcatctttgtacagcctctctcccgctccgagtggtccacgtaatgcttcctaagtgattgtattcgataatctgttgtaatccttttaacacaattgcgtcattatccagcagtgcaatatgggtggcggctgatgcaaccgccgtgctatggtagcattccacggaagagtcctcttctctcggctcattattcatcttgtcgataatatatagttatggtatgtctctttttatgaataggttgcaacgacctattcgttggataggcacagatagccgctggtcatattttgatttgttctttacgcttgacgtttttctcctgcggttgctcttcgatgctttgctcctctcgatttttcacctgatggaaagtcgctgagaaccccgagagaaaaaaccaagtggacattcggctgtccgtgatcaacgctccacgaaatggagcgggggacgaaccagccgaattccatcgtctgttctaacggttcatgttgaaggaatgtgaggccgcccgtctgatctcatcggaattggacaacgcacaaatagcgttcgtggcgtgtctgttcaatggaaagcggccgttgtcaaaggatttgcctgctcattgcttgttgctcactgttcaactgttatgcaacacaccttgacagttaagcagaacagttatactgtgttgtataacagctaaacagctggggtgctagtcaaccacaatcgaaaggggcataggtgaaactgatcatctcatccgtgtccggtgaacccatctacgagcaaatcaaaacccaaatccattcggcggtgctcagtggcgagttgaaggcgggcgaggccctgccttccttgaggaaactcgccaaggagctgcgcatctccgtactcaccgtcaccagggcgtacaacgaactggccgatgagggcgtggtgcagaacatccaaggcaaaggcactttcgtgatggacaagggcaacgaactgatgcaacgtcagctcaaaacccggattcgcgaaagcctggccgaggcaagccggggcgccaaagccgccggcattccgctggacgcattggaccgcatgctcgaagaggaataccgcaagaaataacctcaagaaaggaccatggccatgaccgccatatccgaatccgacgcgatggcgttgcaggtcaccgacgtcaccaaacactatgattccggcttcacgctggacgacgtgaccttcgacctgcccaagggctacatcatgggactgatcggcccgaacggcgccggcaaatccaccctcatcaaactcatcctcaacatgatccaccgcgacgccggttcgattcacgtgctcggcctcgacaacatcgccaacgaggagcccgtcaaagaacaactcggcgtggtgttcgacttcagctacatgcatgaacagtggcaagtcaagaacattgaacgtattgtcgcgccactgtatccatcatgggacggtggatgctatcgcaagtatctggatactttcggtcttggtggtgcacagaacggcaagaaacatatcaaggatctttcccgcggcatgcagatgaagctgatgctcgccatcgcattgagccatgatgccaaactgctgattctcgacgagccgaccagcggactcgatgtgcttgcccgcgacgaactcatggatatcctgcatgcctacattgaggatggcgaacattcggtactgttcagcacccatatcactgccgacctcgaacgtgccgctgacttcattacctacatcaccgatggccgtctctactacaccggtccgaaagacgagtttgaggaatcgttccgcctgattaagggcggtccagacgaactggcacaactgcctgcggacgtagtgctgggctcacatacgtatgccaccggattcgatgcgctggtccggtcagacaggcttgatgctgttgcgtcggtggtttcggggcttgtcgttgaatcggcttccattgatgacatcattcgactgaccaatgcccatgattccaatcgtgacttgagcgggaggtgagcggccatggaggcaatactgagggtgtcgcggtctcggcaacatgcattgaccactgcattgcgcgtcgatatggcctacctgtgcgtcggcgaacggactgtgttctcgttgttgttggcaccgttgttctccgtcatctttcaaggtgaagtttatggtgatggcttcggctatcgcatgggtgtcatcatgacggtattcacctgcgccatgtgggtgctgaccatggcggttgctgacttacagaacggatatcgacttcgtggcattattccggcttcgaggaagagtcaggtggccgcgcgatatgtggttggattggtgatttccgtattgtcgatagcgatgatcgtgctgattgacgggttgcaagtgctggtcaatccggattggtcattcgcgggcaatctgtgggcggctccgttgggaggtttctgcaccgcgctgatggtcgcgcttatcgtgcccacgggttatctgtggaccaaactaggcggtcttcaagtcacgatgatggtgatttatgtcgttgtattggctggatccatactgctatctattttgcctgtttcggtgaccaaaggattggcccatgccgcgaatgccatcatcgcgcaacgattgtggctggttattgcggtattggcaacgacggttgtggcatatggaatctcgtatgtaattgcctctcgcatatttgcttcaagggaatggtgacgatgagctggaaatccgtagtaaagcaatgtcgattcgattgtgtcgggacgggtctgttcagcgtggcgaatatggtatttctgctggttttcccggtgctgtctatcgtggtatcgctggtgatgatatcgacccacgtcgatgaacacgttgttagtggtctgatgggcggactcggaggtttggcatcggcgatggcatgtatgagtgcattggggcctgcgtcatccgaggaatctgcagggcacagtgccatgcgagggctgattcctgtttcacgcactgcacaagttgtaggtcggtacctttttctgttggtggttggcctgctctgggctttggacgtggtgatatgcggcggcgtcttcattgtctttggcgatatagcagatatggggtggatcggtaccttggcagcaggtgctttcatcttcgctttggctatcattcttgggtcggtgctgctggcctgtgcataccggttcaccttccgcaagatgatggtggcctctggcgtggtcctggttggcttgtatgccgtcattgcgctgctgtcccgattgcctgttgactggcaatggcttttgctgaatattaccgatttcctgacgatctggtggcatacggcgcttgttctcgccgtgttgtgtctgctcgcatattttggctccatgcttatagccatccgcatctatcgagccaaagaactctaaccgcgcatttgtccgaccgcgatgatcttcagccacatgtcgatcggcagcggcacggtgcggaacatcgcgccgccgaattgcaccaccagcacctgaagtgcgaacatcagcgcgaacacgccgatcatcactttattgcgtagcggattggcgaacaggctggcgttgcccagctcgcggctgttgaaggcgttgaacggctggaatactacgaacagcgtgaacagaatggtcgactgctgaacagctggaataccacgaacagcgtgaacagaatggtcgactgctgttcggcggtgccgcccatgaagttcgtccagcttcgcgagcttctcctgcagcggcgtcataccggtgttggcggctttggcgctcggcacgctttattgcggtttgggccgagcccttcgccgcaatgctgtctactccctcatgggactattcagttgcaggaacagaatctgacaagccacatggattttcccattcgccggcagcatggcgattcccgccttcctagaaaattcaagcaacacgccgttggcccattgccggatgttcaaccgagattcgcatatcttgactcatacggcaaaactgttatatttgatgtagaacaaatagaacagttcttgagaggggtggaattgaccgtgattgtggaaatcgatcagcgcagtgacgtgccgatttacgagcagctgcacaggcagctcatcgcagccatcgcgggcgatgagctgtcgccaggtgactcgttaccgtccgtgcgctcgctggccgtggaccttggcatcaacctgcacacggtgaacaaggcctatgcgctgttgcgtgacgagggatacatcgttatgcgtcgtggtgccggtgcaaccgtcgccgagcatgacggcgggggagaagcaccgaaccgaactgccgaagcacaggatgagcggatgggcgaggaactctatcgccttgccttggcctacagggcgcgcggcggtgattcggccgcattcctcgatgccaccaaacggcaatgcgaacgggcatacggcgtgcgctcctcgcagagcgttactgacggtgcaacaaaaggaaatcaggggagataacgatgaataatacagtcgtgtcgatgaacatcgcgttgtgtgcgtttttactgttgccggtgatagtgaccgccggcctggcaggggttccatgggttaccgaccggcatgaggtgttcggtgtcacagtgccggccgccgcccatgtcaatacgcgcattcgcggatttaaagtcgcgttttcgggaattacggtggcgcttggcgtatgcgccatactggtctcgctggccgtttggcaactctgcggagtcgacgcggcgttctggactgtgtccatcgcagcggtggcgattgcgatatgtggtttcgtgctgcagcagatgtttcgccgcaaagtactatccatcaaagtcgatcagggatgggaggcgtccagtgcccgccgtgcagcattgataggtgagcgggacaatcccgacccgatgagcttgaagtgggaattgctgcaagtcgtttgtctcgctgtcaccattgctgtcgggttgctgggctatgaccggatgccggagcgggtgccgattcatgcggatatcgccggcaatgtgaacggttgggccgagaagagtccgatggtgatttggtacgccgtgctcgcgcaggtggtgctggcagcggtgatggtggccagccatgccgcgatcatctacgccaagcacccgattgatcccgaccaccccgccgccaccgggtatgcctatggtgtgttctcgcgggtctggagcatctacgtgctggtcatcggactgctggcagccggtggattgggcctaggcgttcagcttgtcaccattggcgtgctggatatcaatctaatcggcatcatcggcatgttcatcgccgtggcggctctggtcggcgcgctgatgatcggcgtgtattacgggcagaacggggcgcgcgtctatgccggtgttcggcacagtgacggcggtgacatttcggacgataatgccatgccgtatgacgatgacctgcactggattggcggcatcatctacatcaaccgtgacgatcctgccatcatgatccccaaacgtttcggcgtcggctggaccgtcaacctcgcacgccccagcgtgatcatcggcactatcgtgctgttggcaatcgccataggactgccagtcgccgcgatactgatgtaaacgcaattctgatgtaaaaaatggctccccgctctgaggggagccaatgtgctggtatgttttacagcgcctgggcggccttctccacgtagtcctccatgccgtcgatggccacgacgtccttgaaccgcacgtcggcggtctcaagaccacgcagggcggccggggcggtggtgccggtctcgtgggccagcacatccatgcactcgaagtcggtgccggtggcgtcgaagcccaatgcctcgttcaccacgcgcgggaacttgtaggggctggcggtggagagcagcacgcgcggggtcagcgggtcgcgcggcatctgctcaagcaggtagtagccgcaggcggtgtgcggatcgatcacgtagtggttctcgtcccagcagtgtttgatggactcgcgtacctgatcctcatcggcccaaccggtgccgaagatctgacgaatcttggccagcagttcttccgggatctcgtacgtgccccacttgttgaggtcgttcatcagcatggagatcagacgggtgtcgccctcggacaagtagtacagcatgcgctccaggttggaggagatgaggatgtccatcgagggggagatggtctggaagaacgggcgctggcggttgtaggtaccggtggtcaggaagtcgaacagcacgttgttcttgtcggaagccaccacgaggtgcttgaccggcagaccgagcagcttggcatagtagccggcgaggatatcgccgaagttgccggtcgggaccacgaactcgacctcatcgccgacgttgatcacctggtcggcgagcagctgggcgtaagcggagaagtagtagacgacctgcggcaccagacggcccacgttgatggagttggcggaggaaagcaccacgtgcgaattgccggcgagacgctcggccagggcacggtcgccgaagatgcgcttgaccgcggactgggcgtcgtcgaagttgccttccacggcggccacctgcacgttggagccggcctgcgtggtcatctgcagttcctggacctgggagaccttgccttccgggtagaagacggtgatcgcggtgcctggggcgtccgcgaagccggccagcgcggccttgccggtgtcgccggaggtggcggtgaggatcatgatcttctcgtccgcgtcgccatcggccggcgtggtgtgcgccatgaagcgcggcaggatctgcagcgccacgtccttgaacgcggaagtcggaccgttgaacagttcgagcacgtaatcgtcccccaggggcttgagtggggtgatgcgctcatcggaccactgttcgccgtaggcgtcggcgatgcactggcccagctcctcggccgtgaagtccggcagcagcgcgcccagcacctcggcggcgatctgctggtacgacttgcccggcagggaggccacgtccaccttggtcttgcccaacgcgtccgaaacgaacaggccgccgtcattggcgatgcccttacgaatcgcctgcttggcggtcagcgaatcggtggtgctgcgggtggaatggaaggtggttgtcacgatgaatccttctgcctgaaagggatgatgaatccacaccagtttagcgtgggccgtgggcagaagggccgtccgtctcgcatagccgaccggtcaaaccggcgaaaatcaccattgccatcgaacggggaccggccatatcatgaaacaggccggctacaaaccggccatacagtaaggcggcaacggcgaatcaattgtcgcccataccaaaggagcacccatgaccgcttcaccccttgcgcagaaagcgaccgatgctttcaacgcgccgatctgcgaaaccgatcctgagatcgccgaactgctggactccgaactgggccgccagcgcaatggccttgagatgatcgcctctgagaacttcgtgccgcgagcggtactgcaatgccagggctccgtgctgaccaacaaatacgccgaaggctaccccggccgccgctactatggcggctgcgaatacgtggaccaagtcgaaaccatcgcccgcgaacgcgccaaggccctgttcggcgccgaatacgccaacgtccagccgcactccggtgcccaagccaacgccgccgtctaccaggcgctcgtcaagcccggcgataccgtgctcggcctggccctcgaccacggcggccacctgacccacggcatgaaaataaacttctccggccgcttctaccatgccgaggcttatggcgtgaaccccgagaccttccgcatcgacccggaaatcatccgccagcgtgcgctcgaaacccacccggccatgatcatcggcggttggtccgcctacccgcgcatcgaggacttcaaggccatgaaggaaatcgccgacgaggtcggcgccaaattctgggtcgacatggcccacttcgccggactcgtagccgcgggcctgcacccgagtcctgtgccgtacgccgacgtagtctcttccaccgcgcacaagaccttcggcggcccgcgctccggtttcatcctcgccaagcaggaatacgccaagaagctcaactcctccgtgttccccggccagcagggcggtccgctcatgcacgtgatcgcgggcaaggccgtgagcttcaaggtggccggcacccccgaattcaaggaccgtatgcagcgcacgctcgacggcgccaagattctcgctgaacgtctcctggccgacgatgtcaaggccaacggcatcagcgtgctgaccggcggcactgacgtgcacctggtgatggtcgacctgcgcaacagcgagatggacgggcagcagggcgaggatctgctcgccgcctgcggcatcaccatcaaccgcaacaccgtgcccttcgacccgcgcccggcctcggtggcctcgggcctgagaatcggcacgtccgccctggccacgcgcggtttcggcccgaaggaatatgaggaggtggccgacatcatcggcaccgcgctcgccgccggcccgtccgccgacgtgaccgtgctgaaggcccgcgtcgacaagctcgccgaagacttcccgctctaccccgacctggaccagatccactgatttgctgattcgctaatccaccgtggtgtaccggttagtgatgattcgctgaccggagcgcatcacgtcaccggcttcccgcctgagacggaggggagccggttctgtttgcgattcaaaacgtcagacatcccataacaagcgggtcggagtaagcaatcagccgcgttgtgagttacgcttgactgttatgagcgatgaattgagtcctgaggtgttcgacgcggtgtgccgccaggccgatcaggccgcacgcgcgcaggagcgtcttgcacaggcaaataccgaagccaaaaacgaactgctgctcgccattgcggatgcgttggacgggcacgccgcggacatcgaagccgccaacgcgctggacatgctcgaatccaaggaaaacggcatggatgcgggcaagcttgaccgcctgctgttcgacgtgccgcgcgtggccgccgccgcccaaggcgtgcgtcatgtggccaccttgcctgatccggtcggcgaaatcgtgcgcggatacaatctgcccaacggtctgcgccttacccagacgcgcgtaccgatgggcgtcatcggcatgatttatgaggcccggccgaacgtcactgtggacgtggccagcctgtgccttaaatctggcaatgccgcgttgctgcgaggcggtcacgccgccgaacgcaccaatgctgccacgctgggcgtcatcgccccggtgcttgaagcacacggtttcgaatccgcactggtgcaatccgtcgaccagtacggacgcgccggagccaccgccatgatggaggcgcgaggccatatcgacgtgctcgtgccgcgaggaggagcgggtctgatccaagccgtcgtgcgcaactccaaagtgccggtcatcgaaaccggtgccggcaacgtgcatatctacatcgacaagtccggtgatctcgccaaggccatcctgatcatcatcaacgccaaaacccagcgcgtgggtgtgtgcaatgccgccgagaagctattggttcataaggatgtcgccgccgaattcctgccgcagatcgccgccgctctggccgaggcgaacgttgtactgcaggccgacaccacgtcgtatgacatcatctccggcgcggcgatcgagggccttgacctcaaccgcgccaccgaggaggattgggacactgaatatctggccctcaagatgggcatcaaggtggtgccggatctgggcgcggccatcgaccacatcaacacgcattccacgggccacaccgaatccatcatcgccgaggattatgcggccatcgaggaattcgccaagcgcatcgactcggccgtggtcatggtcaacgcctccactcgcttcaccgatggcggcgtgtttggctttggtgctgagcttggcatttctacgcagaagatgcacgcacgcggtcccatgggattgcgggagatgaccaccaccaagtggatcggttacggaacaggccaggtgcgcgcatgaacgaggacggcaacatgaacactacggctgacacggcaaacaaggcaagcgaactgcggcccgacatcgacctcaacgatcccaagctcggcctgaagatcgcggccgaacggctcagcatcgtccgctatgtgttcctcgtgcagattgaggacggcatcgcctccgccgcccagcgtgcgtcgctcgaatacgcggacgccgtgctcatcggctggcccgagaccgattcacccgaagtcgtggacctcaacgatgcccagctcaagatcgtgcgcgaacacatggaactcatggaaggctacatcggcaaatacagccagatggagcacgacggcgacctcgacggcatgaccgacacgctcatccgcatcaccgagcgcgtggccgaggtccgccgcctctaccagccggacttcccgctgcccaccttcgccgagattcgtcgcgtggtccaagacgaatgggatgaagacatgggcaagatcgatcccaaggaagacaatccctccgccggcgaaatcgaagaggaaaccgaatcagccgatgacgccgccggcgagggcggccaggcatgagtggtgttaccggcagccacaaaacggctgcgtcagttcagtccgaaaaaacagtggaatccgccgagcccgccgaaatcattgccgtcacccaaggcgaaaccgaacggcgcatgtccgacctgtccgtaccggccggggccagcagccacggcaaaggcaggctttccgcacgcggcaactggcatacacgcctgcgcgtcggcatcatgggcggcacgttcgacccgatccacaacggccacttggtcgccgcctctgaagtcgcctgggtgtatgacctcgatgaggtgattttcgtgcccaccggccgacctgtgttcaagctggacaagcacgtcaccaacgccgaggatcggtatctgatgactgtgatcgccaccgcatccaaccccaaattcaccgtctcgcgtgtcgacatcgaccgtccgggcgtcacctacaccatcgacactctgcgcgatatccgcgcccaacatcccgacgccgagctgttcttcatcaccggcgcagacgccgtggccgaaatcatgcagtggaaggacgccgacctcatgtgggacctcgcccacttcgtggccgtcacgcgccccggctactccagcccggacggcgtgaccttgcccgaaggcaaggtcgatacgcttgagatcccggccttggccatctcctcgaccgatgtacgccgccgcgccgaacacgacgagccggtctggtatctggtgcccgacggcgtggtgcaatacatcggcaagcatggtctgtattcgtacgaggactgacgattcgtacgaggactagtgtgcatttgtacgagggctggtgaggattagcgcgaatcagcgcgcatcaatcctcgccagtgcaaggatgaacggtcaggccagtcccatcttgattttcaatgtcattacgcgagtcgccgccgccgtcaccttcgaagcgaaagccggatcggactccgcccgttcgttgaggccgtccacaattggctttacataatccgtctgaccgatgcaggacatgtcgccgcccgcctcgacaagatttactcccaattggcttacatcgtagctgctcaacgcttcggcagacatcgaatccgaaatcaccacgcccgtgtacttcaggacgttgcgaatatgaccgtcgataatcgtagaagaaaacaccgccggattattcgggtcgatggattgatacgtggctaacgacatcatcaccattgcaggatcggccttggtaatcgcctggtcaaaggcacctgcctcggccccgtccaacgtggtggtcgtatccagaatgccttcggtggtgaagtcggtattgccgcttaccgcgcccaacccaggataatgtttgaccgccgcaccgacttgagcgtctcgcaaaccttcaataacggcgatgccatgttcggcgttgccggccgcatccaatccgaaatcacgatccagcgcgccaatcggagcatttgaggcacgattgccaaccactgtgccaagcaccggtgccaaatcgacatttatgccagcagtggctaattgcgaaccccacgtgcctgccgattgacgcaatgcgtcagcggacattgtgccctgcacaacggcactgggcattgtgtcgaaaccggtaccagtcagatgctgtacctgacccccctcctgatcggtggcgatgatgagacgattgccggccggcgcatatccttggagttgcgcggtcgcggtcttgaccgtatcgacgccggtattccaattgccaatgagaatggccgagccaatgtgctcgtcggcgattgttgaagccaacgaggagggttcggaaccggcgaacaacggcaccatcactaactgtcccacacgttcctcaagcgtcatggcggataccgcacgttgggcttgtgccgccggatcgtcgttcttcttcggggaaggaacgtcggtgcgcggtaacgcactcgtctgggaggtctggggagtggtggtgttgccgtttgatgtggatttggcgaaccatccgacatgccatccgtagactgccacaccggccaacaccaccgccaaagcacatattgccgccacgattggaatgctcctgtgccgaagttggcgtgtggcgtgtgctgagggacgcatatgttgtggccgttgtctgttcatagcggcaagcgtagaacagagcgtagaacaggatgttgcctcattctgtgctcagggcataaccgacctcccgccctttcgataggcttgagttatgtcttttaacgatcctttctcagtactgttcggcaatggcggcgattcacgacgcaacaatgcgaacaatgacgatccgatcatcctcgatgtcgaggccgatggggacggtccggcccacaacaccaacgctggcccctccgggtcatcccgccctccacgtggtccggccaatccgcgtatcacccgtaagccagcgtccggtggctcaggagccagccgtggcagcaagattctgatcggcgtggtgctggccttggccatcatcgtcggtctgttcttcggcctgtcccgattcatcaccgatctgatgtggtacggccagctcggcttccagtccgtggtctggacccagctcggggtgaaaatcggtctgtgggtggcctacgcgctgctcatggccctgaccggcttcgtttccgcctggctgtccattcgagcacgccctgattcggccgacggttccaccattcgcattaacggcgatgtggtcgaggtcggcaaatccgtcagctcgaaaaccgctcgccgcgtggccgtggtgatttcgctgatcgtcggcgtcatcttcggttcccagtttaacgcgaactggagcgagattctgctcatgttcaacgcgcagtcgttcggcaccaccgatccgcagttcggtctggacaacggcttctacgtgttcgtgctgccgggcctgaagctcgtgctcgccgccgtggccatgctgctgggcgtgggccttgtgttttccgtggtcacgcatgtgctgatgggcggtatccgcattaccatgccggttaacggacgcggcctgttctccattaccaagcgttgccgtcgccagcttggcatctggctgatgctcaacatgttcgcttgggcagtgcgccagatgattggcgtcttcgaccagctcaccgtgcagggttcacgcatcaccggtgcctcctacaccgccgtacatgccaacatccccgtcaccttcatcatggccgtgctgaccgccatcctcggcgtggtgctgggcatctggctcatgcgctcccacacgctcgaaggccaggcgtccatcggcgtgcgcgcttccgccgcgctcaaggcctggcgtgtgccggtgacctccattgccgtcgtggtcgtggtgggtcttgtgctcaccgtggcatggccggtgctgttgcaacgcttccgcgtcaacccgaacgcacaggagatggaatccacctacatccagcgcaacatcgacgccacccgcgccgcctacggtcttgacaagctcaagaccgagcaatacaaggtgaccgacaagggtgagcagggcgctctggccaaggaggccgacaccaccgcgcagatccgtctgctcgacccgcaggtcgtcagccccacgttcaaacagttgcagcagtccaagcagtactacaccttcgccgacaccctggcggtcgacaagtacgagattgacggcgtctcccaggacaccgtgattgccgcccgcgagctcgatctggccggcaatgacaaccgcaactgggtcaatgaccacaccgtgtacacccacggttacggcgtggtggccgcctacggcaacaaggtgaccgccgacggccagcccgaattcttcgaatccggcatccccacccagggcaagctcaccgaatccgaaaagtacgagcctcgcatctacttctcgccgaacaccaccgaatactcgattgtcggtgcccctgaaggcacgcaggcttgggagttcgactacccgaccggttcggaaggtgctctgaccacgttcaagggcgacggcggcccttcggtcggcaacctgttctccaggattctctacgcgatccgtttcggctccgatcagattctcttctccgaccgtgtgaccagcgaatcgcagattctctacgatcgttcccccaaggagcgcgtggccaaggtggcaccgtacctgacgcttgacggccgcgtgtatccggccgtggtcgatggccgcgtcaagtggatcgtcgacggctacaccacctccgacgcctacccgtactcgcaaataaccgacctcggctccgccaccaaggattccaccaccgtctcttccgcaacggtctcgtccctgggctctcagaaggccaactacatccgcaactcggtcaaggccaccgtggacgcctacgacggttccgtggacctgtacgtgtgggatcaatccgatccggtgatcaaggcatgggagaagatcttccctggccagtaccaccagctctccgatatctccggcgacctgatgagccacatgcgctacccggaaagcctgttcaaggtacagcgcgagctgctctccaagtaccacgtgacctctgccagccagtactactcaggcgaagacttctggcagacgccggtcgatccgaccgaatcccagtcccagcaggaccaggacatcctgcagccgccgtactacctgaccttgcagaccggtggcaccgaggaaccggtgttctcgctgacctccacctacattccggctggccagtccacccgtgagatcctgaccggcttcctgtcggtcgactcggatgccggcaatgagaagggcaagataggctcgaactacggcaccatccgattgcaggagctgcccaaggattcgaacgtaccgggccccggccaggcgcagaacaacttcaacgccaacgccgatgtatccaaggaactgaacctgctgcaatccggcgacacgcaagtggtgcgcggcaacctgctcaccctgccgctcggtggcggactggtgtacgtgcagcccgtgtacgtcaagtcttcgggcgtgacctcattcccgttgctcaagaagacgctggtcgcattcggtgatcaggttggattcgcggatacgttggatgaggccttggatcaggtgttcggtggcaattccggtgcggccgcgggcgatgccgagaacgtgtccggtgaccaatctggttccgataccaatggtggtcagtccggcaccacggacggaaagtcggattccggctcgtcttccgaccgcagccccgaactccagcaggcgttgaacgatgccgcccaagccatgaaggacagccagtccgccatgaagaacggcgactggaccgcctacggcaaggcgcagcaggagcttgaagacgccctcaacaaggccatcgagctcgacaagtaacttggcttccctcagggtgaggggagctatcgccgaaggcgactgaagggagtcggttacctcaactgacatagcccgtccttatcataaggacgggctatttgcgtattcaaaggaacttcatgccatacaccttccatccagccgtcgaatccgacatccaagccatcaccgacatctacaacgctgcggtggtggcgggtggggccaccgccgacctcaccccgcgcaccctcgaccaacgccgcgcctgggtcgaatcccatacgccgccctacggcgtttttgttgtggaatcggaagacggttcaatcatcggcttcggtgcgctctccgtgttctacgatcgtgccgggtatgacggcgtcaccgatttggcctattacatcgatccggcatggcaaggcaggggagtgggcacgttcatgcttgacaggctgctcaccgaggcgcgggcccgccacatgcgcaaggcctgtggcatcattttcgccgataacgtcggctccattgccctcatgcgccgcttcggcttcacccaattcggcctcatgcccgccgctgccaccgactccaccggcaccatgcgggacatgtcctactggtatttggacctgtaggcccgaggcggtttacccttgctctccatggattccggtgtcctataacactaaaaagttgtatcggatcagctcttttcctcgaacgccatatatcggacgcgcttatcccagataacggcaaactacgggacggcacgcgattttcgtccgtttagacgtggtatcccgcaatcacgtgggatgccacacacgtcaaacgatgcacatagctcgcgtcccgcaactcttcctgcgaaatcattggaattctgccattcttatgattcggtgcagataacgtgcgataacgcttgcgggatgccacgccaagaacgcccaaaatccgctgccgtcccgcaatatgtcatccgattgcagggaagcgtcatctgtctgagctgtttcccttgcttggcgtcgtaaacgacaagttgttgattgccgctgcatgtttctcctatttgagaaccgaatgctacatactgagattttttccaaccggagttgatgttaaagtgacgccaagctgggacacgctgttcgtgtgcggcatcctgtgcaacgtgctcgtctgcctggccgtgcgcatcggattcgccgcgcgctccgtatccgacaaggtgctgggcatcctgctgccgatcgccggattcgtggcgatgggcttcgaacactgcgtggccaacatgttcttcctgccgatgggcctggtcgccaaaacgtttggtttcggcgccgacgcggcgggcgtcgcggcgctcgacgtgtcgggcatcctctataacctgtccgcagccacgctcggcaatatcctcggcggccctgttcgtggcgctggcctactggtacctcaacggcaaacagcgcgaaaaggtcgctggcggcactcctaatagacgtgattcacccgtccccatctcttgtaatactggtattacaagaaggtgcatatgactatggccatggtgacggcgcgcgtcaatgccgaacggaagcgcgacgcggagaaagtgcttaagcgtaatgggcgcacctattcggacctgattcgtgatctgaccgactaccttgcggatacgggggaactgccggaattcgagcgtctgacgctctccctgattcaggagcgggagcgtgggaaaaagcaggagttgattcaacgtttcgccgaccggaatttgccggaggcggaaggcgatctttcggatgaggagattctcgcgcaggcacgtatggaacgatttgggggacgggatgaaactgctgtttgacacgaatattctgctcgatttgtgcaatgacaaacgagcgcctttccataaacaatgtgttgatttgctcatggaagccgttgcacagccaaacattgagatcatggcgccggtatcgtcattgaatgacgtgtattgcgtgttgcgcaagcattatggcgaggagcgggcggcgcgagacgatatcggtggactgatggaattgttcgacatccgtccacttatggaacgccatgcgtgtatgtcgtaccggtccgatgagcccgacttcgaggacgggctcatccgtgccgttgccgaggacaatgacgccgacgtcatcgtgactcgtgacgtcgaagcgtttcaccattcatcggtccgatcgatggatgccgagcaatgccgtgccctgctgcttgccgattccaaggcttgacggcggcgttgagtacaatcttgacggttgaatccggccgggcatgggccagtgcgcgaggcgaacgcgcgcatgacgtacggaacgtacagaacgtgcatacgggaatataggaagacggacgaggagtggattatggcatcggatttctggctgattgcgggactgggcaaccccggcaaaaaatatgaggacacgcggcacaacatgggcttcatgaccgccgacgtgctcgccgaacgttggacggtgaacttcgccgaccacaaaggtctggccatgctcggtaaaagcgtgatgaacctggacggccgcaccgtcaagttctttctggccaagccgctgacttatatgaatgattccggcaatgcggtggcttccattagcgcctattaccagatcgagcccgaccatatcgtggtgattcacgatgacatggacttggaattcggtcgtatcaaggtcaaggcaggcggctccgcagggggccacaacggcatcaagtcgattgaccgttccctcggcacgccgaaatacgcgcgtgtgcgcatgggcgtcggtcactccaagcgcggtgcgaacgcgcatgacaacacggtgaactgggtgctgggcggattcggtccggaccagcgcaagcagctgcccgaattcctggctgacggcgccgacgccgccgaggacatcatcttccgcggtcttgccaagacccaggagaagttcaatggccggtgaggcgacgcacccggacctgatcaacggctcactggtaggcatcctgtctgagctggaacaggacaagaccttccttagactcgccactggtgacatcgaggtttcggacgacatcgacaattccgttctggccggtgtttccgaaggcttgcgcccggctttggccgccgccatcgggcagggtgtgaccggcaaacccggcaagccggtcgtgctggtcgtggcctccggccgcgaagccgaagagaccgtgggctcgctgcgctcctggtatgacggcgacccggacgacatcgcccagctcgaagcctgggaaaccctgccgcacgagcgtctgagcccgcgcgcggacaccgtggccagccgcatggccgtgttccgcagactcaagcatccgagcgataccgatccgatgttcggcccgattcgcattctcgtcatgccgatccgctcgctcatccagccggtcgtccaaggactgggcgacgtcgagccgctcgtgttcactgtgggggaggacctgcccctcgacgaagccgccaaacgtctgatcgaaaacgcctacacgcgcgtggacctggtcatggaccgtggcgagttcgcggtgcgcggaggcatcctcgacgtgttcccgcccaccgcaccgcacccggtgcgtatcgaattcttcggcgacgaaattgacaccatcaaggaattccacgcctccgaccagcgtacctacggcgacggcctcaagaccatctgggccaccgcatgccgtgaactgcagctgaccgacgccgtgcgcgcccgcgccaaagccttggtcggttcgattcccaatgctgaggacatgctcgaatccatcgccaacgccattccggtcgaaggcatggaatccctgatgcccgcgctcgtggaccatctggaaccggtgggctccatgctgcccaagcacgccgtgatcctcctgagcgacccggagaaactgcgccgttccgccgaagacttggcaaaaaccgcgaacgagttcctggccgccagctggcatgtggccgcttccggccacggcgccggcgcgcccatcagcttcgacaaagccagcttcctcgactatgcggaaaccatcagctccctcgaatactccgaacatccggtgattcgcctcaccagtttcggcgtggacaccacgctgaccggccatgtgcagctcgacgcccagaacccggccgaattccgaggggatgaggccaaggcctcccaaggcatcgaaggcctgctcgacgccggcttccacgtcaccatcaccgccgctgcggccggcaccttggccaggctcaggcgcgcgatcaacactaccggcatcgccaatttcgacgtcatccgctctcaggccatcgacggcttcgtggacaaagccgccaaaatcgccctgctcaccgaacgcgacctgaccggccgcacttcggccgtggccgtggccaaaacgccgaaacgccggcgcaaggccatcgacttggtggaactcaaaaaaggcgattacgtggtgcacgagcagcacggcattggccggttcatcgaaatgcgccagcgcaccatcggcaccggcgccaacaaaaccactcgcgaatacctggtcatcgaatatgcgccttccaagcgcggcgccccggcggacaaactgttcatccccaccgaccagctcgaccaggtcagcaaatacatcggtgccgaagcccccaagctcaacaagctcggcggctccgactgggcggccaccaaggccaaggcccgcaaacacgtccacgagatcgccgacgacctgatcaagctgtactccgcccgccagcgcgccaggggcttcgcgttcagcccggacaccccatggcagaaggaactggaagatgccttcccctatcaggaaaccgccgaccagctcaccaccatcgacgaggtcaaatccgacatggagaagcccgtgccgatggaccgcctcatctgcggcgacgtgggcttcggcaaaaccgaaatcgcactgcgtgccgccttcaaggccgtgcaggacggcaagcaggtggccgtgctcgtgcccaccacgctgcttgtccagcagcattacgagacgttcagcgaacgattcgagggtttcccggtcaatgtggcggccatgagccgattccagaccaccaaagagatcaacgagaccatcgagggtctggaaaccggcacggtggacgtggtcatcggcacgcacaagctgctgaacccgaaaatcaagttcaaggatctgggactcgtcatcatcgatgaggagcagcgtttcggcgtggaacacaaggagacgctgaaagccctgcgcaccaacgtggacgtgctgtccctgtctgccacgcctatcccgcgtacgctggagatggccgtgaccggcattcgcgagatgtccacgcttgccaccccgcccgaagaccggttgccggtgctgacctatgtgggcgcctacgaggatgcgcaggccaccgcagccgtacgccgcgaactgctgcgaggcggccaggtgttctatgtccacaatcgtgtgcaggatatctcgtccatcgccgacaagatccacacgctggtgcccgaggcgcacgtcggcatcgcccacggcaagatgggggagaagcagctcgaccagatcatccgcgacttctggcatcgcgacatcgacgtgctcgtgtgcaccacgatcatcgagaccggtctcgatatctccaatgcgaacacgctgatcgtcgaccatgccgaccgtttcggcttgagccagctccatcagctgcgtggccgcgtcggtcgcggccgcgagcgcgcgtacgcttacttcctgtacgacccgtccaagccgatgaccgagcagtcccatgaccggctcgccaccatcgcgcagaacacggcgctcggctccggtttcgatgtggccatgaaggacttggaattgcgcggcaccggtaaccttctgggcgacgagcagtccggccatatcgagggcgtgggcttcgacctgtacgtacgcatggtgtccgaagccgtggagaagtacaaggagcccgaagagaacgtcgagccggtggccgtgtccatcgacctgcccatcgaagcgtcgattccgatcgagtacatcgattcggacaagctgcgtctggaagcgtaccgcaagctcgcctccgctcgcaacgaggccgatttgaaggatctggaagaggagcttaccgaccgttacggcaagccgccggtcgaattcgagaccctgttcgacgtggcccgtctgaagttcaaggcccgcaagctcggcatttcggagattctcgcgcaatccaaccgcgtgcgcatcggccgtatcgacccgcccgaatccatccagatgcgtatgggccgtatttacaaaggcgcccaataccgcccggtcacccaccagctcatcgtacccaccccgttcaccggttccctgggccaaggccccctgagctccgaccaggtagtcctctggactaaccaactcctcgatgacttggcatggaggccacaacgatgaaaaaccaacacgcggcaacacttgccggctatgagattccccgcctcggcatgggcacaatggcgctcgccatcgaggggcgcccctccaaccgtgatcaggcgatcgagaccatccatgccgcgctcgatgccggagtccgttatttggacacggcttggtcctattatctgcccagcgcacccggcaccggcgaaccggaggatatgggctatggcgaatatctggtccgcgatgctctgcactcgtggcatggccccaaagatcaggtgctcgtagccaccaaaaccggctggctgcgcacgcttgacggcaacggcaactacggctggcaggccgacgcccgacccgaaaccatgatcgccaatgccaaggaatcagcccgccgcctcggtgtcgatacgctcgatctgctctactcgcactgcaatgatccgcaggtgccgtacgaagaccagatgggcgcactcaagcagctcttggacgaaggtgtggccaaagcggtcggtatctccagaatcgacaacgcggacatcgaagccgcccacaacattttgggcgatcgtctcgtggccgtccagaaccagttctccccggttcaccgcgaccccgaacacacgttggagacctgcgaaaaactcggtttggctttcgtctgctggtcgccgctcggtggattccttgacccgttcaacgagcatctgttcgatcggttccgcgaagtcgcgaagtcccacgactgctcctaccagcgcgtcacgctcgcgtgggaacttgcgcaataccaatatctgttcacgattccctcggccagaaacccgcaggagattcaggactcgttcaaagccagcgaactgaaattgtccgacagtgaaatcgactacctcaatggcaaggacgtcgactgagcgatttcgtccgtactgccttgcaatcaggcggcgcatcggcattgtgagcgctaacactaaattttgggcgtgttgttcacaacgtccacaaatcgcactactcttaagaatgtcattcaagatacacaaccgttttaaggagtagttgtggcagtaattgaaagcgtgtacgcgcgtcagattctggattcccgtggcaacccgaccgttgaggtctacctggagaccgaagacggcgctcagggcaagggtctggttccgtccggcgcctccaccggtgaagctgaggcttgggagcgtcgcgatggcgacaagtccgtctacggcggcaagggtgttcttaacgcggtcaaggccgtgaacgaggtcatcgctccgaaggtcatcggcatggacgctgctgaccagcgcgctctggacgacctgatgatcgagctcgacggcaccccgaacaagggcaagctgggcgccaacgccatcctgggtgtctccctggctgctctgtacgcttccgccgagtccgccggcctgccgctgtaccgctacatcggcggcaccaacggccacatcctgccggtcccgaacatgaacatcatgaacggtggcgctcacgctgacttcgccaccgacattcaggagtacatgatctccccgtacggcttcgacacctactccgaggctctgcgcgctggcgttgaggtttaccacaccctgaagaacgttctgaagaaggaaggcctgaacaccggcctcggcgacgagggtggcttcgccccgaagatgaagtccaacgaggactccctcaagtacatcatggacgccatctccgccgccggctacgagcctggcaagcagatcggcatctgcctggatgtcgcctcctccgagttctacaacaaggagaccggcaagtaccgcttcgacggtgaagagcgcgactccgcctacatgctcgactactacgagaacctcatcaacgagtacccgatcgtctccatcgaggacccgttcaatgaggaaggctgggaagactgggctgccatcaccgctcgcctcggcgatcgtctgcagttcgtcggcgacgacctgctggtcaccaacccggctcgtctgcagaaggccatcgacctcggcgccgccaactccctgctggtcaagctgaaccagatcggttccgtcaccgagaccctcgacgccatcgagctggccaccgccaacggctacacctccatggtttcccaccgctccggcgagaccccggacaccaccatctccgacctggctgttgctaagaacacccgccagatcaagaccggtgccccggcccgtggcgagcgcgttgccaagtacaaccgcctgctcgagatcgaggaggagctcggctccaccgctcagtacgccggctacagcgccttcaaggcctgcaagaagtacttggccaagtgagctgaaacgcccgtaaaggcgtgagtttccactgaagctcgatacccgtcgtgttcgtcaagtcgaatgcggcgggtattttcatgtgacatgagcaagtcgtcccgtaccggcaaacctggcaaaaccggcaaagcacaagtcaggaaaaaagggtcggcggggcccatagcgttcttcgtctccctgttcatcatcgcactcggcaccatccagctggtctccaccttccacacttatgccctgaacctggccgagctcaatggcctcaagcgtgaggaagcctcgctgatcgcccaaaagcaggagttggagaacgatatcaagcgttgggatgacaaggcctacatcaccgcccaggcccgtgaacgcctcggcttcgtattccccggcgaacaggccgtgcgtgtgctgcatcccgaagccgtgaccggctccgatcgcgaatcccagaaaacggaagattccaataccagcaacaaaaaagtcctgccatggtacagcgaactgtcttactcgctcaaaaaggccgatgagcctgtgaccgatagcgagtccggcaaatccgatacttccggttcctctgactcgtcatccaacgactcatccaagcagtccgataagtcagaccagaacaccccatccgatcagaacacccaacagaacacaggggagggaacccaacagtgaccatcgatatcgccgccaaggccaaggcccttgtcgacaccatgcttgccgagcccgccaacgaccatgacatcgaccaggtgcagcgtcagctcggccgatacccgcgcggcatggtcgccgtgggggcgcgatgcgtctgcggtaggccacttgccgtaatcacccgtccggtgttgcccggcggaatccctttccccaccacgtgctatctgaccggtccggaagccgtcaaggccgcctcccatgtcgaggccgccggcgtgatgcagcaatacaacgatatgctggccgctgatgaggagctcaaggccgcatatgagcaggcccataatctgtatctggcattccgtcacgaactggcaggccgtcttggcgacagtgaggagcatattgaaggcacttcggccggtggcatgccggtgcgcgtcaagtgcctgcatgccctgctggcccagtccttggttatggggccgggcgtcaaccccattggcgatttggtgctggaacgcgtcaaagacgagttcgatccgaccgtctgccgttgcacactggacgattgatcaacagatgagccaccgcgaacagcccattcatacgcactaagggatacgaggagaaggcaatgagcaaggaatccgtaaccgtcgccggcattgattgcggcacgaactccattcgactgaagatcgcacgtgtcgatgccgatggcatgcatgaggtggtgccgcgcatcctgcgtgtgatccgccttggtcaggatgtggacaagacccatcgttttgccgacgaagcgttggaacgcgcctatgcggctgctcgggaattcgccggtgtgattgccgagcatcccatcgacggcctgcgtttcgttgccacctccgccactcgtgacgcggaaaaccgtgaggagttcgaggatgagatcgaacgtatcctcggcgtgcgccccgaagtcattcccggcactgaagaagccgacctgagcttcctcggtgccacttccgtggtcaatcgcgacgatctgcccgccccctatctggtggttgacctcggcggcgggtccaccgagctggtcatcggtggcgacggcgtcagtgcgcccaccacccaggttcagggcgcattctccatgaacgtcggttccgtgcgcatgaccgaacgtcatctgaccaacgatccgccgacccaggcgcagatcgatgaggccgttgcggacatcgacgagcatatcgatgaggccttccgcaccgtggacgcaggcaaggcccgtaccatcatcggtgtgtccggcacggtgaccacgatgaccgccttggctatgggattgaaagaatacgatcacaccgtggtcgacgggcatcggttgagccttgaagacgcctatgccgtggacgacaagttccttaggatgacgcgcgccgagcgccgcgaatacaagaccatccaccccggccgtatcgatgtggtcggcggcggcgctgtggtctggagccgtgtgctggcgcgtgtcagcgaagccgccaaggccgatcatggtgaagccatcgattcgttcgtcgccagcgaacacgggctgctggatggcattgtgctcgattatggtcgccggttgctggctcaatagcgtaagtggtaagtgcctccagcgggctgagccgttaagcaaacagcccggtgggctgtttgcgttatatgcgacgccggcgacgctatcgctaccggctgctacaaacagcccactgggctgtttgtaggcgaagggagcggctatgccgcgacggctgcacgaagcgcagcaacccgcaagcaatgctcagggcaggagatagcttataatagaaaagttggcctccgtggcgaaatggtatacgcagtcgacttaaaatcgatcgcttcggcttgtgggttcgagtcccaccggaggcaccttgaaatcggcctgtggccgatgccgtttttttgcggctgtgccgcggtctctcccccagtcggcttcgccgacagctcccctcgtcagaggggctcgcagcttactatgtggagagcttataaggccgaaacaaaaggccgttaggctatgtggcgttgtgacgatgtacctgatgaaacgaggaatccacatggcttcacgctggaccgatgtcgaacgagtcgaacaaggcgccctgcccaccatgcttgcccaagccgtcattgcgggcactgcactcaccgttggtgccatcgcctgctcgggattctatctgtccatgatcggcaatgtggccgcactcctgccgtgggcgactatcgtgatactgatcgccgtggcgttcacctacatcgtcggcttcgccctgttgtggtgtgccgaagccctgaccctgcgtgccaacgacaaactcaagccatggctgtacggcgtcgtcggattaatcggctacggtgtgtggggcatgttcgtgatgagcacgatgatgaacacgctgaaccagccgctgaacggcgtggtgttgtcgaacagcgatgtgatggccctgaccgtcaactacgcggtgttcggcttcattgccttcctgttggcacaggcgtacgcacccaaaatcgccaccaagaagggactgaccatcgggctgatggtggtgcagatcgtattggccatcatcggtatcatcgtactggttatgatgttctccgcactatctcactgactgacttatcgctcgccggcacgacgcgcgcggccatcatcgcgcaaagcgaaagattccgggcgctaggctggaatacgatatcgtgatggcatgacgcctggtgacaccggcatgccgaaccagcaggggagaaggagccaaatgttcagtgtgcttgacatgttcaccatcggcgtcggaccttcatcctcgcacaccgtaggcccgatggtcgcggcacatgcctttgcctcctcgttgctggccgaccatttggtcgatcgcaccgcacgtgtcaaaatcacgctttacggttctctggcgctgaccggtctcggccacggcaccgatcgtgctgcgatggccgggctcgaaggcaatctgccggccaccgtggataccgaccacatgatgcgcatccgcgagacctgcgcgttggacgatactctgaacctcgccggcctcaaacgcatccatttcgactacgaccgcgacgtggtgttcgaacaatggaagcgcatggccgcgcaccccaatggcatgcgattccaggctttcgacgccgccgcaagcttggtcgacgaacaggtctggtattccatcggcggcggattcgtgcgcaaaggcgctcccgaagacccgatgatcggcattcatgaacgtcctccggaaggcacctcctttgccgacgcggacgaatcatcatccactgatttcggcgtcgaggcaccctacccgttctcatcatgcgccgaactggtgtcgttgtgccgggaacatcatctcagcatcgccgaacttgtatgggccaacgaaaccgcttcacgctcaggcatccaggtccgatccgatattgatgccatctggcgtgttatgcgcgcctgcgtggaccacggatgcacctcggcggagcccacattgcccggtggccttgacgtaccccgccgcgcgccgaagatgtatcggcgtctcgcttcgaattccgatgtgctgcgccgcgatagccggcgcaaagacgccgtgctcgagtcttccgacgccgcatgggtggatctcttcgccttggccgtctctgaggagaatgccggaggcgggcgcatcgtaaccgctccgaccaacggttccgccggcatcattcccgccgtgcttcactattactggcatttcgtggacaacgccaatgaacagggcgtggtcacgtttctgctgaccgccggtgccatcggatacctgttcaaacgcaacgcctcaatttccggtgcggaagtcggttgccagggcgaagtcggctcggcctgttcgatggcggcggccggacttgccgcagtcatgggcggcacgccggaacaggtggagaatgctgctgagatcggcatcgaacacaacttgggcctgacttgcgatccggtgggcggactggtgcagattccatgcatcgaacgcaacgccatggccgccaacaccgccatcaacgccgtgcgtatggccatgctcggcgacggctcacacatcgtgaccctcgatcaggccatcgaaaccatgaagcagaccggtgaagacatgatggccaaatacaaggagacctccaagggcgggcttgccgtcaatgtcgtcgaatgctgattgacatgtctggtattcaccagcatgatgaccggaatcgacgtatacggccagcgtgtcgtatcgcacagggatgaaggactaccgccgattcgccgatggtgctaaggtagggcgcattgtgtctttgaaggaggactaatggcagatcagatgcctcaggtgaacgccgaattcggcaccacgcccgttatcgagttcccggcgcccgaagccccgaagggcctcaaggttgtggagctgaccgagggcgacggcccgatcgtgcgtcgcggcgacaccgtcaccgtgaactaccacggcgtggtgtggggtaaggacaccccattcgactccagcttcgaccgtcatcagcccgccagcttcggcatcggcgtgggacaggtcatcaagggctgggaccagaccgtgccgggccataacgtgggctcgcgtctggtggtttccattccgccggaatacggctacggttcccgcggcatcccgcaggccggcatcggcggcgaggacacgctggtgttcgtcatcgacatcatttccacccgctgaccataggtcagcacatgacgaacgccggggtcatagccggcgttttgtcataaataacgaaaattgtttcagcatcgacaacggttcaggaggacgatatggctgaggacaaggtctacctgctgacgcaggaagcatacaacaagatgaaggaagagctcgcccatcgtgaaggcgagctgcgtgaggaaatcgcgcacaagatcgccgtggcgcgtgccgagggcgacttgtccgagaacggcggctaccaggccgcccgtgaggcgcagagcaagaacgagggccgcatcaccgagctcaccgtcaagctgcgcgattccaagatcatcgagaatgccccggaaggcaccgtgggcgagggctctgtggtgaccatcgagctcaacggcaacgagatgacctacgtgctcggcagccgtgacatcgtggccggcaccgactacgacatcatgaccccggattccccgattggcaaggccatcgaaggtgccaaggtgggcgacgtcgtttcctacaccgcaccgaacggccgcgagctgtccgtgacggtcaaggccgccaagccgctggcctgagttataagtgactagtatgcccccgtaggcgggggcatacttatatgtcgtagcgtttattgccacagcgagacgatcaccatgtagatggccaccatatggcaggcatatccggccaccgttccgcagtggaaaatctcatggaagccgaagacgcgaggccaagggtcgggcttgcgcaaggcgtagacgatggcgccgaggatgtagcaggcaccgccggcgcacagcagcaccaccacggctggccccgcatacggcgaattccagaacatcaccatataagccaggccgtagatgccgaagatgatgtacaccaccgtatacagccagcgtggtgcattgatccagatcacatgaatcacgatggcgatggccgtgcacgcccacatcgatatgatgatcacattgcgccagaacggttccagcgcaaacgaaaccggggtatacgtgccagcaatgagcaggaagatgttgacatgatcgatacgccgcagcacatcggtgacgcgcgggctccaatcgcccagatggtagcaggccgaattggtgaacagaatcagcgacgctgtcatgaacacggcacacgcccacttcagactcgcgccatgtgccaggcatataagcacgatgcctgccgccaatgacaggggagcggcaatcgcgtgaatccagccgcgcatcaacggctttggtcgtccgtgcacgtcgagacgaatcttgcgttccacttccgcaggggcaatgccctcgattttcagcgcacggtgctccgctttggcgagcttgtgccgggccttctcctcggctttggctcgaatggcctcggccttgaactgggccttggcccgtacggcatcagccttggcctgcaacgcctgttcgcgcgcctcgatagccgcctgacgcttggatgcgatgatggcatcctctgcaatcgtcgcgctgttatgagcgtcgtgatgcatcgtcttttccgcgtcgtcggttgttgatgccatggtgatgcccccgtttcacgagttgacgatacgcttcttacgctgccgtaacctacgttagcgtaacttttatgcttgtcaataccgactcacacgaacactattacccaatggtggcgatactatggaatccgaagatgagaacgtcacagcaataaggggttcggtgatggtgtattgcacggagtgtgggtttgccaacgagcaaggaaatgccttctgttcgcagtgcggaagcccattggagcagcccgaggccaatccggcggcccctgcctatgacgataacgcgctgacgctggtgaagcagccggcggcgccgttgcccgccgtcgcgccgccaacggcgccgggttccgcggtgccggggcctatggcaccgggacccatgaccgctggccctgcggcacctgcttctcctgaacctcccgccgggcgtcctggcggcgatcacaccaaagcggtggtgattgtgctcatcgcgctgatttgcgtcgtggcgttggtcatcggcttgttcgtcacccatagcatgggattgtggggagctcagccgcaggcgcaaacatcggtacagtcgaccgggtccgatgcgtcggattccgccgatgatggcacgacggattcctctgacgccaagtccaaggccaagaagaacacgtctgatagcgccaaagacaagaacagcgacgattcgtccaagaaaagctcgacggagaagtcgaagccttccactccggtgatcacatccagccagttgtctgacatcgcggattcatactcgtcctccgatgtggccgtctccgccatggtcatcgatggaacatacgccgattcctcagaggacgccaccatcgcgaccacgtcgcagtccggcaagcaattcgtggctgccggtctctatctgccggtctatcttgcggcccaggacaatggcgatgacaacgccaaagcgcaggcaaacgcgatgatgggttccatggacaacaatgccggcaatatggcggccgcggcggtaggtggctggagcggcgtcaattcgtgggcatcttcgcatgggtataagggcacctcgttcaaccgcgatttcggcgatgtggcggccagcaatgccggttatgagaattacggttcctcccgcgatgcggcccgcatgctcgccgcagtggacgccaagggaggcgcgtcattgatgaacgtggacattgcttccgaaggcgtaaccattccgtccgacatgatcgtgcatgcccaccgaggccaaggcatccaggacacctggaattacttcgccatcgtcgaagccaatggtcataaggccgccgtggccgttgtcacccaatatcaggggcagtcggtggccgcggacctgatgagccgggtgctggccagtgttgacaagacattggggcagtgacggtggctcggcataccaagcatagtagcgacacgcgtgcaacaggcagcgtcgtgggattgatcctgatcgccgccctgatcgccgctttggtaatcggcgtcggtggatggatgtacgcgcataacggtctcggcgcatcgcacgccaaaacatcgcccgtcgcctcggcatcggactcaccggcaacagcgtcggcatcgtcgtcaacggcgtcatcgaaacacgaacaacgccctgtgcatgtcaccttggagcgcaaggcggcacctgctcccgacctgaccacggtggcggaagagaagcggatgtcagatgtgtcctcggcggtcacggcagctgtggccggcaatggaggcacctggtcggtgtatgtcgaggatctggccacgggcaaaaccgtgagcgtcggcggccagcccatggtggcggcttcggatatcaaactgtacgtgatgcttgccgtgtacgataagcaacatgccggcaccttggccgcgggcgggcaagataccacctcgctgatcaaccagatgatcaccgtcagctcgaacgctgccaccaatcagctggtattgatggtcggcgatggcgacatggccacaggcatgcaacgggtgactggtacggccgcccgatacggcttcagctcatccaagcagttgcgggtgttgtccgatgccggcacagacgggaccggcaccgagaactggacgtcggcttccgattgcggcagattcctcgctgcattgtaccgaggcaaactggtttccgccgaagccagccgctccatgcttgacgtattgctcgggcagacgcgacgcgccaaaatacccgccggagtaccgtctggcattcaggtggccaataaaaccggtgaactggccggcgtggaaaatgatgccgccgtggtgtggggcaaggccgcggacggaacagaacgggattatgtgatggtggttatgacctcgggagtggtctcgggaaccgcgcagcagcagatcgccgcattgtcctctcaggtgtatgaggcgatgaccgcctgaacggcgggcagccgtgcaacgcgattggtgcggtattgaagatgcgatgtcgtaatagtcgtcatacttgcccgtgtggcttgccgcaatggcggcgacgtgtctgcgtatgataggggcatggctgatttttcacacatccttgcaacgcgccccgacttcgacgacgaggaccgcgagtggctgcatcatctcgttgccgattggcaggtgatcgccgatctgagctttgccgacctgctgctgctggtacagaacggtgacggcaaatacgtggtggccgaacaatgccgcccatccaccgtgatgacgctacgggcggaagacgtggtgggaaacgtcatgccggatgacatggtcggcgaattggacgccgccatgctctccagcgtggtgttccgctccacggtattgagaaccgtgggcaaggcgaccgtctgcaacgtgtacgcgccggttcggcacaatggcaagaccttgggcttggtcgtgcgtgagaccaatatggccacacgagaatccaacggtcgatatgagtcggaaagcattaacgcgggcaaacagctgtacgagatgattccacgaggccagttcccctacaaggattcggtgatgagccagcgccatatcgctcgcgtggcggacggcttcatcatcctgaccatggacggcgtggttcgatacgcagccccgaacgccatcagctgctttaggcgtctcggcctgctgaccaccatgcctggccattacctcagcgaactcggcacacagctgttgaaggagaacgaccccgttccggaaaccctgccgttggtgctggcgggcaaagccgcggtcgactccgaactcaacgccaaccgttccgccgtctcgatacgctcgctgcccttatatgacaacaacggtcgtatcggagcgattctgctatgccgtgacgtcaccgagctgcgccgtcgtgagcaggagctgcagaccaaggacgctacgatttccgagattcaccatcgtgtcaagaacaacctgcaggccgtctccgcattgctgaggcttcaggctcgtaagaccaagtcggatgaggtcaagaaggaattgcaggaggcgcaacgccgcgtgcagaccattgccatggtgcatgagggattgagccagaccgccgacgaggtcgtcgacttcgacaaggtgattgccaacctgctgcgcatggccgtggacctagccacgatgaaagaccagcacatcgatatcaactacatgggcaagttcggcatgatgcccgctcaggatgccacgccgctgtccctcgtgctgaccgagctcatcaccaattcggtggagcatgggttcgaaggccgcaaggatggccatatcacgatttccgtgggccgctccggcccgaacctcaatgtggtggtcgaggatgacggttccggtctcggctccgaagaacagggaggattggctcgttcttccggttctggtttgggcacgcagatcatcaacacctttgtgaccaatgatttcggtggttccgtgcattgggagccgcgccgcggaggcggcacccgcgtggtgcttgatatgaagctcagggccgctcaggatgagtgatgcgaagcccaaaaataaggaaaccctcccaagtgggagggtttcctagtatgacgaagcgataatcaaaacatcagatttgcatctgcatggcctgagaacggcgggcgcgcatggcgcggcgcttcagcgcacgacgctcatcttcgctcaagccgccccacacgccgtaatcctgattggtgtccagagcgcacttcaggcatgcatcaatcaccttgcaggtgcggcacacggccttggcctcctcaatctgctgataggctgcaccggtgttgcccaccgggaagaagagttccggatccttgtcacgacatgcggccttggctcgccaatcaaaagcgctgctcattgcttgcctcccttaaaagccccgtggctggtgttgttccttaagtccagtaccaaggtaaccacgaaccgtggtgattttcaagaggtttcgccgagaaaaaaccgaagttttcacgaagcgcactgcaccagacatgccgatgtgccctcgatgagcacggcccggcccgcgttgtcggcatcgatatgactcatcgtatccaataggcgagcggggactccggccataaggtcagacgttcgttccccgcacgggaacacgattctggtattgcaatgctctggtatacgtatcgggcgaatcgtgctgacggcgaataccacgctgacggactcatcggccaacgcatgtgtgaaagacagcgcctgctcgtcggtgcggaatgggtcgaacaactcatcggcgtcgtcgacgaaccacacgatatgcggaggcggtggtgcatccgagctggcatacggcgtgcagcggccgttgcgaagccattgcgatccccatacccggcgatgcggggaactgacacgtaccgccaagccatcagccatgctggcgtgtcgagccaatgttttcagcaacgtggttttgccgcgcccctgcgggccgatgacaccgatattgccaccggtgagggataccgtcgcttctcgcaggttgatgccatcgtcggcaagtccaaatcgaatgcgttgcggtgcgtgattggccacagtccggtcttttacgtgccggggaagtggcgcggtaaacagggacggctgcggcgggctcccgacgaaccgcgatgcgaacgcgatctggcggcataccgcatcgatatcgcgcgccgttgcacagcggaatgccgtcacctgttcggaatcgttgcagaacgccgcaccgggcattgccggactgaggtcggcggcacgaccatcaccaagcagctcgcatgattgcagacggtcccgaacccgtaaacaaatgctgacggacatattcgccttcatatcggcactgacctgacccatcggattctgcgtacaggcgatcagatacatgcccagtgacctgccgagcgaggcaatacgcaccagacgattcacataatccgggagctggtccttcagggcatggaattcgtcaatgaccacgatcaggcgcggtggcggattgaccatatcacggatatcggaagcatggacagcggcggacagctgttcacggcgtgtcagttcggcttccagcgcacgcaacgcgcgtacggcatgcgccagatccagatcgcatacgctgcccacggtatgcggcaaccgttcgagtttgcggaacgcggaaccgcctttgaaatccaaaaacacgaaattcagatgctcaggcccgttcatcgaggcgagcgccagacaccagctttgcagcaacacggatttgccggaaccagtggtgccggccaccagagcatgcggcccctgacggttcagatcgagcctcagcggctcgcttccggtcatgccgatcggcaccgcaaggtcaaggggttcaagccaatggcccacaatggtgcgccatggcaggcgtgcgaagtgcagcagcgattctatcggctgcgacggcgcatgacggaggtctgcggcgcgggcatcggcatcgtccgtgataccgatatcgatcgttgcctgttgcggggcgggggtcttctccgggcccggaggtggggggagcgtcagcagcagggacacgagacaggcgaatatgcctggcgtgatcatggcggcgaacagccattgcccgtgcaacagcagtatgaccatcatcagtgcctgcgcgatcatcgggcacgccgcggcaagcatggtcaggcgggcgcgcaatggcggcgcgcccaaacggtgcttcgcccgggatacggcggatgccgtatgggcggaatgtcgcttcgaatcgttctgctgtgatgtcatgcttccagcgtgggggagcgcatgccgaaagcgcaagccgaatcaaggtatgtggttctagcttgccgagttatccacatgacattttgcccgtgcatgattggctgcgtgggcaacggcggcgatcatgcgccgacgatgaagccgatgggctccgggaaagcgtcggtcagccttccgccagattgcccacggcgccggccttatgcgtgccgtcggcaagctgattgaacagttcggtgttcctggcgtcatcgagcagcaccgaggagccaacgccatcaacgtaataatcagggtcggaccagtacacgctgccggagatgccattcgagccggtggcgcttttgaacgccaacgccatggtgagcaacgtgtaagggttggttttttcatccacagtgagtgcgctcatcgcggcattggacactgccacgactttggacggattggtcagggtcccactgctggaagcctttttgacgatggccgagatgacctgccgctggcgttcgttgcgtccgaagtctcctcgcgcgtcggcgtatcgcatacgagagaaggacaatgcagtggaaccatccgtcgtatggcatcccgccttccagttcagtccggaataggaatcctgaacatcctcgtcatagcacagttcgataccgcccaaggcgttcaccacgttctgcagaccgccgaacttgatctgcgccacatggtcgattttctggccggtaatctgctcgacgttgcttaccaaggctttcttgccggcaatctgcgccaccgcattgattttcatgtactggttatcgacgttcataagcgaatcgcggggaatggaaatcagcgaactcggcccgcttttaggcttgatcagcaccagaatcgtatcggttctgaagcctgagatattgtccacgccgccgtaatcggtggaaccgtctcgctcgtcggagccaagaatcagccaggtcgaggccggcgtgttgggggtgtcggtcagccagtcgctccggttcagtttgctgtccacccattgccaggcaccgaaaacagaaagaatcaacgccgccaccagtaccgcaatcgcgcataagatgatgcgcaaggcgcgcggccggtgtgccgttaccgttttcgccgttgccgccgccggccggccaatatggctgaacttcgtggacacgtttgctgctggcgatgagggccgggaaaccggcatatccgacggattgcgcacggcgttgcgggatgagccggaagacatccgcgctcgcgacggcggaatgctgcgcggtgcggcggcatccggagccgtgctgcgggtggcacgtccggttttcggagaaaaactgggcggagtccgcctgccgttgtccgtgacgttggcgcttgccgtggcgttggcgttcggttgaggctcttcgatgtcatttcccgtgacggacggacgggccgatggagcctgacctgactgacgtgaggcgcgggcaggggcgaaggagcgtggcacctgcccggaaggtcgggtgcgtcgatttcccgcaggaatgaagcttggcgggttgatatgcggatccgccccacctgattcctgcgtcataacccctcctgaaactgtcgattgtctgaatgacactttgacacagcatccgccgggtgttcctgcgctatggtgttcctgcgcaggaacggcacaatatcatgtgcaacggcatcagggcatcgtgtccgcgccatagcacacagttccataaaaatgatgtaatgacacgagaaagaatttgacaaaaacgaaattgcatgtgtgtaatttagtccgtatgaaaagctcaataggcaaggagaatcgcatgtggggtgtggtcgacgattcagccgaagagccatggcatgaattgtggggactattccgacctgatggcgatgtatcttggcagcacaaggcgttgtgcgcgcaaaccgatccggaggcgttcttcccggaaaagggaggctcgacccgtgatgccaagcgtgtgtgcgccaaatgcgaagtgcgtgaacaatgcctgaaatgggccatcgaccatgatgagcgattcggtatttggggcggcatgagcgagcgcgaacgccgtcgatataagcgagagcaccgggagcaggcgtagttccacacacacccccttcaagtctggtgcgtacactgggagtttatgagtccgacaggtaatagcgatattcatgaggcgttggccgacgccatgtcctctcgaccgtatacgcataggcaggatgtggataccggcattacggctgtgatcaccgttgaggaggatatgcgtttcctccggtctacattgcgttcggtattgacgcagaatgttcttccgggagtcgtcatcatcgccgacgcgaccgggcgcgccggttcgaggataaccacttcgttcgaggtcattccctcgccatcggggccggtagtggaggtgccgcagtccaagcatgtgaccattcacatcgtttcggccaagggcgcgcgttccttcggcgatgcggtcagccgggcgttggatcgggccgatttggatgacgctccccgcgcattgtggttgctccatgatgattcccgcccctcggatgcctcatgccttgaacgattgcttgaggcgtggcgcaatacgccgggtgccagcgtgctcgggtgcaaacagtgtgattgggaaggatcccacctgcatgatgtcggtatgtatgcaggccgacacgccgtgcattccctggtggtcgatggagaacccgatcaggagcagtatgacgggcgacaggatgtgttcgcggtgtcgctggcgggcgcgctggtgtccatgtcgcaattcacgcgactgcggggcatcaatgcctggctgaccacctacagcgaatcggtcgatttctgccgccgtgtctgcctgagcggcggacgcgtggtggtagtcccgcaagcggagatatcacatcgtcgcgcacggtatgagggcattcgtacgcgaggcggggagccgcttaaggaagatcacacggtcaatcatgcgatgacggtgcatcgctcccaacagcgctatctgtacactgacctggccatgtcgtcctggattatcgtctggctgtggaggctgattcgcagttttggcatggccatagccatgatgttcggcaagaagccgtatgaagcatgggtgcaattgtgcctgccatggttggctttggccgatatcgcgggaaacatgaaatcgcgcaggctggtggccagacagtcgaaggtcgccgcatcgtccctgcaggttttgttcgccgacagtcggcagatcaagcagttccatgatcgtcgggatgcattccaatcccagcagggcagagtgctgctcagtccgctggaacgtgcccatctgcggacacgcaccatatatcgctggagcgcagccgtggtgatggcgctggtgtgctttgcggccatcgtggtgatgtattggccggtgttccgttcgatattctccggtggatcgttgtattccgatgtgttgctttccaccggtgccagcttcactcaactggtgcagtccgccaccacgccatgggtgtttggcagcggcaccggcattcctgcgccgcccacgccgtggctgctggtgctgatgctggcctcgctggtcacgctcggccatgtgaccgccgctctggcgatgatactgtttgtggccgcgccgctgagtgcattgtcgttctgggcgctggcgggcgtattcacccgctcggacgtggttcgtgtgctgggaggactgttgtgggcatccaccggcattatgttcggctggtatgcgcaggccaatatgccgatgctcaccgtaatggtgttcctgccggccgcgttcgcattcgtgttccgtgccgtgggcatgtaccataccgaagacccgctcaagccgcgcacatccgttcaggccgcggccatcgccgcactgtgcttcatccctgtggtggccgccgaaccgcagctgctgttcgcgctgatcgtcgtgttcctgatgttcctgctgttcgtgcg

SEQ ID NO: 918 - DNA, 18439 bp, Unknown
  R117_24m  MAG No. k141_3827
ggcgagatcctcatggatcatcgacgtgtacttgtcggaggccttcagatgccgtccttcggccatgccgagcgtgcgcgacgtgaacacgttgagtttcgacgaatcattcgtgcctatgacgttggcggcgttgccgaattgctgctccttggtcgcatcgtaatcatcgccgccggggaccttcgccacattcgcccccacgagatcagcggtggcgttctgacggaccatatacgaatcgaccccgggcagttgggcgatcctgcgcacgtcggcgggacgcaccatgccacctccgcgaggcgtgagcatgctgccctgcaggttgctggccagcacgaacccgccgaccgcttccttctcgattcgtccggcggcctgttgagctgcccgagaaaccgcgatcgtggatagcatgctcgccgttatgatggtcaatactataaggagcactatggttcgtactcgttttctgagcacatagcgcaccgaccgtgcaacgaacgtcatcaatacctcctgtgggccttgggcttttcgcccaaaatgcgaaacatgccgcgtttcgccggttagttagccgcgacaatacatgatgcacctcaagatacgggaagagatacgccttgggcgaaaaacggaacagcggcaaatgtcgtttattctggattttggtccatctcgggccgcgtcgatgcgtcggcccgagaggaatcagcgctcgcgcctcaccttcgaggcggcgaacacgaggagcggcagagcggcgaacgcatagttctcgcattggatgtacaggtatgcgaccaggacgagccagcagatgacggtcttgtgccagacgccggattcgcccgaacccgcgtcggcaacgccatcaccactattgcccccagcaacatcagtaacgtcggcaacgtcggtgacacaaacaccgtgcgccagcccgtcggacgatgcgccatccgcacctccacggcataccgtcctcccgcgcgtcatgcagaccatcgaggctccgaccagcatggccagcccgatcagcccgtattcggcgatgacgctggtatacgcgcacatcgtccacaccgtgtccgcgttcacgccggccgcgaatcccgtggccgcgccgccgttcataccaagaccgtccagcagccatccggctttggccgtgccggcccacaccgcattgatgatgttgcccgcgccataaccggtgagcagcgtccacggatgggtgagcaatccgcatatcggatcgaggctttggtagatccgcgcgaagaacgagccgtctccctcggccccgttctccgcgatggcggagagtctggaatccgccagcacacccagcaggcccagtgcgcatgcgccgagaatctgcagcatgccccggacgcggcgtgcgccgtcatgccaatcggtgcgcgccacaagggcgatcagcaacgccacgacggaatcgatgacgattctggtgccggcttgcatgagcaccgcgccgacggcatacgtgacgatgaggtcacgcagccgtttggcgtagatgcggtcgcgcccgcgcatgagccacatgagcggaagcagtatgccgaacaggtgcatgccgatatagctgggctcggcgaacaggaactgcggacggccgccgccccacaccgagttgtcgctgatgtattgccggtacatgaggtgcgagaaatagtcggtcaacggtttggcgcgcagacggatggacagccattgcacgacgcccactccgaaggaaacccagtatgatgcgatgagaatccgcaatggcgtacgccacggaatgcgtttgatgtcgaacgcaagggcgatcgcacccaaagtggcgagcacgcccagcaatccggtgatgctcatgaacgcggcgttgaggtggatgccgaacttcagccatcccgggatggacaggattatacagaccaccggtaggaggaacattggcaggtaccggttggctgcgatgcgcagttgccgccaattgcataggcagtacacggcgaacagcgccggactgattggcgaccagaacggcgcgtacaggccaagcgtggtgccgtccaccggaagaaaagcgacggccagcaacagccaaatgacgttgcgttcctgcgatgtcagaaatcgcaggaacgaccggtattgcggtcggccatgatggttgcccgcgtcgatggtgtcgttgcgtacgcatgcctggttcatgtgattctccctccccgtcaaccttactcgttcatcacgatgcgcggacgggggcatgctttccccgccgaacgtgcaatggcccgaacattgacaaggccgcaccgaatgcccccatcattggcacattgtgcgatctcgtcgcggctggctgacgaaataatgctggccgaccggttacattggttcggtacagtgacggcattattggccactggatcaagcgatttgcggcagaacgacgaaagcgacacttgggcgaaaagaggcaggcatgactacgaatcgaccgctcattgcggtgactccgctgatggattacgggcgcgatggtctgtggatgctgcccggatatatggaggcgataatgcgggccggcggtacgcccatcatgttgccgctgaccgatgacgccgacattcttgcacaatgtgccgaacggtttgacgcgtttctgtttacgggcgggccggatgtgggaccgatggttggtgcagcggcctccgccaccggccgtagcgaggtgctctctcctgagcgcgaccgaatggaatcgattctgctgccagctgtaatggcttgggacaagccgattctgggcatctgccgtggcattcagttcatcaacgcggcactgggcggcacgttgtggcaggatttgccaagccagcatccgagcgatatcgaacaccatatgaatccgccgtacgatgcgttcgggcacagcgtttccttggtgtccggcactcccctggcttcattgttcgcggggcagactgagattgcagtaaacagctaccatcatcaggcggttcgtgatgtggcccccggtctcgaagtcatggccgttgcgcccgacggcgtgatcgaggccctgtaccggccggcaagccacttcctgtgggccgtgcagtggcatcccgagtttctctacaaggtagatccatgctcgcaggcgatttttgatgcgtttgtggggagttgccgataacagcaaaaggggctgctccggttttccggaacagccctttttcagcggtagcagtcagcagactgatttagtcatcggtgctggcttgccagcgctgattggcgcgtgcggagaccgccgtccgaaggcgaggggcgtacgaaggtacgtcgaacctgaggaaaggcggtatacgctccgccaatcagtgctggttgttgagacggtggtacatctcggacagctccagttccttctcgaactggcgagcggtggtgttctcgtcgatgacggcgagctcaacaccggcgatgcgggcgaagtcttcccaagcctcacgaccgacggaggtggtcatgcaggtgtggtgagaaccaccggcggtgatccagcactcaacagcggtcttcaggctcggcttcggctcccagacggcgcgggcgcacggaagctccttgagggagccctgcggctcaacgacgtcgacgacgtccatgagcaggcggaagcgttcgcgaacgtcggacatggagaccacgacggcgtccttggtgggcttgccggagaagaccaggcggaccgggtcggccttgccgccgatgcccagcgggtggatctccagcttcggcttggcgatggtgccgatggacggggaaacctcgagcatgtgggagcccatgtcgagctcgtcgccctcggtgaagttgtaggagtagtcctccatgagggaggcgccaccctcaaggccgtagcccatgacggcgccgatgcgcacgaggacggcggtcttccagtcgccttcagcggaaaagccccagccgtactcggacgggaagcgctgtgggccaacgcccggcagctgtggcagagcgccgaggtcctcgaaattgtcgacgccggcggtgcagccgttggcgcgcatcatgttgaccatcgcggcctcttccttggcggcgatgaacagggagtcgtacttggcgtccagcagagccgggtcgacgtcgtacttggccttgtagtcctcgatgatctccttgacctggtcgtccttgacggcgtcgtacgcagcgacgagctcgttgacggcccaagtgttgatggaggcgccgaacacgcgctcggcctcggtcttgtcgccctcggtgacggcgacgttacgcatgttgtcgccccagcgcatgaccttcatgttgttggaggcatcccagccggcgcaggcgcgggcccaggtgccgaccttctcgacgacctcaggatcggtgtagtggccgacgacaaccttgcgcttgatgccgaggcgggagacgatgtaaccgaactcacggtcgccgtgggcggcctggttcaggttcatgaagtccatgtcgatggtctcccacgggatttccttgtggtgctgggtggccagctgcagcagcggcttggtcagcacttcgaggcctcgaatccacatcttggccggggagaaggtgtgacaccaggtgatgacgccgatgacgtttgggttggcggaagcctcgaccatgaactccttgacaccgtcggaggacttcagggtgggcttgaggacgatcttggccggaatcttgccggtgttgttcaggtagtcgaccatttcagcggagtgaatggcgacctggcgcagggcttcctcgccgtacaggtcctgcgaaccaacgccgaaccagatttccttgccctcgaaggggttttccataaccatagggttacttcctttacttctttgtttatgggggtttgtttaagtttcattcgccgaccgaggctcccctcagagaggggagccaagacaccaccgtgctggcggagtcagcgctgatttgatgtgtgtgcccgcaagacgcggaaggcgaaggcgtacgaaggtacgtcgagccttccgcaacgcggtggacactccatcaaatcagtgctggccgtagacgttctggtagcggtcgttgagcttatcgatgtcggcctggtcgatctcgatgatgtcaccgagctgacgggcggcccacatggtgtgagcgacttcctcggtcatggcagcggccttgacggcgccttcagcatccttgccgatggtgaaggggccatggttctgcatgaggacggccggggacttcgggtacttcttgagggtctcgacgacacccttgccgatcgcctccgagccgatcagacggaacgggccgaccggcaccgggccgccgaactcgtcgcccatcatcgtcaggccgcacgggatgttctgaccagtggcagcccaagcggtggcgtaggtggaatgggtgtgcacgacaccgtagacgtcgggcatgttgcggtagatgtaggcgtgggaagcggtgtccgaggacggggcttcggcaccgtcgaccacgttgccgtcaaggtcgcacacgaccatggaggacggggtcaggtactcgtagcgcaggccggagggcttgatgacgaacaggtcggcggtgtgcagacgctgggaaacgttgcccgcggtccacacgaccaggttccacttgatcagctgctggtgcaggttggagacgacctcacgaacctgcttgacctcggcgcgaacctcggggccgtaatcagccaaagttgccattattggttttcctttccactgtgatggatggacgttttttcaaaatctcaaggacctctctcaatagagggaggtcagaaaggcttacttatcttcgaggttgatggtttcgatggcagcgtgctcgatgggcaggcccttggtgaagcgggcgaagaagtcctcgaaaccaaccacatcggaagccaccggcttctcagtggtggactgggcgtccttgaacacgaaaccatcaaggaagtcagcgaggttgctgtgatcctcgttggtgttccacaggtagttggcgagcacggccataccccaggcaccaccttcggcggcggtggacatgaccttgatcggggtgttgaaggcagcggcgagaatcttctgagccaccttcggagtggtgaagatgccgccgtggcccacgagagagtcgacctgcacgtgctcctgcttggtcatcacgtccatgccgatcttgaccggggagaacgcggagaacagctgggcgcgcatgaagttgccgagagtcatgttggcttcggggctgcgggcgaacagcgggcggccttcaggcagaccggccaggaattcgccggaacggaacggatagttcagcaggccgccgcagttggcgtccacgtcgtcggcgatggccgcgcggaacaaggtgccgtacagcataccggcatcaaccgactggccgatggccttggcgaactggccgaacaggccgacccaagcgttgaggtcggaggtgaagttgttggcgtggctcataccggccagatcgccggccggggtggtgaccaagtcaacctcagggtggagggccttgagcttgtgctccagaaccaccatggcgaagatggaggtgccggcggagacgttaccagtgcgtacgcgcacggagttggtggctaccatgccagtaccggcgtcgccctcaggcggggcgagcacgatgccgggattcagggcaccggacggatcgagcagcttggcgccttcctcggtcagctcgccagccggagtgccggccacgagcggctcaggaagcaggttctccagcttccacggctgggctgcgacctcaggcagagcgtcgaacttctcgatgaatgcggtttcgtaagtgtgagtggtcgggtcaatcgggaacatgccggaggcatcgcccacaccgaggaccttctcaccggtgagcttccagtgcacgtaaccggcgagtgtggtgaagtaagccacctcggagacgtgctcttccttgttgagcacggcctggtacaggtgagcgatggaccaacgctcggggatgttgtactggaacagctcggagagcttcttgtgagcttcggaggtgttggtgttctgccaggtgcggaacggcaccagcagttcgccggcctcgtcgaatgcgaggtaaccgtgcatcatggcggagaagccgatgtggccgacgtgcgtgagcttctcgccataggcggtctcgacgtcgttggccatggaggcgtaagcggactgcaaaccgccccagatctcctcggtggtgtagctccacagaccatcctccaagtgggaggcccagctgtagtcgccggaggcgatggtctggaagttgtcgccgatgaggacggccttgatgcgggtggagccgaattcgatgcccagcgtggtcttgccagcgcgaatcttctcggcgatgtgggcggcctgctcggccgcgttgtcggttgctgccatatctttcctttgccttggagcgccggcgttgttatccccttccttggggaggatgttagcgctcacaatttcaaaaaaacattgtaccgataacctgcattcgacacaacttataccgtgtcacgcatcataacggtttgataacagcgccaatttaccgccggggagccggccccaaggaccgtcgagcacgcacctcggcgggaatcagccccatgccgtgctgggtggtcaggaaggtcggctcgccgccctcccccagcaagcgcagcgtctcgcgcatggcggccacgccgagcccctcgaaatcgggatgcacggtggtcagcggtgggtacatgttatccacgccagacatgtcgtcgaatccgaccacgctgatgtcttgcggaatccgaagcccatgctcatgcaacgcgcgcatgacgccgacggcctgattgtcgttcgcggcgacgaccgcggtgggcaacgccgtgcctcgacgcccatactcatcaatgagatgattcatgtgcgcatatgcctcagaggcatcccacgtatggcagcgcacgatctgtgaatcgatggatcgggaggcggcgagcttgcgccacgcatccagtcgggtgtgggcgtcgcgccattcgttgggaccggcaaaatacagagccgatttgtgcccgtattcgcccagcaaggccaccactttggccattgcaccccactggtcgataccgaccagtgcagtgcgacgcttgttttcggtggagataaggcccaatccctcacgcacggtcatttggccgtgggtggcggtgacgatgacgcgtggctgagtgactcgcgcacggcaggcggcggcgaacatcacgtcggtcggggtcaggaagatgaaggcgtcgacgttctgctcgttgaaggtgtcgcacaggttgtcgaattcggactgcatgcacaaggcctcgtggaccatcatcacgctcatgaacagaccgtgttcgcgggccatggattcgatggatgagatggaggaaatcgggccgaagaatttgaggcctccggcgatcagccctatggtgcgcgaacggcgggaagccagtgcgcgcgcggagttggaggggcggtagccgagttggtcaatggcggcctggactcgcgcacgggtggcgtcggaaacgtccggcgagtcattgatcacacgggagacggtttggtggctgactccggcgagcttggccacttcgaacatggacggacgtttgcttggcttgcggctggtcaccatgctacctaacctccccgctggcggccggcacccatgcgcggccaggcttgtaccttaatcaatactgactttagcgcgtccacaacagttttgcgttagcgctcacactgtcgtgtcgcacgcggctcaggtcaggtgccatgagacacgatggagcggagtcggcccgtgttcggcgatggcggcacggtgtgcggcggaaccatagcccttgttatgagcccattcgtaggcggcgtaacgtgggttgctttgcgcgaggtcgaccatcagccggtctcgggtcactttggcgatgaccgccgcggtggcgacggtggcgcaatgctggtcgcctttgactttggtcgttatatcggctggaatcggcacgtccggcgcgtcgaacgtgttgagcgccttggtgatgtaatcgctcggcccgtcgagaattccggcgactttgggcagggcgcgaacgctttccccacaatttccaatggattcccctacggagtctcccggacgaccttccacaatctcccccgcagccttttttgccgtcaatccccctccaagccgtaagccaagttcgcgttcgacttggctgagcgcgcgcagggcggccacgccgagcgcataggtgatgccccattcgtcgatctcggtgttgctggcctggcctacggcgtaggccgcgcaccagtcgcgcagttcgtcgaaaatcgcctcgcgcctatgttcggtgagcattttggagtcggccacgccgtccggtacgccgaggtaggtccgcccggacagttcggcggaatcatcgccgtcaagcggcgccaaatcacaggcccagatggcggcgcacccgaccatcaccggaccggcgagcgcgccgcggccgacttcatcgaatccagtaataaggtcatagccctgggccgcaaggctgcgttccaagtcaagtgtcggggtaatcatgcgcggctcccatcgtctcacaatggttaggattcagacggtccaggttcaaatggttcaggattcagacggcccggaactcaatcagttcaaagactcacacggttcaaaaaagactcaggaattcgagccggaagcgtcagacacgtccttgaagacttcgtggtggtcatcaatcgcaccaagccggtcaagcggccagtatttcgcgattccgactccgaccacatcggagatgggaaccaagccgcgatcgccgtcatcctgatgatagcgggagtcggcggaattggcgcgattgtcgcccatgacgaacacgtggccctcggtcacggtcaccgagaacgggaaagcgctcgggtccacgccggggcgaatgtaggaggtctcattgatggccacgccgttgatggtcaccggctggcccgcgcccttgcattcgaccacgtcaccgggcaggccgatcagtcgcttgatgaggtacccgccaccgggagcgctgctctgctcctcgttcaaccagttgttgggatctttgaataccacgacgtcgccgcgctgcagatcgaagatcttgggggtgagcttgctggtcaccacgcgatcgccgggcaccatggtgtccatcatcgagcgcgaaggaatctcgtaaaagccgacggcgaaaatgcgaatcagcagcacgataagcacgggaacgccgcaccacaggaaaaagtcgcgtagggtgaagtggtcatcatccatcgatgatgctgccgcggcattcgcgccagcggaagaagcggcgtacgccgggcgcgccggtgccgggggaaccggggacggggcgatgccgtggtcggcgacttggaacgtacgggaatcgcgggcatcggcctcgtcatcatacgaggtctgattgctctccggattgtcggaaatcgggaattcgccgttatcctgatcgtcctgcataccatctcctcgcgattcatgctgccggatatgaggggtgccggcgcccgtccatcatacgtggaaaatacggaaacagcccgaaaccgaaacggttccgggctgaatttcacggtttattcgcgcacctgcatcatcaggcccacgattgcacccgcgaatcgactcacttagcggagttgtcgcggcgctcggcaatacgagcggccttaccgcgcagagcgcgcaggtagtacagcttggcgcggcgcacacggcccttacgcacgagcttgatggagtcgatggacggggagtgcaccgggaagcgacgctccacaccagtgccgaagctgatcttgcggaccacgaaggtctcacgcacgccagcgcccttacgagcgatcaccacgccggtgaaggtctggatacgggagttgttgccttcctggatcttcacgttcacgtcgacggtgtcgccgggacggaaggccgggatttcctcagccggcttcatgtgcttggcgtcaaaagcctcaacagcgttaaccattgttttccttcagtgctgccgcatatcagccacagatctggggccatccacgcgattgcgcatcacgtgcgttggcctgttctcgttatccctcgggtttgcccttgggaagcctgccgatccgccgaaagtcaggccttgcggccgttcggactggacccatggagacgtgggcttatgcggcggcccacttctcgacacagcaatcgtcaattgtacggattattgcggacagaatggctgcctgatggcattccaacaccaaggcactgcgacgtagttgacagacctgcaggcgggctttatcttgggagcgtcggtaggcgaggctaccgcagggatatgggttgctgccgctaacagtggagacactgcacgcaggtcagcagttcttgtcggatcaaggcatgaactaacgcaattccaccgccctgcgatgctgaagcttgaacgatggctcgaatcggcggattcgaatactttccgcccctcctgctggtcgcatggataccgacgatggtattgatctggcgtttcagcgcacggcttgaaggaggtgagagtccgatggacggtgattattccagtagttccgccgccggcaacagtcatagttgcggtggtgatgaccatgttttcttatattccgttatccggaagtcgggctctcgcctgtagtgttccttggctccccggataacccttgcataattcgtctttcctatgcatagggaggtcttttcatgaccatgttttcattcaatcgcgtcggcgcgcgtccaaatgcgtcggcccgcaacccttccaccgccgcgtccgaccgccagccattcgccgtgcgcctggcctccgacgtactggtcgcggccggtattctggcgctgttcggtctgatcgcttggattctgccggcgatcggcgaaccgatcggcccgaaaggagtgccatcacaagtcagtacgaatctcgccgacctgccgtattacgcgctgcgctcggtgttccgcatgctcgtggcactgttcttctcactggtgttcacgttcatctacggcacggcggccgcgcgctgccgccgcctgagccgcgtgctgattcctctgttggatattctgcagtcggtaccgattctaggctttctttcggccaccatcaccatctggatggtgctgttccccggctcgatgctgggcgtggaggccgcgtcgattttcgcaatcttcaccagtcaggcctggaacatggcgttctcgttcacccggtccctgaccagcgaaccaactgaactcgacgaggcggcccgctcactacagctcacacgctggcaacgattctggacactggacgtgccgaacgcgatgattccgctgctgtggaactgcatgatgagcgtgggcggcggatggttcttcctgaccgcctccgagatgatctcggtgaacaatcgcacctatgcgttgcccggcatcggcagcttcgtggcacaggcggcggccgaggagaatctcgcggccatctgctgggccatcgtgacgatggtgctggtggtgctgcttatcgacgtactgctgtggaagccgctgaccgcgtgggcggagaagttccgcattacgcaaagcgagtcggcggtgcgcaagaccagtgtggtgctgaccatcattcgtcagtcacatatcgatgagatggtggcctggctgttcaggcctctcggcgacctgttcgacacgctggcccgcccgttgggtcggaccggtggacgttgggcggcggacgtgaagtccgcacgcagccgcgcgcttgacgtggtattcacagtgctggtgttggcagcgtgtgcgttcggactggtgcagcttatgctggtgattcatcgcgatgcgggattcggcgagctcgggcaggcgttcgtgttgggcatggtgacgttcctgcgcgtggcgctgcttacgctcgtctgctcggtgatttgggtgccgattggcgcgatgatcggcatgaatccgcgcgtttcgcggtttatgcagccgattgtgcaggtgctggccagcttcccctcgaacttcacgttcccgttcgtcacgctctggttcgtggcatgcagcatggatatcaactggggcagtattctgctgatggcgttgggcacgcagtggtacatcctgttcaatgtgatcgccggggccagccagattcccgacgatctgcgtgagatgacgcgcagcttccagctggggcgctggcagcggtggcgcgatttgattttgccggcggtattcggctcgtgggtcacgggcggcattacggcggccggtggggcgtggaatgcctcgattgtctcggaaatcgtaagttatggacggcatacgctgaccgcctccggcttgggcgcgtatatcgccgaggccaccgaaagcggcaacaccgtgaggaccatcatcggtgtggccgtgatgagcgtgttcgtggtggccgtcaaccgcctgttctggaacccgctgcagcgcatggccgagcgccgtttcgcactgaactaaagacttaaggagaataatatgactgttgcaatggaaaccattcgttcgctgcgggcggtgaccccgcagaacaccatcatcgaagcccagcacgtcggccagcgcttcacggccgacaacggcaccgaactcaccgtgttcgacaacatctcgttcaacctgtacgagggcgagatcgtggccattctgggccgttcgggtgccggcaagtccacattcctgcgtgcgctggccggactggtcaagccgaccagcggcacggtcaagtatcgcggcgaggccctgaccggcccgaatcccggcatcgcactcgtgttccagaccttcgcgctgatgccgtggctcaccgtgcaagacaatgtggaactcggtctgaaggcgcgcggcgtaccacgtgcggaacgcaccaaactggctctggatgccatcgacatgatcggcctggacggcttcgaatcggcgtatccgaaggaactgtctggcggcatgaggcagcgcgtgggcattgcacgcgccttggtgctgcggccggacgcgctgttcatggatgagccgttctccgccctggacgtgctgaccgccgaaaacctgcgtcaggaagtgctcaagctgtggtcgagcgaacagcgcagcatcaagtcggtgcttatggtcacgcataacatcgaggaagccgtggagatggccgaccgagtggtggtgttgggctcgcacccggggcatctgattgccgatgtgcgggttgatctgcagcgtccgcgcgaccgtcacagtgtcgaattcgaggcgatggtggaccgactgtacgcgattttgaccggacaggcctcgcagcctacgcaacaagccgaggctctatcgccatcggcatcgctcacgaacgcacccgtcacggacgcatctgtcacggacgcatcagaccttcagcccgccaagaccatcgagaaaatcaaggagcatccgctgcccaacgccacgccgggcgggcttgccggtctgctggatgtggttgccgagcatcctcacggcatcgacttggcagatttggcctcggctctttcgttcgaggtggacgacctgttcccgctggtggatgccggtacgatgctgcgcgtcatcgtggtacgcgacggccatgtgcagatcaccgaagcgggcgacgcctggcataaggcggacattctgcgggccaagcaggtgttcgcctcactggcgatagaacacgcgccgctggtgcgcaacattgagcatgcactgcggaagtctgcggaaggcaagctccgcggcgagctcatgctggacctgctgcgcgcccgttacgccaacgacgaggcgcatcagcagttcgccatcgccgtggagtggggccgttacggcgaactcttcgattacgatgccgatgacgatctgctgagcttggatgaggcgaataagggcgaataagcgaatcagccacgtgagttggccagatagtgcctttatgcctgcaaacagatgccgaagcggaatatgaccatgttcgactcatctgactgacagcaatccgtatatgcaaagtgcccggcatccgaagatgtcgggcactagtcgtgagagagactccctcagtcagctacactgacagctcctctcacccgagggggcaccagaggaacgaatcagaactcgcgacgtgggcagtcgccagactgcccaccagacagcacagctgcggtcgcgcgaatcacgaattctgaccgagcaaagcgaatcagaattcgcgatttgcgcggtagaacttgatcaggctctgggtggaggcgtcctgggcggcgagggcgtcgtcgtcctgggagatggccggggtgatctgcttggccagctgcttgccgagctcgacgccccactgatcgtaggagtcgaggccccagacggtgccttccacgaaggtgatgtgctcgtacagggcgatcagctcgccgaccgcgaacggggtcagggccacaccgaagatggaggtggtcggacggttgccggtgaacacgcgggccgggacgatctcctccggggtgccttcggcgcgcacttcgtcggcggtcttaccgaacgccagagccttggtctgggcgaagtagttgcccaggaacagctcgtgcacgtcctggtcgccgtccttggtcgggttcggggtgttgacgaacgcgatgaagtcggccgggatgagctgggtgccctggtgaatcagctggtagaaggcgtgctggccgttggtgcccggctcgccccagaagatctcgccggtctcggaggtgacgggggtgccgtcccaacgcacggacttgccgttggactccatggtcagctgctgcaggtaggccgggaagcggtgcaggtactggtcgtacggcagcacggcgtgggaggcgaccttgaagaagttgcggtaccagacgttcagcataccgagcagcaccacgacgttcttctcgaacggggtgttggcgaagtactcatcgatctcgtggaagccgtgcaggaactcctcgaagcgggccgggccgaagaccacggccaaggaggtgccgacggcggagtcgacggagtaacggccgccgacccagttccagaaaccgaacgcgttgttcggatcgatgccgaattcggcgaccttctccaggttggtggagacggcgacgaagtgcttcttgatggcttcggcgttcttctcgtcggagccgtcgatggcgcccttggccttgagctcttcgagcagccaggtgcgggcttcacgggcgttggtcagggtctccagggtggtgaaggtcttggagacgatgatgaacagggtggtctccggatcgaggcccttggtcttctcggccagatcgttggggtcgatgttggagatgtagcgggcggagatgccggcgtcggcgtacggcttgagggcctcgtacaccatgacgggacccaggtcggagccgccgatgccgatgttgaccacggtctcgatcttcttgccggtcacaccggtccactcgccggaacggaccttgtcggcgaaggcgtagatgcggtcgagcacctcgcgcacgtccttgacggtgtcctgaccgtcaacgatgtacttgccctcgtcttcgaccgggcggcgcagcgcggtgtgcagcacggcgcggtcttcggtgttgttgatgtgcacaccggtgtacatagccttggtgcgctcatcgagcttgacggccttggccaggtcggcgaacagctggagggtttccggcttgatcaggttcttggacaggtcgaagtgcaggtcgccggcgtcgaaggacagcttgtcgacgcgctcggcgtcttcggcgaaccacttcttgaggctcacgccttcggcctgaagctcgtcatagtgcttctgcagggcagcccactcaggggtctgggtggcgtcaacgggcggattgatggccataggattccattcctttcatcagtggctggagcgccttcgctcatggctcggatacgctccatatcaccaaacagaatactcacaaattcggacatgaacagaacaaaaatcagtcagcgatgtcggattgccatcgtttgcattatcgaacagttcgtggcgcggcgcaaccgtcatcttcaaccgagcggtcgcgacacaaccgccaagccgccgattggacttttcgcggagatgtcttatacttaatttcttgtgcgcggctggcgaaatgccttccgcgagccaagccactttagctcagtcggtagagcggctcactcgtaatgagcaggtcgtcagttcgattctgacaagtggctcggatgccctaggctggctggtctgtaatggctgtccggcctagggttttgcatatcttccacacctgtggaaacgcggatatgcacgcgcgagtggcggaattggtagacgcgcaggatttaggttcctgtgtctttgacgtgtgggttcaagtcccatctcgcgcaccggcttgagcctcctggaagcattgaatcgccaacgattccaggaggctcttcgtatatgcgtgaggcaattgcaagcccttgcggacgcctctacatatggcaatgccaaggcggcaaatataatggtcacagcattgtgggtctgagcctgtgcgccatgagcctgtgtgagccaaggagagaagtgtatgtccgccattcttacgccggttggtctgttgctgatcgttctcgccggttatctgttcaagcggtttggcctgttcgggcagaaggattatcgtgtgttgcagaccgcggaattcaatatcgtgctgcccggtgccatcgtatactcgttcgccaccaatcctcatgacatctcactgctgcttatttcggtattcgcattcctgtttgcctttatcccgatcatgttcatctttctggccacccgcaagcgcaatgtgaccgaccgcgccttcctgatgctcaacggcgccggcttcaatctcggctgtttttcttttccggtcgtccagtcattctggggtgcgggcgcggtggtgccggctgcgatgttcgatatcggcaactgcgtgatggtggccgccggcaccaatgtgctcacccagcaactgctgcatattcagcccggcaaaacacttgccga

SEQ ID NO: 919 - DNA, 7037 bp, Unknown
  R117_24m  MAG No. k141_4319
tgaagaacgagctcggcgtcttgtggacgccatcatcgctgattacatccccgagtttgagcgtgcaaatcaggggttggtcgctcgctacggtgaagcattgaacgattagcgtgacaggtatggcatcgggcgcgctggcatcgtagcccgcgagcggtcgtctatgcgctggatgtgctggtccgtctggctcgccggtatcgcgaccacgcggcgctgttcggtatcgaagtgctgaatgagccgattgactggctgacgtatgccatgtcaccatcgagcaggcaggcgaaagaccggtccgaagcgcgaggaagcgggcctattccgatggcgttcctcaagcgtttctaccgcgagacataccaccggttgcgcccgattctggcagggaatcaagtcatcgtgttccatgacggcttccgactgggccgttggcgggactggttcgtgcgcgagggcatgcggggcgtcatgctcgatacgcatgtctatctggttatggccgagcaattcccgctgttccgtctgatcccggatcggtggctgatgggctggtatcgcttgttcgtgcgctggaacgaacgccgcatccgccgggccgcgcgctatacgccggtgatcgtaggggagtggtgcgtggccaacaatctggtgaaccgaaccccttcaacgaggaatgccgtctatcgcgaggtcgccgccatgcagcgcaaagcgtggagcgcatctgccgggcagatctactggagctaccaactgcgcggcaatcgcgctttcctgcctaccatcgacccgcaatccgacacgtcacgcctcgacccctgggatctcactcacgtttggcacgccggttggatggcctgcagccgcaccaattagcgatatccctcccaaaggggcaaaggcatcagaacatcctcgcaatcggcccacatggtattgagatcttggccgggggcgcgcagccagcgcagctggaggccgtccatcatcgagaatccggcctgcagcacatgtccgacattgacgccttccggcacggcccagttgatgttgagcgccgtggtgaccgtgcggcgctcgcggtcggcgaaataatcgtgcgcggggtgggccgggtcgagcgcctcggcgctcagcgtggagaacatatgcaccaacgcgggcctcttgttgttcacagccaccacctgacgccacatatccgcgataagcgggcgctcctgggcgaccatcgcggcgttgatcgattcggtgatccggtcgtatttctcggtcagcgccagcttgagcagtccctccttgctgcccacgtaatgcagcacgccggccttggtgagtcccacttcggtggcgatgcgttgcagagacgtgccgtaatagccaagtttgccaaacgattcgacggcggcgtcgagaatcgcggtacggcgatcggtgtctgtgggagaggggtcgttcatacaggcaaccttacggtcggttagtagtgattccaaatgatttcggcgtgttgtgccgtagattttgataatctgcctaccaaccggttggtcgagagaaaacggcagtcgagattcgtggaggaacctcgaacaacagccaggcagcccggccgaatcggagccaacgcatatcggacaaccgcacaactcaagaaactcaaggaaagaggcaacatgagcgagtccacctacccgtccgtcaaggatttgaccctggaagagaaggcgtccctcacctccggcggcgacgcctggcacctgcagggcgtggaagccaaaggcatccccggctacatgatcaccgacggcccccacggcctgcgcaagtccctgacctccagcaccggcgagaccgatctcgacaactccgtgcccgccacctgcttcccgccggcggccggcctgtccagctcctggaacccggaactcatccacaaggtcggcgaggcgatggccgaggagtgcatccaggagaaggtggccgtgatcctgggccccggcgtcaacatcaagcgcaacccgctcggcggccgctgcttcgaatactggtccgaagacccgtacctggccggtcatgaagccatcggcatcgtcgccggcgtgcagtccaagggcgtgggcacctcgctcaagcacttcgccgccaacaaccaggagaccgaccgtctgcgcgtcgatgcccgcatcagccagcgcgccctgcgcgagatctacctgccggccttcgaacacatcgtcaagaccgcccagccgtggaccatcatgtgctcctacaaccgtatcaacggcgtgcactccgcccagaatcactggctgctgaccgacgtgctgcgcgacgaatggggcttcgagggcatcgtcatgtccgactggggcgccgaccatgaccgcgtggcctccctgaacgccggcctcaacctggaaatgccgccgagctacaccgacgaccagattgtctacgccgcccgcgatggccgcatcgcccccgcccagctcgaccgcatggcccagggcatgatcgacctcatcaacaaggcccgcgccgcgatgagcatcgacggctaccgtttcgacgtggacgcgcacgacgaagtggcccaccaggccgccatcgaatccatcgtcctgctcaagaacgacgatgcgattctgccgctgaacgccgaccctgccgcggcccggaagatcgccgtcatcggcgaattcgcccgcaccccgcgctaccagggcggcggctcctcccatatcacccccaccaagctgaccagcttcctcgacacgctcgccgaacgcggcatcaaggccgacttcgcccccggcttcacgctcgatctggaaccggccgacccggccctcgaatccgaagccgtggaaaccgccaagaacgccgacgtggtcctcatgttcctgggcctgccggaagccgcggaatccgagggcttcgaccgcgacaccctcgacatgcccgccaagcagatcgccctgctcgaacaggtcgccgccgcgaaccagaacgtcgtggtcgtgctgtccaacggctccgtggtctccgtggccccgtgggccaagaacgccaagggtatcctcgaatcctggctgctcggccagtccggtggcccggcgctcgccgatgtgatcttcggccaggtcagcccgtccggcaagctcgcccagtcgattccgctggacatcaacgatgacccgagcatgctgaactggccgggcgaggaaggccacgtcgactacggcgagggcgtgttcgtcggctaccgctactacgacacctacggcaaggttgtggactacccgttcggctacggcctgagctacgccacattcgagatcgctgacgtcgccgccgccaagaccggcgcgaacaccgccaccgtgaccgccaccgtgaccaacacctccgatgtggatgcctccgaaaccgtgcaggtgtacgtggctccgggcaaggccgacgtggcccgcccgaagcacgagctcaagggcttcaccaaggtgttcctcaaggccggcgaatccaagaccgtgaccatcgacctcgatgagcgcgcgttcgcctactggtccgaaaaatacaacgactggcacgtggaggccggcgaatatgccatcgaagtgggcgtgagctcccgcgacattgccggcaccgttgccgtggccctcgatggcgacggcaagacccagccgctcaccgaatggtccacctacggcgagtgggaggccgatccgttcggcgccaagatcgtggccgccgtggccgccgccggcgaggccggcgagctgacgaagctgcccgacaacgccatgatgcgcatgttcctcaactccatgccgatcaactcgctgcccaccctgctgggcgaaggcggcaagaagatcgcccagttcatggttgacgagtacgccaggctcgcgaagtaagggctgaagcgaggcaatcgcacggcgtaatacagctggcttccctctcctgaggggagccagctttttatatgcggacgcatcgtggcaggcgtgcggtggcatgcgtgcagcaagccgtagacaataacgctgaatttgtcattttttgaaagggcagatgcttcggtcatggctctctcaatctcaggtcttgctgaatccgtgatgtgagcgtgtcaatgccccgtacgggtgtgccatcttatgcgttacttagcagtgactaataccccccccgttgcccccgttgagggggtgattttgtctgttaacggattacactggaataccgtaaggcaggaacaatggagggtttgtgggcagaactatgccataaccccgtttaagggagtattcactggggcggcagcatggaagtgcttttggtcggtaataccgatttcattaccaaacagtggattcagcatgcttttccccgagaccatgtggtgatagcggaacgagaaggcactgtagacggcaatgaccgtctcagaatcgtcaacatgtctgacgccaacacccttgtcgacaccatcaccacatacgaatttgatcgcatcgtattcttttccgaaaatctgaccccacgcagcgatagagacggcgatctgggagcattgcgaagacttctgcatgccattcgcaacaggcaaacgcaaatactgatggtcagcggccccgaatccgaatttacctatccggaaaacgccgacgtacgtgataccagcaaaagtctgatgtctcgagcgtcggaagaactctgcctgtactacgcacgcacctaccgtctggaagcgaaaatcattcgaagcccgtacctgtatgcgtcggatcgcaacggcgtcaccgcatatttcaatcatctatttgaacaggcggaatcgggcacattgtcgttctgcgagcaaaagaaccagcagacatgctttctctgcgccgacgatcttgccgaactgatctaccgcatgttcgacgattggaccgccgaaagcgaagtattccacgtgcccaacgcgtttgacttcacatacggtgatttggctgatgtgatcagcgcggcatttcccggattatcggtgacttttggcgaagacaggtcccaatgttacccagcagacgatcatgtgctgcgattgcgctatggctggtcgccgcgatattcgctcaaacaggatcttccccctgtacttcaacgctggaaagaggcgcgtgcgcaggaacaatccggaaagcacccgatctgggattttctacgcaaccattcaaaaccatggatcgcaatcgaaatcttcatcacgttcatattggaagaactgcttcgcaccgcggtacaaggcaacagccagttgggaaccgtggatttgcgcctgtttttcgtggtgatcgttggcacgatgtacggactgaacgcaggcgtgttcgcggccgcgctcgcatgtgccggcatggcgttgtcgtatgcgtcgaagggtgcgtcgttcgctccgctgttttacgacacgtcgaactggcttgcgttcgtagtgtatttcgttgccggcgcagtatgtggatacgtgcagctgcgcaatcgcgaaaacctgcgattcatgcgtgacgaaaacagcttgttgagagagcgacttgcgttcctgcgtgacctgtaccacgatgtgcttgatgatcgtcgtatgctgcgcggacagattatcggcaggcgcgacagtttcggcaaaatgtatgcgatgacccgtgaattggacgaagtgctgcctcgaaagctctattacgcgaccattcgcattatgcaagatacgttgggcggcgatagtttcggtatttaccgaatcgataatggtggtcgtttcgcgcatttgatggccgcgagtccgcagaccgaatccttattcagtaaatcggcgctgcttgagaattatgccaacattgttacggccttggatcatggcggattgtgggtaaaccgcaatctcgaacaaaaccttccaatgtatgcggcgggcgtgcgtgccgatggcaagctggccgtggtgattgtgcttgccaaagcgcagcccgaccaaatgaacctatacttccagaacctgttcaccatcatgtgcggcttggtggaatccgcaatggtgcgtgccttcgattatgagaatgttgcgcggcagacgaggctggtgcccggcacggaattcttgaacactcaggcgttcctgcccaaagtgctggctgcaaacgagctcaagcgcaatcatatgagcaatcatctgctgttgcgtgtggaagacgcctggcaagacgatggtagccgcctgatgggagccattcgtcaaacggatgaggccggtgtactgcaggacggcaatgtgtatgtgctcatggatcaggtcagcgagcatgagctgccgattatcaacaggcgtttgtcccaggctggattgcatgtggcgctggtttcagaccacgaggaagattcgttgctggctaaggcttcggaacaagtggctgccgaatcgcgagcggatgaaacgccgcgcagtaacgctgcgtcgaatgactccgcatcgtacgaaggcggcgcagcatgaatgcgacggtgatggcgatgctgcttatcgccgtgcatgtgatgatatgcgtgctgctgtgcgtattgtctcgcgttggcgtgcttcgtgtggaggggcggctgcttccctttatgctgctggtgccattgtgggggccgttatgcgtgctgttgctgcatgtgcgcacgttgattcgcgctgacgggcacacggctccggggcttgagcaaatgcgtgtggatgatgaggaacgtcgaagcatcctggttgaggaacgagccgatttcgccaatacagtgccgttggaagaggcgctgatcgtcaacgattcaagtcagcggcgcagtctggtgatgtccattctcaacgacaatcccagccgttatatcgatgtgctgtcgcaggcccgactgaatgaggatgtggaagtcgtgcattacgcggctaccgccatggcgcagatcagtgccaaggaagatcttgcattgca

SEQ ID NO: 920 - DNA, 10302 bp, Unknown
  R117_24m  MAG No. k141_4999
ccgaatatacgtggcatgacatcgaaaccgaggatggggcggccgatcgtgcggtggccatcagcggccagcagcacattcccgtggtgctctatcctgatggcactttccaggtcgaaccgtcggctgtggatatcaagaacaagctcaacgagctgaatatcaagtaaagacaagagttgtacgagtttgacgatctgctgcatctgtgagcgaacaatacgtcggcgtccgatgtgttattcattggtgtgaatagcactccataggcactggatataaccacgccgaaacacaggtgagcaagcgcgtctacggtaagggattgtgcttcgcgaacgagcgttgacgtgcataacagcagcgaaaagggagtatcgggatgattcggattaggggagtgagcaagagctttgccgacaccaccgtgctggatgggcttgatcttgacattcctcgacaaaatgtggttactgtcatcggcccctcaggctccggtaaatccacactgttgcgcattctggatttccttgagcacgcggattccggtaccgtcgatttcggtgatggtcttgtggatttgaccactaccaaatctgccgacattcacaaggtgcgttcgaaaatcgggttcgtgtttcagaactacaacctgtttttgaacaagacggcattgcagaatgtgaccgaaccgttggtgtattccaagggaatcaagcctgatgaagcccgcaagatcgctattgagcaactcgatcgtgtgggacttgccgattttcatgatcggtatccgagcacactgtccggcgggcaacagcagcgtgtgagcatcgcccgcgccgtggctatgaatcctgagctgttggtgcttgacgagcccacttcggcattggatccggaaatggtcaacggggtgctgggggtcatcaagcaactcggtagcgaaggcatgaccatgctgatggtcacccatgagatgcggttcgcctatgaggcatcgaatcatgtggtgttcatcgaaggaggccatgtggtcgagcagggtgatccgaagcggatcttcgaacatccgcaggaggagcgtaccgtcgagttcctgtcttcaaccaacaatgtgctgatgattccggtgactcggtagaggcgtttcacggctgttgtaattaattgtgacaatatcaagagaagggtttgtcatgttcaataatcaagtgattcgcaaggctgcggctttgctgtccggtgtcgccgtgctggtttcggttgccgcatgcggttcggcttccgcttccaactccagtgcattggagcaggtcaagcaggccggcaaaatcgtgttcgccactgagggcacctatgctccgttcagttaccatgactccaaaaccaatgagctgaccggttacgatgtcgaggtggccaaggccattgccaaggaggtcggtatcaaggccgagtttgccgagggcagcttcgactccctgcttgccggtgtggatgccaagaagtacgatacggttgccgatcagatttccgccaccgacgagcgcaaggccaagtatgatttctccgaaccatacacctactcctacggtgtcgtcattacctccaaggagaacccgaagaacgtcacttcgttcgatgacgtcaaggggcttcgcgccgctgaaaccggtacctccaactggaacaagaccgctcaggagaagggcgctactatcgttcaggttaacgatttcggtcagcaggtcgatgccatcacgtccggtcgtgcagatgtgtcattgaacgatggccttgctgcgctcgactacctgaagcagaagccggatgcggacatcaagattgccgccaagtccgagaagactccggccgcctacctgccgttccgcaagggcagcgatgacttggtcaaggaagtcaacaaagccattgtcaagctgcagaatgatggcacattgaccaagatctccgaaaagtactttggcgaggacttctctcaggagtgacatgtttcccggctctcctgtaattagggggagccgggaaatatgagctggcctcgtgaagattacgagcagacgcaacatataccacacaacaaaggatgaccaatggacgcacgagtatggggaatagtcgtagattcctttgctaagctactgattcccggtatcactgtgaccattccgctgacgctgatttccttcgctctcggtttgatactggcgattgtggtggcgctggtgcgtgtggctaaagtacctgtggcctcccaaatcgcgtggttctacatttgggtgtttcgtggtacgccgttgctggtgcagttgttcgttatcttctttggattgccgtccgttggcattacgattccggcattgccttccgcggtaatcgcgttctcgctgaatgtgggcgcctatgccgccgaaacattgcgtggtgcgattcttgccgtgcctaagggacagcttgaagctggcttggcggcgaacatgccgtatgtgacgattatgcgccgcattattctgccgcaagcattccgctccgccttccctgcattgttcaactccttcatcgcattggtcaaggacacgtctctcgcggcgaacatcaccgtggtggaaatgttcatgacggcccagcgcattgtggcgatttactacgagccgctggtcctatacattgaagtgggcttgatctacttgctcttctgcacgttgcttggatggcttcaggattactgcgagaagaagctcaacgaacacttctgatgtgtttatatggcggcagtgcttgattcaagtcgggtgtttccttggctgaaatgcccgactttgttgtttctgacgtgcgacttggctgatccaaacattagtgcacaagatgtggctgccggagtgaacggaacatgaaatctgacgttcgctttcttggacttgcctgtgagagctatcagttcccgggcgtgcgatggtagcatggatggtgttggggcgcggcacaacgatatgccgtgcttgacccttgtgagaggagttttatatgaccatcgcaagtatgttgggcggaaccatgctgttggtgctaattctattagtcgttcttatcgtgctgctgggcgccgcattgttcatcgtgccgcagcagcaggcctacatcatcgaacgcttcggcaaattcctgaaagtccagttcgccggcatccacatccgtatcccgttcgtcgaccgcatcgccatgaagaccaacatgcgcgtcaaccagctcaacgtgcagctggagaccaagacgttggacaacgtgttcgtgaccgtcgtggcctccacccagttccgcgtgaacccgaacgacgtggccaccgcctactacgagctgcgcgacccggctggccagctgaggagctacatggaggacgcgctgcgttccgccattccggccctgaccttggacgatgcctttgcccgcaaggacgatgtggcgttcgacgtgcagaagaccgtgggcgccgagatgagccggttcggtttcaccgtggtcaagacgctgatcaccgccatcgacccgagcccgcaggtcaagaacgcgatggactccatcaacgccgcccagcgcgagaaggaagccacccgccagcgcgccgaggcccaacgcatccagatcgagacccaggccgccgccgaagccgagaagacccgactgcagggtgaaggccaggccaactaccgccgtgagatcgccaacggtatcgtcgaccagatcaagagcctgcaggccgtgggcatgagtatcaacgacgtgaacaacgtggtgctgttcaaccagtatcttgacgtgatgcgctcgctgagtgaatcgaacaacaccaagaccgtggtgctgccagcttccacgcccggcggttatcaggatctctacgagcaggtcaccaaggccatgctcaccgcggccgagacgaagtaatcaccccgtttgcaaatcctcatccatcgatagtgaagcccctccaagcgaggggcttcactgcgttccgcgctgattccgacaagtgcgcaaatgggccgtatgcagatcatgacgagtgtgagaatcatctacttatagattgtgacgaatgcgataatatggcatttatagaacttgataagtgtaaaatacaggatattacaaaatcagacgagtgtgaaacgaaggggtgaaacatgttgaaacgcaaggcatatcagcgtattgctttctggaaagagcataagaccaaccaagcattgctcattactggtgcacggcaggttgggaagacgtatctggttgaggaatttgggcagagcgagtatgagcatatggctgagttcaacctattgcttgacgacagcgtgcgtcgttcgtttgcgcaagccaccagtcccgatgatttgatgctgcgtatttctgttgctgcacaagggccgttggttgtagggaagacgcttatcttcattgatgaaattcaagcatgtccacagattgtcacttttatcaaaggactggtgggccggggagactatgactatattctttccggctcattattgggcgtagaactggaggatgtgcgctccctgcctgtcggatacttggatgaatttatcatgtatccactggattttgaagaattctgttgggcactggggctgtcggaaaccgtcttcgacattgttcgtgacagttacggtgccgtaaaacccgttcctgattttgtccatcagcgtttgacggatttgttccaccggtatctgttagtcggtggtatgccggctgcagtgacttcgtttgttgagagcaaggtcatcgatccagtgcgtgcgattcagaccaatattcgcgcatactatgagcatgacattaagcagtatgcgccgaaggataagagactggtcattcaagaaatgtatcgacttatccctagtgaactgcaaagtcaaaatcgcagattccaagtcagttctattgccgaagtcaaacgattctcgcagattgaagatgaattcctttggcttacccgtgctaatgttgcgctgcccgtatttaatgttgccgcccccgtggccccgctgagagccagcaaagaacgtcgattgctaaaactgttctattccgatgttggattgctgaccagctcgtatggaaaaaagtcagcactgggcatactggatggtcaggctgcgatgaacatggggggagtctatgagaatgtcgtggctcaggaacttaccgcgcatggattcaccaatctgtattactttacgaaaaaaggaattggcgaactggatttcctgatagagaccgatgatggtgatgttttggccctggagattaagtcgggcagatattaccgttctcatgcggcgcttgacaatgcgttgagcgctgatggctacaccattgacaaggcgatggtgttcgcggaaaccaacgtgttccaagaggaaggcgtcacatatttgccgatgtatatgctcacgatgctggttaatgagtgatcggtgccttggtggtgcgatgcaggcgatatttgtgatggcggtcgataaggaggtgctcaacgattctgttgtcggaccggttccgagctggtcatgaggcgtcattggaaagttgcggtgtgtagggtggtgtctttgccgagagtacagtgtttctcgaaaaatgcggtgcatgcgatatgtttaatgtaattctaaatattacattaaacatgagtgagcttcccgaattcaatttgtaagtgcaacgttcgtctttgggtagcttgtcttcgacattagcttgccgagttcgcggtatcaaacctcgttgggtgtttcccagtccaggaccttcatgggggtgtcgttgatctcgtcgacgatggcctgcaggtccgcgtccgtcaggtcgtcgaagctggttctcttgggcaggtagcggcggatgcgcccgttgcggttctcgttgttgcccctctgataggacgagtacgggtccgcatagtaggtgagcatgccgagcgactcgtccacgagcaggtggcaggaggattccgtgccgttgtcccaggtccggtcgatgcgcgcgggcgcggggatgtccttgtagatgtcgtattcggcgcgcgcggtggacagcgcgctcttgtcggggatgaacccggcgaacagacggcggctcttgcgttcgacctgcgtgtcgccgcaccgcctcgacggggaggcgccgacggccgtgtcggactcataatggccgaacttgcggcgcgggcccacgcgtttcggacgttcgccgatcggctgtgtcctcagctcgtcgatccggacacgttcctctgccgacaggtgggaatacactctcatatcgagcgcgacactttctctctggttatgaacttgaacactttcagccatagacaggtgttgcgcttctatttagaactcgggcggtctatcattgcatctgtgtctcgctattgtggggaggcgttgtaaatgccgattgtcgcgggatttcggccgttttgtgatgcggtggcgacgtcgtggcggacgagtgcgtatgcgttgcgtaggcgtccggtgcgtacggtggtgatgtggctgtcgatgttggtgatgatggcgatgccgtcgttgcaggtgtggctgatcggttgggcgtgcggcccggacgggcttggtatggggtcggggctgggcgtgggccggttcgcagtgatcctggcggtgctgacggtgggcgcggtgttgatgtcggtgtcgtcgtcgttggcgcagaacatgcgtgacttgttgcaggagccattgatggccgaataccagtccgatctgaccgacgcgctggcgcgtctgactcccgcgcagacgttggacgacgaggtgacgacgcaggtgcgggccgcgcgcgacgcgatcccgtacaacgtggcttcgcaggccgcggacgcgacctcagtggtgggcgcgctggcgtcgatggtcatgctggccgcgtccttgtggcatatgcatccgttggcggcactgatgatcgcgttggcgatggtcccggagctgttggcccagttcggcgtggagaagctcacgaacgagttatggcccaagcgcggcagggagtcgcgtcgggcgaactatttcgagcggttgttggattatccaccgtcgagcacggagatcgcggccacggccggttcattcggcatccctgcgcaggcgcgcgtgcgctatttcaatatggccggcatgtgggagcgtatctcgtggcgcacggtgcagttgaccggtgtgagttcgctcgtgttcgccgtgctgacgggcggcgcgttctggctgatcctgacgtccggccatgcgtccgtgtcgagcatcccggccgcgttggtgggcatcatgacgggattgtcggtcacgcgcaccactggcgaggcgttcggcaacctcatggcgtccacgccgatgattcttgcctacgaacggctcatgggcctgctgcgcgcgaaccccgcgatccccgaaacgaccggtccggtcggcgtgcacgtggagcatctgacgtacgcgtatccgactgttgcaaagcatgacgatgacgcggatgacgcgtcggcagcgtcggttccggccgttcagactccggcgttggacgacgtgtcgttggatgtcgaagcgggatcgatcgtcgcactggtgggcgagaacgggtcaggcaagaccacgctcgtcaagctcatcgccggcatcctcgacgccccggacggcactgtgaccctgccctcgggcgcggacggcgggaacggtcgtaccttggggtcgtgggccgaacggttgggcgcgtcgagcatggtgttccaggatttcacgcacatcgaggtgaccgtgcgcgagttcatcgatcccgctctgcggcaatcggacgatgagttatgtgacgggttgcgtcgcgcccgcgcgctcgacatcgtggatgggcttcccggcggcttggatacgcagctcggtcaggagtggggcggcgttggcctgtccggcgggcaatggcagcggcttgcgctggcccgcacgttcctgtccggcaagccgttgtggatactcgacgagccgaccgccgcggtcgacgccaccgccgaggccgcaatctaccatgatctgatcgccaaccgtccggcgggcaccactgtgatcgtcatcagccaccggccccgcgtgctaaccggcatggaccggattatcgtcctcgaccacggccacgtcaatgaaaccggcacctaccgtcaactggtcgaccgcaacggcaccttcgcccggctcgcacacgacagcctcgaatgagctcgatggcatatccggttgattgttaaaaactcagtggccggccgacagattcgtccgacgaggctcgcgcgagtgatcataacgcgggtcgcgtcggatatgcgggagatggcacgccttatatcaaaagcgatgattttcaaataaggacacggccccatcagccggtcgcgggtactacagtgaaccacaacgttcctcccccgatggtttggggaaacacagaaagaggttggtcgtcggcctgatcatcattgcgattcgcaccggcttcttccgcaagaagctgggtgccagcgagaaccttcaggagtatttcgcctgaatcgggcttgtcgtccatccgcattccgcctcagctactcatatcgataacttactaacaatccattcattgtcttcttaccagtaaaggaaatcgccatgtccaacttcattcccaacaccgtttccgcagaacgcaagcccgtggacatcgtcaccggcacctatgtggactatgccggcgtgacccgtgccaaatccgttcccgcccgcaggcgtgaagccttcgaacgcaacggattgggcgccgccctggtctgggtggtgttcggcgcggacaactcgttcgccgaaaacgagaaattcaacgtgtccggcgatctgcgcctgcaccttgacacttctgcttctgcattgcgtgccatacgagcgtgaagcggcgtttctctgctcggtgcatgccaacgtatacatggatgtcagccttgccaatacgcatatgggagcgcaggtgagggaagtgctgcgcaatgttctggcgtggtgcgcatttgacaagttgctctatgcgtcggacggcgtcggcatcagtgaattgcattatctggccgcggtgctgttccgcaggtatattgcgcgaatcgccatcgactgggtatcggatggcgcatggaacgcgaatcaggcgaaacgggttatcgacgccatcgcgcatgccaacgcggaacggctatacggtttggcgtgaacgggtacttcgccggtgccgtcacttcccgaggaacgccgggatggcttcagccgccgcgtatcccttgcggtacatcatctccagaccctcgaagttcttcttcagggtgttgaggccgtacaaatcttcgggtgcgaggatcagcactttgccttccgcctcataatgcttggcgagttcgagttcgtcgttgtaggtcttgtaacgcatgcgcagcttctcagccgcagcggggtgggagcgttcgagaatgcgggccggagccagatccttctgctgcttgcgtacttcgtcacgcaagcgggacagaatcagaatcacgcgatcatagccgtcatccagcgccttctgtaccgggatcggatcggcgatgccgccatcgaaatacggcacaccatccaccacatacggctcgcaggccaccggcacggcggacgaagccttgatgatgtcgaaatcatcaaaacgcacgcgcgatttgtcgaaatacttggtcgagccgtcctcggcattgcaggccaccacggtgaatccggtcggattggcctcaaaggcctcgaaatccaccggattctcaccgtcatggttgctcagcgtgccgtagatgtagtcgaggttggcaaagttgtggttcttgaagaagctttccgcgctcgcgtactccttacggaaggcgtatttggtgtagaaggtgtggttgcgtccatgttggcgggcgatgaatgaggtcatattggccgcgccggcggaaacgccatagcacatgtccacgtcgatgccgtcctccagcatgcggtccataacgccgcagccgaaaatcgcgcggaacccgccgcccacatcaatcatcgcggtcttcagtgccatatcagcctcctattcatcatcatgcatccgatcacgcattcagcaggtcgcgtgaaagccgtgtaacacgttcggaca

SEQ ID NO: 921 - DNA, 41078 bp, Unknown
  R117_24m  MAG No. k141_5663
cagcaatgcgctcgacaaggtggcgaccgacggcgtcgatgccgtggtcagttccgacattggtgcgtcgttctgcgtgcgcgaagcgttgagccgcggaatttccattcctgacgagctgcagatcgttgcctacgatggcacgtatttaaccgatttggccggcatgaagctgaccgcggtcgcgcaggatttctcggcgatcgcacagtcggcagccgaccatatcgtgcaggctactgccaatgaggaagtggccgcagctaacgcttcacgcaagaatattcccaagccgttcgagccgaacgtgcttattcccatgacgctggtgccaggcgataccacgcgttgatgctgcgcgttggaacgctgggttgtgtagaacaccgcatcaaaccggttcgacacgcgcattttgcggtattactggacatcaacgtccctttcgaggtaatatcaaaccggttcgatacgtataagtatgtaaaagcacgcatacactgcgtacacattgcacctgcatccatgaaccaagggaggtcccatgaaaaacaaagtgcagctcatcgcttacgccgatcgtctcggcgatggcactcttagctcgatgaccgacatcctgcgcacccgcttcgacggcgtgtatgacggcgtgcatatcctgccgttcttcactccgttcgatggtgcggatgcaggctttgacccgatcgaccacaccaaagtcgacccgcgtctcggcagctgggacgacgtcgctgaactttccaagacccacggcatcatggtcgatgccatcgtcaaccacatgagctgggaatccaagcagttccaagacgtgcttgaaaaaggtgaggaatccgagtattacccgatgtttctgaccatgagctccgtcttcccgaacggcgccaccgaagaggatctggccggcatctaccgcccgcgcccgggcctgccgttcacccactacaagttcgccggcaagacccgtctggtctgggtcagcttcaccccgcagcaggtggacatcgacaccgattccgacaagggctgggaatacctcatgtccatcttcgatcagatggccgcatcccacgtcagctacatccgtctcgacgccgtgggctacggcgccaaggaggccggcaccagctgcttcatgacccccaagacctttaagctcatctcacgcctacgcgaggaaggcgtcaagcgaggcctcgaaattctcattgaggtgcatagctactacaagaagcaggttgaaatcgcctccaaggtggaccgcgtctacgacttcgccctgcctccgctgctcctgcactcgctgttcaccggtcacgtggaacccgtggtccactggaccgaaatccgcccgaacaacgccgtcaccgtgctcgatacgcacgacggcatcggcgtgatcgacatcggctccgatcagctcgaccgcagcctcaagggcctcgtgcccgacgaggacgtcgataatctggtcaacaccatccacgccaacacccacggcgaatcccaggccgccaccggtgccgccgccagcaacctcgacctctatcaggtcaacagcacgtactactccgcgctcggctgcaacgaccagcactatctggccgcccgcgcagtccagttcttcctgcccggagtgccgcaggtctactacgtgggcgcactcgccggccgcaacgacatggaactgctgcgcaagaccaacaacggccgtgacatcaatcgccattactactccaccgccgaaatcgacgaaaacctcgagcgcccggtggtgaaggccctgaacgccctggccaagttccgcaacgaactgcctgcattcaatggcgagttcagctacgaagccgacggcgacacatccatcaccttccgctggatcgctgccgacggcaagaccaaggccgccctcatcttcgagcccggccgcggactcggcacggataacaccactccggtcgccagcctcgcctggaccgatgccgccggtgaccacgagactgatgatctgctgagcaacccgccgattgccgatatcgactaaccgttggcccataaacgccactccgctgtgcgcgctccaagtagtgcgtccggcgtaagctgggtccatggaaaacaaaccgcccgcagtgcactgaagctagtgcgctcgggcggttttgcatgtggcggggttgcgggtcatgctcagtcggagctggccggtacctcccgccggtgatgagagcaaagaaagagcagcaacatgttggaaccgtacgtgcgcccgggtattgacgaccgcccggatctcgacaaggcattgagtcccgaagacaaggatgccgtggcccgactggccatcaaagatcgtcggcgtcctcccgaggcatccgccgatcagcccgaggcccaggccgtgcgtctggcggccgccggttcgtcggctgctgccgctgccgcggccagcgtggatgcccctgcgcctgatctgtcgtctgcatatctcgatatgcgcgatccgatggtcgccgccaatggtcagcgacccaccgctgttcagatttcccgtcttaattggggctttttcgtggcttcgattctggtcggcgcgccttgggcggcgttgaacaccatcgccatgcccaacgccgtggcgcgattgttcgactacgacaccgcttctgccatatcggtcaccatcaatccgtccaccagccgtccgctgcccgtcgccactgacttggtggtgcctctggccgtgctggtagtcgttggcgtggtggcctccatgttcgcgatgcccttggtctccgcgctgtccgaccgcacacgtattcctctgggccgccgtaccccgtggatggtggcgggtggcgtgctgtgcgcgctgatcacgctggttctggggcggaacacaggcctcgtagtgctgtgtttcttctgggcgctcatgcagtttgcctatgcgatgatttccgtgccgttggccagcgccatcagcgaacgggttccggacaaattccgtccgcgcattgagcgctggcacggtatcggcgtgatgcttggccaagcgcttggtgtatgcatgggtgcgctcggcgtgatgttcgactccttcacgccgtttgcctacaccgccgtgctgtttgcggtttccggcatcctgaccgtgatcatgctgcccaaggagccttccagccaggagcagccacatcaacgattcgagtcgagccaggtgtttgaccagctgcgtccgccggcacatgcgcctgcattcgcccgtgtgttcgccgctcgcgtgtgcatgatgacgggcgttgggctgaccggggtctttctgtggtatctcgtgcgcttttgggtgtatggcaaggctgtggtgttcacttccgcgccattgaccattcccgcgggcctcctcatcgccggcatggccgcggcaacgctcatcggtgctgcgctcgcgtcctgggccgctgggccgatctccgagaagatcgaggaacggaacatcgccaccactgcagtggtggcggcatcctgcctgctgtatgccatcggcgtggcggtggcatgggggctcggcgtctggtccaccggcacggcacgcgaaaacggcatgctgctcttcgcgctgatctccggattcgccttcggcgtctacgatgcgttaggtcttgaactggtgatggactctttgcccgacccgcgccgagccggccacgacctcggcatttatgcgctcgccaactcggccggtctggcgctcgccgccatcatcggcgcgctactggtgaacgccttcgagcacagcttcggctattacctgctcttcccgtccgccatcgtcatggtgctgctggccggaatcgtcaccctcaccgccgagtccgcgcaatgacgggccgatccggctccccggccgccggcggcgttcctccccgcggcgggggcgttcgtctcggcgacgtggcgtccacaatgtgaacccttgctggattggcaagacagccaaacctatgtttacattccagttcaggtcgaacggcctgaggaaataccgaaaggaggccacgcgatgactggattcaatgcttctgcgtttgtatccgcacgaattattagcccgtcttcgctggcggactaattcggcattgatgcttgaagccccgtcaacgaaggcagggccaatcaagctgacacaatcggtaaggccctgcaagttgcggggctttttttgttgcgctcacaaggcttacggcagaatcccgcagacggaaacggtagcggacagtacacggcaacaacacagcaacagaacaacaacctccctgtgagacgaaataatcgcccgccaatgagagtgaacgagagcaaaacaggagtaacaatgactgcagcagtcgaagagactggcttagggcaggcggcaggtaaagccgctaccttggtacgcgattcggtcaagaccgtgatcgccgcatcgatggtcggtaccgccatcgaattctatgacttctacgcctacggcaccgccgcggcaaactacttcccgcacatcttcttctccgcgaaggacaaccccaccgtcgcactgctgatgagcttgctgaccttcgccatcgccttcatcgcccgcccgctgggctcgctgatcttcggccacttcggtgaccgcatgggccgcaagaccacgctggtcgtcagcctgatgaccatgggtgtcggcaccttcctgattggctgcctgcccacctacgatcaggtcggcgttggcgcagtcgccatcctctgcctgctgcgcttcatccagggcatcggcctgggcggcgaatggtccggcgcggcactggtcgccaccgagaacgcgcctgaagacaagcgcgcactgtacggctccttcccggagctcggtgccccgatcggcttcttcctgtccaacggcacctacttcgtgctcgaatccttcaacaatcaggacgcgatgctggcttggggctggcgtgtgccgttcctgctgtctgccatcctggtgatcgtcggcctcgtggttcgcgttcacatggaggagaccccgatcttccgtatggctcaggagcagaagaaggtcgtcaagtccccgctgaccgaggtcttccgcaagtcttggcgtcaggtgctgcaggccaccttcctcgtggccgtgacctacacgctgttctacacgctcgccacctggtccctcgcttggggcaccaaggagcagggcgaaggcggcggcggccttggcttcaccaaccaggaatacctgctcatgctcatgatctccatctgcgtgttcgccctgttcatcgtgctgtcctgcctgtacgcggacaagatcggccgcaagcgcgtgctgaccttctcctcctgcgcactcgtcgtgttcgccgtgctcttcccgttcctgctggacggtggtctggtcggccagaagaacttcttcgccaacatggtgttcctgtgcgttggctttgccctgatgggcgtcgccttcggcccgatcggcgcgttcctgcctgaactgttcgaggcgaacgtgcgctactccgggtccggcatcggctacaacctggccgccatcgtcggcgcggcgttcgtgccgaccatcgccacttggctgagctcccattggggcgttcactccgtgggcctctatctcgccgtgatggccgtgtgctgcctggtgtcggtcctgacctgccgtgagacgaaggacgctgactttaccaagtgaaatcctccataactaaatatcgccaagttcacaacgtgaaaaatctcaattccacgaagtgaacccctacgaggcttttccggtgcaacaggactaaacctgcatatcggaaaagcccacaaggaaagccacaactaaaaacagtttctgcagaaccagcagagcacaataacaattaaagatttcacccccataaacaaataaataaaaggagcgccaaaaatggcagcaactatctggtacgagaaggacgccgatctgtccgtgttcgatggcaagaaggtcgccatcttgggctacggctctcagggtcacgctcacgcactgaacctgcgtgactccggtgtcgacgtggtcgtcggcctgcgtccgacctccaagtctgtcgagttcgccaaggagcagggtcttgaggtcaagccggttggcgaggccgtcgccgaggctgacgttgtgatgatccttctgcctgaccagtaccaggccaaggtctacaaggaagaagttgagccgaacctgaagccgggcgctgccctggccttcgcccacggcttcaacatccactacggctacatcaagccgtccgaggatcacccggtgttcatggttgccccgaagggcccgggccacatcgttcgtcgtgagtacgccgctggccgtggcgtcccggtcgtcgttgccgtcgagcaggacccggacggcaagacctggccgctgtgcctggcttacgccaaggctctgggcgctctgcgtgcaggtgccatcaagaccaccttcaccgaggagaccgagaccgatctgttcggtgagcaggacgtcctcatgggtggcatcaaccacctgtgcgacctcggtttcgacgtgctgaccgaggctggctaccagccggagatcgcctacttcgaggtcttccacgagctgaagatgctggtcgacctggctaacgagggtggcctgaacaaggctcgctggtcctgctccgacaccgctcagtacggcgactacacctccaccgtcatcaccgaggagaccaagaagcgcatgcagtaccagctcaagcgcattcaggacggctccttcgccaaggagttcatggacgaccaggccgctggcgccccgaagttcaagaagctgcaggaagagtactctcacccgcacctcgagaccgtcggcccgaagctgcgcgccatgttctcctggaacaacgccgaggccaaggacaaggacgaggccgagtccttcaacggcaagatcgctcgtacccaggttcagtgattgccgcccctgaaggggatttaagctagcaaaaccgccgttcccgcccatacgggagcggcggttttgtgttgttgcgcgcagcgaatcattctcaataacaactatgcgctgatttcttgcaggcaaacgaacaccgaatatgcaagatcgttgatatctcagcttttccccatatgtgggattgtgcgattctgttcaaaagggtgcagagttgttatcgagaatcgttctctgcacacggctgtccatactccaatagtgacctagctcacgttgtggactccagcggggctgcgacggcgttctcggtaggattgatttcggtttgaaggacacaatcctcgcaacacaggacttatctgcacaccgtagataccccggcgcccagcggcgccacaccccactactgaaaaggagtgccaataatggcagcacagatctggtatgagaacgacggtgatctttctgttctcgaaggcaagaaggtcgcaatcatcggctacggctcccagggccacgcccacgcgctgaacctgcgcgattccggtgtcgacgtggtcgtcggcctgcgtccgacctccaagtcggtcgacttcgccaaggagcagggcctcgaggtcaagtccgtggccgaggcttccgccgaggccgacgtgatcatgatcctggcccccgaccagtaccagcgcaccatctgggccaacgacatcgagcccaacatcaagccgggtgccgccgtcgcgttcgctcatggcttcaacattcactacggctacatcaagccgtctgaggatcacccggtgttcatggttgccccgaagggcccgggtcacatcgttcgtcgtgagtacgccgctggccgtggcgtgccggtcgtcgtggccgtcgagcaggatccgcgtggcgatggttgggctctgaccctggcctacgccaaggccctcggtgctctgcgcgccggtgccatcaagaccaccttcaaggaagagaccgagaccgatctcttcggcgagcagaacgtgctcatgggtggcgtgaacaagctcgtcgagatgggcttcgaagtcctgaccgacgccggctaccagccggagatcgcctacttcgaggtctgccacgagctcaagatgctcgtcgatctgatgaacgagggcggcctgaacaaggctcgttggtcctgctccgacaccgcccagtacggcgactacgtcaacaccgtcatcaacgaggactgccgcaagcgcatggaataccacctgcagcgcatccaggacggctccttcgccaaggagttcatcgacgatcaggatgccggcgccccgcacttcaaggaactgcaggagaagtactccaacgagcgcatcgagaccgtcggcccgaagctgcgcgccatgttctcctggaacaaggatggcgtcaaggatgccgacgaggccaactccttcaccggcaagatcgcccgcgcccaggttcagtgattcttccttggctcccctcgggtgaggtgcgcacgaacagcgagccggcaatcgcagccttcaggctgtccgtgttgcagtacgctggcgcgtaagcgcctgagggtggtccccagtgcataccaaaaggccgtcgctccgattcattcggaacggcggcctttcgcttattccaagggatctactgaataacccacgcagaagtgtcggtggggagctggccttcgggggtcagcgggccggacgccagcaccacggagccatcgggcagcgcgaccggggcattgccgaagttggtgattgaggtgaacacccgcccgccaaccgccgcgcgggtgtacgccaccacatcgtcgcccatgtccacctgctcggccgtggtgtcgcgcgtggtggtcagcgactcctggcgaatcgccagtgcggcgcgatacagcgcgagcatcgagtccgggtcggcttgctccacgtccaccgcgtaatccttgaaccacagcggttgcggcaggtgcgggtcggcggccggcgtcacgccctcagcgcgcgtagccggcgagaagccgaaggaagcacccgtgccgaactggccggcggcgcacagcggcacatggttctcgccggtaccgtcatcggccggagtcggacggctgaagtcggccaaggccggctcatcggcggcggtccacggcagcggcacgcggcagccgtcgcggcccttgtccatcgtggcctgagcagtgtggaaagcggtcggatcctccaagtgatcccacggaatatcggccacctcaaacaggcccagctcctcgccctgatagatataggcggcaccgggcaggccgagctccatcaaagcggcggcgcgggcgcggcgagtgccaagctcgcgatcctcgggataggtagtgccgttgcgcagcagccagtcgtgcggcagctggtggtagggcgcgcccttgatctgcggcaggccgtaacgggaggggctgcgcggcacgtcgtgattgttcatgacccacgtggtggtggaaccgccggtttcggccgccgccttgagtccggcggcgatggcctcgcggaactcgtcggcataccagttggcttgcgcgaagtcgaagttgaaggactggcccagctcgtccatcgaagcgtacaggtgctggtgctcgggcaccacccacgcctcggccacggcaaagcgcggcgggttgtactcgttgaacaccttgcgccattcgcggtagatatcgtgcacctcgcgacggtcgaacagcgggtggctgaagccatgattcagcacgccgaccacgctgtattcgcggccgagctcttccaacggcttggattcgaggtccttggccagaccgtgcgccacgtcgatgcggaagccgtcggtgccgtggtcggaccagaaacgcagggtcttcttgaactcctcgtggatgtccggattcttccagttgacgtccggctgcgccttatcgaacaggtgcagataccactggccgtcggccacgcgcgcccaggccggaccgccgaagaaggattgccagtcgttcgggggcagttcgccatgctcgccgcggccgtcgcggaagatgtagcggtcgcgcgccggggagccaggctcggcggcgagggcctcctggaagaacacgtgcttgtcagcggtgtggttgggcacgatgtccacgatcaccttgatgccggcctcgtgcgcggccttggccatcgcgtcgaagtcttccatggtgcctaggcgcgggtcgacgttgcggtagtcgattacgtcgtagccgccgtccgccagatcggaggggtagaacggggaaagccagatggcgtccacgccgaggctcttcaggtagtccatcttctcggtgacgccggcgatgtcgccgatgccgtcgccgttaacgtccttgaagctgcgcgggtaaatctggtaaacgacggcctgcttccaccagtcgtcattgaggttatttgcggtcatgccgattccctcctgttccgggtgcgttgtggttgggttgttccggtcgcgcccgaactgctgtgtgaaggcccgaccgttgtattgatgatgacaacgatatcatgtgaattatgcatgcaaaaatcgatttatcggcgttttgcggtggtaacgtgctcacgcctgcgcgggcgctgctgtcgcggcaggcggcgcggtggtttcgcgcagtattagcggagtgtccggccgtacgaatgccggttcgattgacttgccggcaatggcatccaataccatgtgcccggcagtcgcgcccattgcgaacgggtcctgatgcagcgtggtcagtcccacggcggcggacagggtggaatcgtcgaagccgatgatggaaatgtcctgaggtacccgccgcccgtattgacgcaggcgatacagcacgggcgcggccatttcatcatcctcaaaacagaaggcggtgatgctgggggaggcgttcagtacggcgttcaatgccgcgttgctttcgccaagaccgcgttgaatgctcaggggcgttagctcgatccccggatgggcggcagcggcatcaatgacgccctgcaaacgagcctcggcactgtagcgcatattggtttcggtcggtgcgctgccgacgaacgcgatatgccggtggccgagtgcaatcaggtgctcgatagccgaacgtgtggcggcgtaatcatcaatgctcacgcctgcgtcgaacccatcggtggaggggatgttgatgccgacaatcggcacgtgcatatgcttcagtcgctccacttcagccggttcgatgtcgaaggagctgacaatcaccgcatccgcattgcgccgcacgggcaaatccgcaaagaagtcgtggcgctcggcggcgttgcgcatggggtagggcacagtgtcgtagccggaggggcgcagcgccgagtcaagaccggcgaagatgttcgaattgaaccaactggcgatggtctcgctggcaagtagtgcgatacggaacgattggccggattttagggcggcggccgagcgtgagactgagtagtcgagcttttcggccgcggccatcactcggtctcgagtctcgggaagcaccagatccggcttggcgaaggtccgggacaccgtggatacggaaacgccggcctcgcgggccactgcctgaatgcttgccttggtcatatgccgtcgctccttcgccgtcgcgaacaatcattgtcatgacaacgataacatgcccataacaagtcgtcgtcttcggctatctcgattacgaggggctgatctagggtgtcccggacatctacttccgtttcaaggggctccttgccggtgaaaccacaagtgcaaacgactttgtgccaacgtcattccgccgttctcgcgctgggtctacttgggcgccagccccttgaagcggaagtggatgtccgggaaaggccaaatcagcccctcgaagccgatttagaccaatttcccattgcggaatcgatcaccgcttctctcggcgcatcacggcggctagggactgcacgcgtggcaggtcgaagacctcgtcggtatgcaccgcgtggcctgagctgtccgccagcggcacgcgccagttcgaatactcgctggaagtgcccggctgattctgggaacggcattcgcccacgccgtccaccagcgctgcctgcagcagcagcgacggcgtatcggtgagcatggcgtgcatcgcttccacgatctcctgcacatggccttccacatcatccgccacggtctgtgagatatagccgttctccaccagacggttcatcatggccgtgcgttcggccatcgccgaggcggcgaacgcctccaccggctcgctcaggagatgcagctcctcgcgcagcttgacgtgttcgaagttcaggtagccggcggtgggtggcagatcgtgcgtggtcaccgaggccaatgcctgcttgcggtagtcctcgggtgcgcggtacgggtcgccggcgttcggcgaatcgtccacgcggttgaaccattccacgtcagtgccgagtacgccgtgatctgccagaatgcggcgtacgtaatccggcacggtgcccagatcctcgccaaccaccatgcctccggcgcgcgtggcttcgatggccagtactcccagcatcgcttcgtggttgtacgttacgtatgcgccgttgagggcgccgagcccctgcggaatccaccacaggcggaacaggcccagcacatggtcgatgcgcaccgcgcccgcgtgctcgtacatcgaatgcaccatctcgcggtacacctggtagccggtggcctccagatagcgtgggctgaacggcggctggccccaatcctggccctgctggttatagaagtccggcgggcagccgaccgtgacgccgccggaggcgaagcgttccggattggcccaggcatccgcgccgagcccgtgcacgcccacggccatgtcttgcatcagacccagtgtcatgccgtggtccagcgcctcctgctgcgcggcgttcacctgctcggcggcaatccactgcagccagcggttgaactcgaacaggtcgtggtgctcctcgacgagctggcacacggccgggtcgtcgatggtcttctcgaagaaccaacggttctcgccccacggcgcgccccatacctcgaagcacaggcaccaggtggcgaaggaatcgaggtctgggccggcggtggtcttgaaatgctcgaattcgagctcgcgcttgttgttgcggcccgcgtcgaagatcaggcgcagcgccgggcgtttggccgcccacgccgcgttgatgtccatcgggttcgattcgtcgttgcgtgcggccactgaatcatgcagcgcatccacctgcgctcggatatcggccggcagcgtgccgtattcggggatgtcctgcgggcggatgtacgtcacgttgaggaatcggcgcgattccggtagatacggcgatggctcaagcggcggaatcggcgcgccggcgtgaatcgggttgatgagcatgaagtcggccttggacttgtcggccgcgtccgccagcagcagcttcagatcgccgtaatcgccgatgccccacgattcgcgggaccgcacggaatacatctgcgtcatccagccccaccgctggtgctcggcgaccgcctccggcacgggaatgcgcgcgggggcggcgatgatggccgccttgccctcgcgcccgtccaccgtgacggtcagtgtgtggtagcccatcggcagatcgggagcgatggtcaagtccggcttgccggaattgaggtgcggcagcagggcaaagtggccaaacgcggtgccgtcctccagctcgatggagacggtgatgtccgcgtccgacgaacagttcagggtgatgccggtcggtttgccggtggtggcgacgatggtggaggggagcaaacgtttgctgttttccacctcaagttgggtcatggagcgtgcgatggcctcgtcgctggatgcgtccacgtcgagggcattgagtacggcgaccaaggccgcgtcgctgatttcggtgtaggtgccgagctggtcgatgaacgaggtggaaagcccgcatgctttggccagcttgaccagcggacgggcgagtcgttccgcgctttccgcgcgctgcggggcaccggaagcggcgtcgttggtggtgtctgcgatggtgccggtgctggtcgctgcgtcgttgccgtacgcgtcagtcatgatgactccttgcttacagatcgggtactgctagtcgtttgcattgctgttcgagggccgctctgcgttgaggttccggcaatctgacagaccaatgttcgagctgttctatctttaccgtaactcatattgacaacgattgcaatatggtcggtgagttgggtggccggcgggctatccgagcacggcgaacgactgcggggagagcgtcagctgcccgtcgcccacggccggctcgccgaggccgagcagcatgacggcatcgggggagagcgtgtccggcaggcccacggtttcgctgtggcggcccggattcatggcgatgaggagaggcccggccaccgtgccgtcgccgctgtcgtcgttcggcgcggccgtgcgtagataggcgaacgcgcggccgtccgcgggcgcggcgaccacgctgaacccggcgccggcggccagtgccggctgggcggcgcgcaacgccagtactgagcggatccagttgaacagcgaatgcggtcgcgaagcctcgccggtcaccgtcggcgcatcgtcggccggatcggtcggcagatacagcgcgtccgccggggccgtggagaagccgagattcggagcgtcggacgcccattgcatcggcgtgcggctgccggtgcgcacgtagccgccttccttggtgggcagcgcgcggtagcgcatgccgatttcgtcgccgtagtagaggaacgggcagccgggcatggtcagcagcatgccgtacgccaccttgagctcgcgttcggcgaggcgctgggccgtgcgcaaggtgtcgtggttgcaggtgatgaggttgaaatggccgcccgccgcgcggcaatcggcgagttgcggcaggtattccgcgaggaatggggcgattgaggcacctgaatcggcgttgaaataactggaatcgccttcgtgttccataggcgtatcagtattgcgcagcagcaggttgtagccattcgggtggccgtcccagcgccagtcgaggtagaagtccatgtcgaacccggcctgcatcgattcgttcggtcggccccattcggcgacaaacgccgcctcggggaattcagggcggattttcgagaacatgtactgccaggtgcggattgtgtatggtttgccggcgtcgtcgtgcttgacgaggctgtcggccatgtccactcggaaaccgtccgcgccgcgggccagccagaagcgcatcacgtcgatcatcgcgtcgcacgtggccagggcatccgggccgagcgccggtttctgccatgcctggtgcgggtgtgcgaaaccgtaattgagggccggctggcatttgaagaagttgaggatgtaggtgccgtctcgctcagtctcgccgccgatgaagggcagaccgtcgccgccggcgatccaggagtcggtccagatgtagcggttggagacattggtgggctggtctctcccccagtcggcttcgccgacagccccctcctcagagggggctgtcggcgggtctccggtgttttctttacggctcggcccatcggaggaggcgacaatagtgcgctcagcagggttcgggcgggagctggcttggaaccaggggtgttcttcgctggtgtggccggggaccaggtcgagcagcacgtgcatgccgcgccggtgggcggcttcgaacagcgcgatcaggtcgtcattggtgccgtaacgcggcgcgacttgtgtatagtcgcgcacgtcatagccggcgtccttgaacggcgagtcgaaacaggggttgatccacagcgcgttgcaccccaaagcggcgatgtagtcgagcttgccggtgatgccgggaatatcgccgatgccgtcaccattcgagtcagcgaacgattgcggatagacctcgtagaatcgggcgttttccagccaggctggcttggggtaagtctggggctgttgcgtcatcgtggtccttccttcaggtgtgatggatctggcttctctgccgggtccgaataacggttgtttttacagattcttgcgggatgttgcttaatgatactgcatgattgcgaacgctgtcaatctagagaaacgcgggataaacgttgaaatatcaaggatttaagactctgcaattatggctgattgcaattggcttgcatacgttcgcaatttcagttacactgaactcaagcaacaacgacgtaccccccaatcttccgcgattcccctgtatcaggccgaaaacggaaacgtagtacccaagggtgtgcgtggcaggagccgatactggagtcggcgtccgaagaaaggaaaatcaacgatgatggcacgatggaagaaagccctagcggcgatttccgcctgtgcgctgttcgtcacgggcctgtccgcctgcgggtccgcaagcgcgggcggagacgcggagcatatcacgcttgtggtgtgggcctcccaagaggaccaagccaacacggattcgtggctgcagaccatggaggccgcattcgaacagcagcaccccgaatacagcatcacgtggaaaaaccagaacgtggcctcggcagacgccgccggcatagccaagcaggatccgaccgtagccgcagatgtttacacgttcgccagcgaccagctgggcaccctgctcgatgccggcgccgtcggccaagtgagcgacccgacgatgaaacagctcgccaagcagaccaaaggcaatgccacgatgctacagaccgtcaccggcgaggacggcaacgtctacggtgtgccgctggccggcaacacctggttcatgtactaccgcaaaagcaagttcaccgagcaagacatcacctcgctggacgccatgctcgccaaaggcaaggtctcattcccgctgaccaactcctggtatctgcccgccttctatatcggtgccggcggcacactgttcggcaaagacggcaccgacgccaagtcgggcgtgcagttcggcggtgcaatcggcgccgccgtcaccgattacctcgtcgacttgcgcaacaacccgaacttcgtcaacgacaagaacggctccggcctggccgggctgaaaagcggcaaggtcgacgtggtcttcaccggcaactgggacgccgccacggtccgtgagaatctcggcgacgactggggcgtggccaagctgcccagcttcacgctcaacggcaagcaagtgcagatgaaggccttcgccggctccaccatctacggctggaacccgtacaccaagcatccggtggccgccgaccagttcgccgcattcctgtccggcaccgaatcacagcgcaagcactataagatgcgttcggtgattccctcggacagcgagcttgcctccgatccggccatcgagaaagacgccgtggcccaggcccagatggacaccatcgccgagacgtccgtggtgcagccgtccatcgccgagatgaacaacttctgggtaccgtgcgagaacttcggcaattccatctacaacaaggaagtcacccacgccaactcggccaaactcaccgagcagtggatggcctcataccagagcctcctgtagaacgcgagaagaaagaccaatcatggaaaccacagccatgccgcgcgcagcgaaacgcgcaccacgccgccgcaaggcggactacattcctccgtcgcactacacgttgcgcgcggcggccacccaaggcgatgccctgacccgactgtcgttcctggtattgggcgcaggcaacctggcccgtaagcaggtggccaagggactggtgttcctggccatcgaagtggcgtatatcgcctacatggtgacggctggcgggccggcgctcgcaatgctgggctcgctcggctcccgcacccagaccaaacagaagatcgatggttattggcattacgatgccggtgacaattcggtgctgctgatggtctatggtgtggccgccgtgttcatcaccgtactgttccttgtgttctggtcgtatgccgtgcgcagcgcgtacaaggcacaggtgctcgcccgagagaccggcaaggcgccgaccttcatcgaagacctgaagaacatcaccgatcgcaacgcgcaggtcatgttcatggcgttgccggtggccggcatccttgtattcaccgtcctgccgacgctgattatgatgtgcatcgcgttcaccaactacgatcccgatcacgtgctgctgttcgactgggtcggcttcaagaacttcacccagctgttcagcgccaccggcgagattaatgccgcccagtttggcagtgtgttggcctggaccctgatttgggcgttcttcgcgacgttcctgaacttcttcctaggcctgttcctcgcgatgatcatcaatcgtcgtactacccgactcaagggcttctggcgtgcggcgttctcgctgtcaatcgccgtgccgcagttcgtctcgctgctggtcattaaccagatgctccagccggaaggtgccatcaaccgcctgctgatgtcttgggggtgggtcgacagcccgctgccgttcttcaccgacaccatgtgggcccgcgtgaccgtgatcgtcgtcaacctgtggatcggcatcccgttcaccatcatgcagatcaccggcatcctgcagaacatccccgccgaacagtacgaagccgccaccatcgacggcgcgaactggtggcagaccttcacccgcatcacgatgccctacctggtcttcgtgctcaccccgtacctgattaccacgttcaccggcaatgtgaacaacttcaacgtcatctacctgctgtccggcggtaatccgaccccggtgggcgatacggccggcaagaccgacctgcttatcacctggctgtacaagctcacggtggaccgtggagactacaacctgggtgccgtcatcggcatctttacgttcgtcaccttggcagtggtctccctgattacctaccgcagcagcgcttcctacaagaatgaaggaggattccgatgagcagcaacgcgcagaccgcgacccctcgtaccgacatcgcaacccctaagtccgccagcaatccgttctggcatgaccagcgcaagcgccgcatcgtgggcgatgtcctaagccatctgttgctcgccgtgcttgcggtgatctgggtgattccgattgtgtgggtggtgctggagagcttcaacaagaatcccggcccctacaacgagacctttttccccaccgaatacacgttggagaattacaccaagctattcaccgacacccacatcctgaacttcccgcgcatgttcatgcatacgctggtgatttccatcgtggtgtgtctgatcagcgtgttcttcgtactgtgcgtggcgttctgcatgagccgcatgcgcttccgtttccgcaagtcgttcatgaacattgtgctggtgctgggcatgttcccgggcatcatgtccgtggtagtgatctacttcattctgaagtcgttgggcctgacccagggcgtgggcgtcaccgtggcgttgattctcgtctactcggctggtgccggcgcgggcttctacgtgatgaagggctacatggacacgattccgatgtcgcttgatgaggccgcctaccttgacggatgcactcgctggcaggtgttcaccaagatcatcatcccggtgtgcaagccaatgctcgtctatcaggccctcacctcgttcttgggcccgtggctcgacttcgtgatggccaaggccatcgcccgcacacaggataactacaccgtggcgctcggcctctaccagatgctcagccgtgagtatctcaacgattggttcgcccgcttcgccgccgccgcggtaatcatctcagtcccgattgccatcctgttcatcgtcatgcagcgcttctaccaggagtcgatgggcggagctgtcaagggctgacgctggcgcgtctgcccttgcggggaagcccagtgggcttccccgaggctccgcctgagtgaggcgggagccgaacgaaggtgatactgagcctcgccgcaggcgagcccgtaattgcaggggccgcaggcgagctgtcgcgcaggcaagatttgaacaaaggagaacccccatggaacagcagatctccgcgttggcggtagccgattggacgccagccgaactggcgatgccctgccccgattatcccgtctatcaggatgacgacctcggtgcgttcccggatgccaaaggcaccaccttccgcgtctgggcacccacggccagcggtgtcaccctgcgcctgttcacggctggatcgccggagacggctcccgagcctgaaacgcaggccgacctcactccgggcgcggacggcacctggctggtgcgctgcgacggcatcggccacggcacctactacgactatctggtccgattcgcggacggcaccgtcaatcgcaccgccgacccgtgggcccgcgcggccggcgtgaacggccggcgcagcatggtcgtcgacctcgaccaaaccaacccggcaggctgggccgaggaccgccgcccgcacatccccagccgcgacctggtgatttgggaaacccacatcggcgacttcagcaacgacgaacacagcggcattccggaagagcatcgcggcacctatctggccttcacccacccggacaccagcgtggacggtgccggcgagttccccacctgcatggcctacctcaaacgtctcggcatcaccgccgtgcagctcatgccgttctacgactacggttccatcgacgaatcgatcccacgcaccgaccccgcccgcggcttcaactggggctacgatccgctcaactacaacgttcccgaaggctcgtacagcaccaatccgtatgacggcgccgtacgcatccgcgaatgcaaacagatgatccagtcgctgcataatgccggcatcaaggtgatcatggacgtggtctacaaccacatgttctccaccgacaactggttcgaacgtatgattcccggctacgcgctgcgccgccgcgccgacggcaccttcgccgacggctcggcctgcaccaacgacgtggccaccgaacacccgatgatgcgcaagtacatcgtcgattccgtggtctactgggcgcgcgaataccatatcgacggcttccgattcgacctcatgggcctgatcgacgtggacacgatgaacgccgtgcgcaccgcactcgaccagctgcctggcggtgccacgatctccatgcacggcgaaccgtgggcggcccgcgaaaccgcgctgttgcccggcgcgattctggccgacaagcgcggcatgccctacctgagcccacgcatcggcgcgttctgcgactccacccgtgacgcggtgcgcggccatgtgttctaccagtgggtgcccggctacctgaccggtgcggccgccgattacgctgacgacatccgtcatgccgaagacggctggcgcggcaccttgcgcgagaccgccagcgtggggcaggtcatccaatacgtttccgcccacgacgacctgacattgtgggacaagctgtgcgcggccatgcgccgcatccccaccgatacggactattcggccgaaggcgaggcgtgcgaggacctgatgcgcgccaaccgactggcggccggcatcgtattcgcctccgccggcgtgccgttcatgctgtccggcgaggaattcgcccgcaccaaacacggcgtctccgattcgttcagcagtccggccgcgttgaaccagctggattggcgccgggcgcaacgcatgggcgatctggtcgaccattacgccgcgctgatccaactgcggcgcggcaacccggcctacttcggcggcgctcgcatgatcgtgccgcgcgacgacgagaccgtggtgttccgcgtcggcgacgattgcgtggccatcaatcctaccggcagcccgcagacccagctcaccaccgatctggagatacccggcccgtacggcgaggtctcgaaaatcgcgcccaacgaatggcagtgcatctattgctccggcagcgatatgccgggcgcggtggaacagcgactgctgcccctgcccccgtacaccttcaccgtctggcgccgcaatcgtggctgacggcgatgctcgctcccgccggcggcgcacaccgcataccccggaaaggtggcgtgatgactgaccgtttcgctcccgactcccgctccctccggcgggagctgtccggcaacgccggactgagggtggtcgatgaggccgacaccgtaccgaccgtggatgcggtgtttttcgatctatacggcactctggtggatattcgtaccgatgagacatcggctgccgcctgggatgcgttgcgttcggccttgtctgactgcggcgtgacgtacgccggcaacgccgagctccagcggcgattcgaaaccttggcacagccgattcgcgatgccgccgtcgccgcgcacggcgagtgggccgagcccgatttgctgccggtatacgcggcgttggcgggggagtgccggaatgacgacgctatggcacgatcgttggcatggacgtttcggcaggcgagtaccagcctgctgcgggtgtatccgggcgcgccggaactgctggcgcgattgcgagtcgcaggaaagcgcgttgtgcttgtcagcaacgcgcaatcctgctatacgcggccggaactggccgcgcttgggttggatcgggcgttcgatcgcatcgtcatttccagtgaggtgggcgtgcgcaaaccatcacccgcaatctttcgtcgggcgcttgagaccgagcatctgacgcctgaccgcgtgctcatggtcggcaacgacgaacgtgcggatatcctgggcgccgcgtcggcgggcatcgccggcgtctatctgcgcaccgagatctcgcccgccagcgactcgcaggtcagtgcgcatgccgccttgtcgctggccggccccgattatgctgaactattgcaatacctgacatagcctaataaagcccccgctggcgggggctgtcggcaaagccgactgggagtggccgccggggcgccacacaactcccacagcccaaatgatcacaacaacggaggaacacatgaacgaagtcgaaatggagaagacgcggcgcggcgagcagcgccgtcgcaagggactgtccgtgttccgtctcaaggtgattggcgtgatattcatggcgctcaacgtggcgagcgtcgcgatactgcctgcgctggtgggcgacccgagccaagacatgacagcgctgaccgcgatcgtactgtgcgcggcggcttcctggatcgccgtgccgatttattcgtggctgttgttcgatggctaccgtcatacgcataacgcatgggcgtacgggctgcgactgctcgtcgtggccgtgatcagcgaggtgccatacgacctgattatgaccggcgagcccttcagcctgagcgtgcagaacccggtgttcggactgctcatcgccctggtcgtgctggcgctggtggactggctggcaaaaaatacccacggcgccttccgttggacgctgactgtgctggtcattatcgcgggcctgctgtgggatttgctgctgcatgtgggcgtagatcagcgcgtgctgtacacgggcgtgctcacgctgtcgttcgtgatggtgttctacttcctcaacgcacgcgagaattcgatgatgttcaccgccgggctgctgggcgcggtgatgtgcatcacgcccgccatcggcgtggccttcctgcactaccgcaacggcgagcagggtttcaagcaaccatggaccaagtgggcgttctatgtgatctacccggtactgctggtgtttggcgcgttggtggcggcgtagtctcggaatcggccggagggagagctctgaacgggccggcggcccgcggaagatacagcatcggcccttggccgattccgttggtcgattcctcccctacgccatctccccaaacggcatatccgtgctgcgtggcacgagttgcgcctcgatcacctcatgcggggtgtccggcgtctcgccggcgatgagtttgagcgctttttcggccgccgtgcgtcccatcgcatacgggtcctgcctcatggtggtcaggttgatggtgtcggcgtacgggctgtcgtcaaagccgacgatcgagtagtcgcgcggtgtgcggtgcccgtatcgctccagcttgagcaccagcggaatcgccatcatatccatctggcagcagatggcgtccgggaacttgtccaacgccagcagcgcggacagcgcggagtcggcgaaggccgggccgcgcggcaccgaaagcacctgccagttgatgtcgtggcggccttcggcgtcctcgcaggcgcggatgaagccgcgggcgcgcgcgtcgatcgaggaatcgagcccggccgcctcggagcaggggtagacgatgtgccggtgcccgaggttgatgagatgctgcgtggccgtgtacatgcctttttcgtcgtcgatgctgatggtggcgtcaaagccctcggaagacggcgtattgatgccgatgatcggcacatggatgcgctgcagctgctccacctcgtgcgggtcgatggcaaacgaggccacgaacacggcgtccacattgcgccggatgggcagctcggtgaagaactcatgtcggttggccgcggtgtcgatgtgctggaacagggagatgtcatagccggccgggtgcatcaccgattcgatgccggcgaacgtctgggtgttgaaccagctggtgatctcctcgttcatcagcatcgccacgcggtaggtctggccggacttcagtgccgtggcggagcgggagatgttgaaatcgagcttgtcggccacttccagcaccttgtgccgcgtcttccgggagacgagctcggggcgggtgaacgcgcgcgacaccgtggaaatggatacgccggccgccttcgccacctgatagatgtctgccttgcccatgtgtcctcctcgcatgaatcgtcgggtggagtgctgccagtccccagtgcctggcgatattactggcccttcgcatttgggtgtgtatgggccgtgcggttttattcggtgtgtgatcgaaaaagtgaagaaaaccgcgcggcttggttccgagtctagcgcgttcgacggccgggtgctgctcggtctggacagactcgggttgaacccggtctcgcaacgccacgtcacgtcgggctcgggcaccgccggcaacacctacgactccgccggcaatttccccgccgtcggatacaccaagggcgacttccacacctgcgccaagaacatcgccgactattccaacgccgacgaagtgcagaactgccgcctgagcggcctgcaagacctcgacaccagccaggaccatgtgcaagacaccatcgccgactatctggccacgctgctggacatgggcgtctacggattccgcgtggacgcggtcaagcacatcgccgcgcaagacgtggccgccatcaaagccaagctcgccgcaaagaccggccgggacgtggacggcatcttcttcgaacaggaggtcatcggcaacggcagcgaagcggcgtcgatccagccagtcaactacctcgccaccggcaaagtctccgaatccacttataacaaacgcctgcctgccgtgttcggcggcagcatcaccgtcgcggcgggcggcctggacgccatcggcggaccgacttgggtagattccgataaggcggccgtatgggtgaccaactgggacaccgagcgcaacggctcctcgctcaccacccgtgacggcaccagctacctgctcgccaacgccttcatgctcgcctacgattacggccagccgcacatcttctccggctactactacgccagcgtcgacgacggcgctcccggcgcccccgcacctccgtgccggacatgacctgcccgactgacggcaccttcaccgccactgtggccaaggactcggccgtcgccctatacgccggcgcgacgcccgcaaactggaccggcacccggaaatacgatccgtccgaccccgcctggttcaccggcgaaacaccgcataagggcgatgacaccgccgccaagtccgccgattccgcagcgtccgccaagtcaggcgacgccaagtccggaaaggcaacgtccgatgccatccgccgcgccgcaacgctcgccgccatcctcctgcccgtcatcgcctgcgtcacgttcatggcgatagctcgcaggaacggcaaagcccagtccgacaacagcggcccgaataacgactgatccggccccactcagccgcgcatccgcggcgcggtggcgctgcgcttcatgcggaaccgccactgaccaaggccctgatgcctatgcctgccatcggctgggtgccggctgacgggcatgctaagtcttccgccggtcccctcatcgggaatcgacggaagactttttgtcgttgcgatgccgtgccttccgattccctgagagggggtgcggggcggtgtcaggagcgcggcggggcggtggtcgatcgcaccagcagctggacggggaaggtctcgtgggggatttccggctggcgtccctcgatgaggtcgagagccttcttcgccgcgcagacggccatgtcgtagggcttttgccgcaccgtggtcagccctgcttcgctggagaacgtactgttgtcgaacccggtgatcgacacgtcgtcagggaccgcgatgccgttgcgctgcaacttgaacagcaacgagatcgcttgggaatcctgatgaaagcagattgcggtggggggattgtcactggcgagcagctcggagagtgcggcgttggcgatgtcgtcgccggggtcgacggcgacgatgcgaccgtcgacaccgtccagctcatcgaccgcatcgcggaagccagagatgcggttgcgcgaactgaacccgagcgtggacgtgaactcctcgtacatgtacatgatgcggcggtggctgagcgccgcgagatggcggacgatcagcttgatgccgacccggtcgtcgatgctggccgacgcggtgaaatcgctggacgtgatgttgatgccgatcagcgggatgcgcgtcgtgttgagccgtttgatctccgaatggctgatcgcgaacgacgagacgatcacggcgtccgcgttgccgcgcaccggcagctcgtcgaagaacgtcctgcgcgcgtcctcgtcgccgatcggatagacgaccagatcgtagccggcgttgcggagcacctcgttgagcccctcgataagccgcgccgtgaaccattctattttgccgctgcccaccagcagtgccacgcggtaggatcgcccggatttgaggattccggccgtgcgtgagaccgagaagtcgagctggtccgccgcgagcatgaccttggtgcgggtcttttccgacaccatctcgggtttggagaatgcacgggacacagtggctgtggatacgcccgccttgcgggccacgtcttcgatgctggctttcatgcgttcctcccgtctgctgcccggtacgttgccgatgtggatgcggctcattgtatgacccgatcgttccgccactcgaaggggcgggtgtcggggcggattcatatatgcaacattgtagggcattgcagggcaaaatggaaactgaatatgtaatggtttacatttgcgacacgccgaagaaaaaacctatgtgcacgctcacattgttgcaatgtaacgggttgcaaatgtaatgggttgtagatggtgggcaaccgacttgtcaaacaggctcgacgatcgtattctgttgcttgtcctcaaggatctacaaggaagtaggaagaaccatgaaccttaagaaagtatgctccgcagcgattgcaaccgtgagcattttatctctcgcggcgtgcggcagcggcaacaccggcactggcacgaccgacaccaacgccgacaagggtcttgatgtaatggggcagaccattcagtacgatccgaaccaccttgtcaacaacggcaagccgatccagctcgagtactggagctggggcagcaagggcgtcgacccggtctacgcgatgatcgagaagtatcaggagatctacccgaatgtgaccatcaagcccgtcaacgtcgcgtgggacgactactggaccaagcttccgctggcgctcaagggcaaaaacgggcccgcgctgttcaatgtccacaactcctgtgactccctgatccgcccgtacgcggccaactacgacatcgacacggccgcgttggaggccgactactctaccgccgacgtacacgaggacgacaacggcaaggtcaagtacatcgactccgtgatcagtaccggcagcatctattacaacaagaccctgtggtccgaggccggcctgaccgacgacgacatcccgaccacgtgggacgagttcatcaaggtcgcccagaagctcaccaagaccgacggcggcaagatgacccaggccggcttcaacttcaacggcgacgcctactccgccatctaccagggcctcaactaccagaagggcgaactgctgttcagcgccgacggcaagaaggccaattacgacaacgcgacgaccaaggagaacatgcagttcctgcaggacctgtacaacaagtacaaggtcggatccgtcgatttcggcaacgactacacccagagcttcggcaacgggcagactgcgatgatctacgcctggggccatatgggaggcacgctcaaggagaagtacccggacatcgactacggcgtcttcgccaccccgaccttcaccaaggacaccccgttcgcatatgaccgctacaacggcgaatccacgccgggcgtcaatggcaaccagaccaaggaacagcaggccgtcgcgcaggacttcatcaagttcatcctcgccaacgacgactacattcgtgtggcggcggccgaactcaactccttccccgcgaaggtgagcctgcagaaggatgaggacatcctctccaatccgatcatggccgctctccagccgcgcgtcgaccgcctgatctggcccggcccggcgcccgccacagttgaaaccagcggcaaggccgcattcgagaacgtgttccagaacggcatgagcatcgataaggcgctcaaggaagcgcaaagccagatggacaccgacatgaagagctccgacttccagtcgatggaaagcaagtacgccttctacgacgaacacaagtaggccaagccgggccgttcgccctcttccctgacaaccggccggcattggccggaccccgggccgcggcagggcgtttcctttcctcctccctgctgcggccaccaacctctttcgatacaggagcattagatatgagccagtccatgatgcaatccaagcgaggcgagatccgatgaaaagcaagaacgccgccggatccgcgctcagccgcatttttaccctacgcaacatcgcagtcacgttcctggtggtgtatttcgccgtcttcctcgcctacccgatattcaaggcgttcgccggcagcctccatgactggaacccgctggtcggcacatacgaatgggtcggactcgccaacttcgcgcagatcctcaccgacaagctgttctggacctccatgctgaacaccgtggtgttcgcgggcgtctccaccgtcttccgcatcgtgctcggcctcggtctcgcgctgttgctcagctccaagctcgtcaagtgcaaggacaccctgcgaggactgttctacatgccgaccatcacgccgctcgtcgccgtttcgttcgtgtggatgtggatgttcgacccgcagttcggcatgatcgaccgtgtcaccggccttgacatcaactggctgcacgacaccaaatgggccatgcccgcgatcatcatcatgacgatctggaaggatttcggctacgcgaccgtcctctatctcgccggcatcatgaacctgccgcgcgacgtgtacgaggccgcgtccatcgacggtgcgaacagcgtgcagaccttcttcaagatcacgctgccgctgctcaaatccagcacgctgttcatcgtcatcacctcgctgatcagctacctgcaggcatacgtgcagatcctcgtcatgaccgagggcggcccgggcacctccacctacaccatcagctacctcatcttcgatcaggcgttccagaagtacaacttcggcgtcgcctccgcgcaggccgtcgtgctcttcctgttcaccggcgtactgacgctcatcatgttcaaggtttcgggagatacggatctgtcatgaacaagaaacgcaacatcgtcggttggatcctgaccgcactacttttcgtcgtcgccttcatcaccgtcgtcccgttcatctggatgctgatctcgtcgttcgccccgaacagcgagatcgtcaaggtgaccggcggcctgttccccacgccgtccagcgtcgagaactacgtgaacatccaggagaaattcaactttctgcgactgtttgccaactcgctgttcgtggccggtctcaaaaccgtcatcgcgatctacaccagcgccgtgctcggattcgtgttctccaagatgcatttccgcggccgcgacctactgttcggcgtggtgatgagcaccatgatgatcccgtgggccgtgaccatcatcccgcagtatgagatgttcaccaactggggtctgcaggatacatactcatcgcttgtgatccccggcctgatcagcgccttcggcatcttcctgttccgccagtccatcggcggcatctccgacgagctgatagaggcggccaaactcgacggtgcatccgacacgcgcattttccacagcatcatcctgccgatgagccacaacaccatcgccgcgctcgccatctttacgttcctgtggaactgggaggactacctgtggccgttcctgatggtcaccgacgagaacaagcagctgctcgccgtcggactgaaggcgttcaacggccagtacggcactgattacggcggcctgttcgccgcgacctcgctggcgatcgtcccggtgatcgtggtctacatgatcttccagaagcagttcatcgccggcatcgccaccggctccggcaagtagccggagcagcctgagacggcctgccgggccggttgggccatcggcctgagacggccccggtctgaatcggcctgagccggctgccggccgggcacgcgttgcggcttcccaccctgaccgggaggccgcaaccacataccatgcaccatagttgaatacagcacaacgtactttctcgcgaagggggagaaccatggcaaagtcgcctgatccgaaagatttcacagtggatgcccgtcccgtcatgcgcggggagaacgtggtggccggcgattgctggcgcatcgggctgatcaccgattcgctcgtacgcttcgaatggtccgatgacggcacgttcgaggatcgtcccacgcagacggtgctcaaccgcgatttcggggaggtggtgtcatacgccgtcaccgaacgtgacggccgcgtcatcatcgacaccgcggccctgaccatcgtctacgaccagcagccgttcagcaaggaaggcctgagcgtggtcgtcaaaggcgtggccgacacccagttcaacacctggcactacggcgacgcccagcgcggcaacctcagaggcaccgcccgcacgctggacgaagcggacggcgccatcgagctcggcgacggcgtgatctcgcgcgacggctgggccgtcatcgacgattccgccgccaacatcatcatcgaaaccgacacagtgaacggcaaggcgaacccgttcggcacctgggtatccccgcgcgccaccgccgaaacggacttgtacttcttcggctatggccaccgctacatcgaggccgtacgcgacttctatcgcctgaccggccccacgccgctcctgccgcgcttcgccatgggcaactggtggagccgctactaccggtacacgcaggacggctatctggccctgatggaccgcttcaagcgcgagggcatcccgttcaccacctccgtgatcgacatggactggcatcgcgtggacgacgtggacccgaagtacggttccggctggaccggctactcgtggaaccgcgaactgttccccgacccgccggccttcctcgccgacctgcaccggcgcggcctgcgcactacactgaacgtccacccgcgcgacggcgtgcgcgcgttcgaggacgcctaccccgaagttgccaagcgcgtcggcatcgacccggccaccgaggagaacgtggaattcgacctcaccagcccggacttcgtggacgcctatttcgacatgcaccaccgcatggaggccgaaggcgtcgacttctggtggctggactggcagcagggcggcgtgacccgccagaagggtctcgacccgctgtggatgctcaaccacatgcactacctcgactcagggcgcggcggcaactggccgctcaccttctcccggtacgccggccctggctcccaccgctacccggtcggcttctccggagacacgatcgtgacctgggaatcgctcgccttccagccgcagttcaccgccaccgcttccaacatcgggtatggctggtggagccacgacatcggcggccacatgttcggctaccgcaacgaagagctggaggcccgctggtaccagctcggtgcgttcagcccgatcaaccgactgcattcgtccagctcgccgttctccggcaaggagccgtggaacttcaaccgtgacgtgagcgccgcgatggtggacgcgctgcgtctgcgccacgcgatgatgccgtacttgtacaccatgaactaccgtgccgccgaagccggccgtccgctggtcgagccgatgtactggcagaacccggatacaccggacgcctacgaggtgccggacgagttccgcttcggcaccgagcttgtggtcgcgccaatcgtctccccgggcgatgccgccgcctgccgcggccgcgccgacgcctggctgccgcagggggagtggttcgacttcttcgacggccgccgatacgtctcatccgacgccgccggccgccgactggaggtctggcgctcgctcgaccgcacgccggtgttcgccaaggccggcgcgatcgtgccgttgcaggacgtcgcggaatccggcgaagcgatcaactctatcgccaacccgcaggccctgcgcgtgctggtgttccctggtgccgacggctcgttcgtcatgcgcgaggatcgcggcacgtggggcgccaccagcgccgacaccgcgatagcgttcacgtggggcggggccgatgcgtcgcccagcgccttcaccgtcgtgccggttaccggcgatacgtccgccgtacccgagtcgcgcgactggacggtcgtgttccgcggcgtcgcgccggtcgatgcggccagcggcgtgcgtgcatggtccggcgaggctccggtcgaggcaacggtggcgtacgacgaggcgaccatgagcctgaccgtgtccgtcgtcggtatcagctcggctgccagtctgcgcatcgagattcccggcggtctgcgcatcgccgacaatccggtcgaatcggacgcgatggacctactgctgcacgcccagatgctctaccgcaccaaggagctcgcgctgcaggcggtccacaagctcggcatcggcgcgatcggcgccctgcgcaccatgaaccgtggtccgcgctacgccaacgatttctggatcaccgacatgcccgatgcggtggccggcgcgctcgaagaaattttgctgcgcagctgagcccggttgcagttttctgcaacatccgggtgcgccccggtatgcggcgataagtttggcatggttgccgaagagcgtggcataccgggtgcagtgcgtgggatggccttcgcgattgcactcaccgtgcggtcagtggaaaggaacctttcatgcacaaggtgaaacagcacaagggcgtcgcggtggccgccgcggtctgcgcggtcgcgatggcggcctcgctcgcgacccacgccggcgcggccggggaccggcgttattgactggctggcgttatcgagtgattggcggtatcaattagccggcgttattgatgagccggtgttgtcgattagccagcgttatcgaccggcactgaagcatgcagtacccactgcccgcgtttctcccgtacatcccaatccccgtgcgcatgcagcacacgctcccgatagtacgcaagcccggaatgccgcccctcaagcgtcgtgccaccttgacgtgggcggtccgtcacatcaatggtgacgcggtcctgagcggcggaaaccagcaccacgtaacgctgcgtcggatcggcatacctggcgatattgccaaacaattcccgcagaaaatcggcgacaaacactgtgtctgagttattcagcgcatcgatgccccagcgacaataacgtcgccgacacaccccatgcgctgcaatcgcgcgccgccgctggcaagtctgatggcaaggccgatggcgcgcccggtaacaaggctgatggtaaggctgatggggcgcccggtaacaaacccgacggcaagcccgaaggcaagggcgacggtaagcccgatcagcacgatgccgggcgctcgccggtggatttcggcggcgatctgtggcccggtgacgccatcaagcgccatatcaatcagcagcacgtcggtatgacgactgccggattggcattccaaaatcgccacggccggggaagtagtgctccatacgtcaacgatgcggccatggatatgggtcgaagtcgccagccgcgcgatgcaatccagcgcacaggcgtcgttatccagaatgccgatgcggaaagtcgctggtggttcatgcgctgattgagtcgcgtccgacatgactccatacactagccgctccgccccgctccagtcaccccttgcagttttctgtataagtggattttggctccagacgcaccactccgtcatcgccgtcagtcactcccaaaaaaacttgagccaaacatactcaactttttgtgttgaaattgggaatagaacttgccaaatggaagttgagtgatgtaggctcaagtttggaaggtccaagagacgaccaatcggaacttgggcaaagaacgtaagaacaaacgagtaattaaggagcacacattatggcacgcgcagttggtatcgatctgggaaccacgaattcctgcatcgcaactcttgaaggtggcgagcccaccgttatcgtcaacgccgaaggcgcccgtaccacgccgtccgtggtggctttctccaagtccggcgagatcctcgtcggcgaagtggccaagcgtcaggccgtgaccaacgttgaccgcaccatctcctccgtcaagcgccacatgggcactgactggaccgtcgacatcgacggcaagaagtggaccccgcaggagatttccgcgcagatcctgatgaagctgaagagggacgccgaggcatacctcggcgagcccgtcaccgacgccgtcatcacctgcccggcatacttcaacgatgcccagcgtcaggccaccaaggacgccggcaagatcgccggcctgaacgtcctgcgtatcatcaacgagccgaccgcagccgctctggcctacggccttgagaaaggcaaggaagacgagcgcatcctggtcttcgacctcggcggcggcaccttcgatgtctccctgctggagatcggcaaggatgacgacggcttctccaccattcaggttcaggccaccaacggcgacaaccacctcggtggcgatgactgggatcagaagatcatcgattggctggtttccgaagtcaagaacaagtacggcgtcgacctgtccaaggacaagattgcgctgcagcgtctgaaggaagccgctgagcaggcgaagaaggagctctcctcctccacctccaccagcatttccatgcagtacctggccatgactcctgacggcaccccggtgcacctggatgagaccctgactcgtgcgcacttcgaggaaatgacctccgacctgctgggccgctgccgcacgccgttcaacaacgtgctgcacgacgccggcatctccgtgagcgacatcgaccacgtggtgctcgtcggtggttccactcgtatgcccgccgtcaaggacctggtcaaggaactcaccggtggtaaggaagcgaaccagtccgtgaacccggatgaggttgtggctgtcggtgccgccgtgcagtccggcgtcatcaagggcgaccgtaaggacgtcctgcttatcgacgtgacccctctgtccctcggtatcgagaccaagggtggcatcatgaccaagctcatcgatcgcaacaccgccatcccgaccaagcgttccgaggtcttctccaccgctgaagacaaccagccgtccgtgctgattcaggtctaccagggtgaacgtgagttcgctcgcgacaacaagccgctgggcaccttcgagctgaccggcatcgctccggctccgcgtggcgtcccgcagatcgaggtcaccttcgacatcgacgccaacggcatcgtgcacgtgtccgctaaggacaagggcaccggcaaggagcagtccatgaccatcaccggtggttccggcctgccgaaggacgagatcgaccgcatggtcaaggaagccgaggctcacgaggctgaggacaagcagcgcaaggaagacgccgagacccgcaaccaggctgaggccttcgcctactccaccgagaagctcgtcaacgacaacaaggacaagctctccgacgacatcgtcaaggaagtcaccgacaaggtcaacgctctgaaggaagccctgaagggtgacgacaccgagaaggtcaagactgctcagactgagctgatgaccgccgcccagaagatcggccaggtcctctacgcccagcagggtgccgagggtgccgcggctggtgccggtgcggctggcgctgacggtgccggcgcttccgctggctccgcttccggttccgacgacgacaccgtcgaggccgaggtcgtggacgacgatgacgacaaggacaacaagtgatgtccgagttcaacaaggacgactacctgaacgacctgccggatccctcagatgctgaggctgccggccaggccgctcaggcctcttcaggggctgacgcctccgccgagtccgactctgcgcaggattcggctgcccaggctccttccaatgaaggagccgacgcggctcctgccgcagctgagggagagaagtcggatgccggagagaagactggcgaaggccagtccgattccgaagacaccctcacccccctcggcaaggccaagaaggaagccgcagactacctcgaagccctgcaacgcgaacgtgcggagttcatcaactaccgcaatcgcacgcagaaggagcaggagcgcttccgccagcacggcatcatcgacgtgctgaccgcgctgctgcccgccctcgacgacatcgaccgcattcgcgaacacagcgagatggacgactcgttcaaggccgttgccgccaagatcgacaaggctttcgagaagttcggcgtcgagaagttcggcgaaaagggcgaggacttcgaccccaccaagcatgaggcaatcctgcacaagccggatgccgatgccgacaaggaaaccatcgacaccgtggtggaagccggctaccgtatcggcgaccgcgtaatccgcgccgcccgagtagtagtagcctccccgcaaaactgataacggccagctcgttaacgagctgacattaccttggctcccgctggcgggagctggcagccgaaggctgactgagggtggtcaaacattgaatataaaccaccctcagtctcgcttcgttcgacagctcccgatgttttatgcgacgtgcgcaattgcgcactgctatgaacagcccactgggctgttcatccagcgggagccaaccataaagactcttcaagaaaggagacatgaatggctgaaaacgaatggctcagtaaagacttctacaaagtccttggtgtctccaaggacgcttcggacgacgacatcaaaaaggcgtaccgcaagctcgcccgcaagtaccaccctgacgtcaacaagaccaaggaagccgaggagaagttcaaggacatctccgaagcctacgacgtgctgagcaagaaggaagatcgccaaaagtacgacgcgattcgccagttcggcatgggcggcgcccgcttcgcaggcggttccggtgccggcggcttcgacgcttccggtttctctgatatcttcggctccatgtttggccagggtgccggcggcaatggctcgcgcatccgcttctccacttcgggcggcggccccaacaacatcaacgacatcttctcgatgttcggcggtgctgcaggtcagggcggccagtcgtatggcggctacggccaatcgccgtacggcaatgccggcggctatggctatgaggaggccccgcgccccgaaaacggtgaggaccgcaactccaagatcagcctgaccctgcgtcaggcggtcaagggcgctaccgtgtccctgtccgtggacggcaagaagttcaaggcccacgtgcctgcgggcgtcaaggacggccagaaaatcaagcttgccggcaagggcaagccgggcatcaacggcggcaaggccggcgatttgtacctgcacgtcaccgtcaagcccgatgccgcgttctcgatgcgcggccacgacatcgtcatggacctgcccgtaactgtgggccaggccgtggccggtggcaaggtcgaggccaaggatatcgacggcaatcccgtcaccttcaaggtgccggcaggctccagctccggtgccgaggtcaagctcgcgggacttggcgtccagcgcggcaaccagccgggcgacctgatcggccgcgtgcagatcatggtccccgccaagccgggtctggccgtcaagcacgccgccaaagaattcgacgaaaaagccggcgactatctcagcctgtaatcaggaggtgaacaatggcgcggttagccaaccaaatgaagcagttgtacgcgatgtgcgcaaccgcgctggtgatgggcagggccgatctcgacggagccgatgacgtcggcttcgacatcgaactgcccatcttcaccgtcggccaggcagccgaactgggcaacatccacccccagaccctccgccagtacgaccggctgggtctggtccgtccgcagcgcaccgatggcggcgcacgccgctactgcctgcgcgacatcgcccgcctgactcgagctcagcgcctaagtcaggatgagggcatcaatctttccggcatcgcacgcattttggccctcgaagaagagaatcgccaactgcgccgcgaagtcaaacgcatgcaaaccggcgaccaggagagcgttttcgccgcaggccgtgacggcaatatcgtggaggtacaacgctccaaccgcgcccgcctttggcgcaacgccatccgccgcgaaacccgcgaactgcccggccgcgataccgctgccgacaccacgcgcgaatccgactccacccccgccgattccaaatccatggtcctgtggggttggtgatttgctgttcggctgtcgtgcggagttggtgagataggtatatcgaatacgaatagttgaggattcactgcgacgtacggaggtaaccatgctgctcaaggccgtgttttgggatttggacggaacgcttatcgattcggagccgctttggcatgacggtgaaatcgagatcgcgcacaacaatggcggcgagtggaacgaggacctcggttgggagtgctccggcactccggtgccacacgtggcagaggtcatgattgcgcatggctgcacattgagcgttcccgaaatcgacaaacagctcaaggattatgtgttcaaggcggaggtcgaacgtctgccgtggattcccggcgtattggacgtgctgcactcgctcaaggaggccggcattccgtccatgctggtcaccacgtcgccgcgccgtatggcggagaacatcatgaagcagtccgagggactgttcgccggctacgtctgtggcgacgatccgtacgaacacaagccgaaccctgcgccctatctggccgcagccgacaagcttggcatcgcccgtgaagacatggccaagtgcgtggtgctcgaggattcctcggttggacttcaggccggtgcggcatcgggcgcgactctgatcgcgcagactggctggattcgcacggatacttccggcctgggccagttcgcgtccatcgaatcgtatgacggtatcgatgcggccgcgctggacggtttcgtgcgccagcgtcttggtgagtaattgattacatcaccgcgcatgcagttctcctcatgagcggtggaatgtgttgacgatataccagcgaagcacgccatatttgtaaagaagatggcagtaatggctgctatgaggttccggtggccccctcttgtatcggggcgactggtagagtggttgacggttttcagacgaatgtctggttattggacagattgttcacacatatagacgtataggactcataggaatcacatgggcttcgttaatttcatcctcgaactgctgaaggatccgcgtgccgcgattgccggttggattgccatgggcgtggtgccgaccctcggcttcatcttcctcatcgtatttatcgaaacgggtgtggtgttcttcccattcctgccgggcgactccctgctgttcgccgccggtgtgttcgccgctcccgatgccgcgaccggcaaggccgcgctgcc

SEQ ID NO: 922 - DNA, 11071 bp, Unknown
  R117_24m  MAG No. k141_6840
atactgcggctctgcagacaaaacctatggcggcgtaaatcccgtacgattctgaccgtgctgggcgttatcgtcggctgctgctcgattgtgctcatggtctctttgggccaaggcattaacgagcagaacgagaagatgttcaaatcgatgggcgatctgtccatcgtcaccgtgtacaccaacggttatgccggtccgatggacgatggcggctcgtccaagatgggcgataccaagctcgacgacaaggccgtggaatccttccgcgcgatgagcggcgtatccggcgtgacgccgatgatgaacttcccttataacgtgacggccagagccggcgcgggcggccgttacatctatgattacgtgcagatcatgggcatcgacatgacccagctcgaccagatgggctacaagctcgtcggtggcgagaaaccggtcaaaaaagaccaggtgcttgccggcgaatggttcgcctatggtttcatggacaccctgaagaacggcgaacaacgcaccagcacacgtggcggtcagtattcctcatgcacgtttaaccaggccaccggccagtgcgaggaagatcaggacgaagatccgttcttcgacccgctcaccacgcaaatcagtctgaccaccggcaccaattatcagggcgaccagtacagcatgaacatgtacggcggcggtggcggcggcacaggcggcgcgggcggcgcaagcggcagcgccgcgggtcagtcggaaaacgtcaccctcgatgtgcgggcttccggcattgtggcgggcgactacaacaagggctatgccacctccgacggtctggtcatggatttgcaggcgttgaaggaactggccgccaaagtcgatccagccgccgccaaaaaagccaccgcctatgatcaagtgctggtcaaggccgccgacctcaagtccgtgcccgaagtcgaatcacagatcaaagcgttgggctacgagacctcctcctatgaagacatgcgtaagtcgttggaagaacagtcgcgcgcgattcagctgattctgggcggtatcggtgcggtttcgctgttggttgcggccatcggcatcgccaacacaatggttatgtccgtaaccgagcgcacgcgcgagatcggcattatgaaggcgcttggctgctacgttcgtgacattcgcgtcatgtttcttgcggaggccggcgcgatcggattcttcggcggattgatcggctgcgtgctgagcggactgatatcgctgggcatcaacgttgtcggcgcgttgtatgcgggcggcatgagcggcggcatgtctggcggtatggtcagcggtgccggcgggggctccggcgacggtaccggtggcggaacatctatctggaccatactctggcaggcgatagttggtggcgagaatgtgacccgttattcggtgattccgtggtggctgttcctgttcgccgtgctgttttccacgctgatcggcttgctattcggcttcggcccggccaataaagccgttaaaatcccggccctagacgccatcaaaaacaacgagtgatcgcctctgtcacctgctccaccgttagtccataacgttcgttcagttcgcccagcgacacgcggtcggtaaattccttggctgcgccgaagttcagcacacgaggattacggctgccgtccgagacatgatgattcgcatagtatgcggtcactttctcgccccagccgccttcaagctgcccgtcttcaagggtgatgacctgctggtggccatcacgcaacgactccagtacgtctgaatccagcgacgtgcactggcgcgggtcgataaccgttgccgtgatgccataatcgtcagacaatgcggcggccgtctgctccgccaacggatacgcattgcccagtccgatgatcgcgacttgcgagcccgtctgattgacccgccaatccagcatgtgacgcgcaccggcatgctgagccgttacgctaacggtcccgcggactgttgcggcagatatgcccccgctggcggagctggcggaggctggcagcgaagctgactgggggcggtcagcaatctgcccacccgtcaccggcagcagcgtcgcatcccgttccgccgccagaatcgcctcgcccggcacccgaatcaccgccggaccagcaggggcgtccgccgaaccggccggcgcggtagcccacgccaaatcagccagatagtcgcgagccgaagtcggcaccagcatcgtaacccctggaatattggagaacatcgtcacgtcatatgcgccggaatgcgtattgtccgaaccggacaagccgcccagaaaatcaagtaccgtgactcgcgaacggttcaggctcatctcctggaagaactggtcgtacgcgcgctggaagaaggacgccgtggtggccaccaccggcgtgccacccgcccgtgcgatgccggcagcgtacgccacggcatgcgattcggtgatgcccgtgtccacataatgtgcgcccgcgcgctctcggaactcatgggtgatgccgttggagcccggcgtggcgggggagatgaccacgagtcctggctcggtggcgaaacgcggttcgagcgcggccatcgccattttgccgtaatgcttgcgcggatcgtccggcttgccgattgcggcatccggattctgccaatgcgaggcctcgcactggccttcatgcggttcgtgatcggacaggttgcagtgatccgaatgccacggctcgctgtggttcacgttatcggtggggtgcacgccggtgtcggagactgccggatccagctcatggacgttaccggccgaggccgagggtgcgccggccacgtaatcggcgccgtcgtatcccgcgcccttcagcgtgtggatatggaccaccaccggatggtcgatatcgcgcacttcctcgaaagccgcgaccagagcggaaacatcgttgccggccgccacataccgataatccaagccaaacgcgttgaacagattcggctgggcggtgccgccggacgcgcgcaggcgggcgagcggaccgtacatgccaccgaaatcgccggcgatcgacatctcgttgtcgttgaacacgatgatgaggttgccgccttgctcggccgcgttgttcagcccctcgaacgccacgccagaactgagcgaaccgtccccgatcacggcgaccacattgccgatgccgctgcccggcccctccatgtcgcgggttttcgccaggccgcaggccaaggagatcgaagtgccggtgtggccgagcacgaactggtcgtgttcgctttcgtcggggttggtgaagccggtcacctcgccgaaacggtccgggtccagataggcgtcggcgcggcccgtgagcatcttatgcacgtagctttggtgggacacgtcgaacacgatacggtcgcacggcgagtcgaatacgcgatgcagggccaccgtggcctccaccatgcccagattggagccgatatgaccgccgtgttggtggccatatgccagcagtgtggcgcgaatctcgcggcacagttcggcgagctcgttgggagcaagggccttgacatcggccgggctggcaatgcggctcagcagatgggagtcgtcgccatgggaaggggtaatgctcggggggatgtcgtgaaggcgcgcggccccctcggcggcaccggagacggcgaaggaatcgcttgaatcaaatccgtttcctgacgcgttgcgcataccctcgaatctcccttcgctagtctttccgaagttgaatgctaacgcccggcattgtccgaggtccacatgacgaatcaatgcccccaacatctccgtaaatgggtgattcgttcgctgcgcgatgtgggacaatgaatgcggtaattccttttgataccaaggagcgcgcaatgaaggccgtatacgcatccaccgtcaaccatgacgatccgcttgccgcgttggcggtgggcgagcagcccgaaccccaggcccgcccgttctggtcgaccgtttcggtgcgcgcggtgaccgtaaaccatcacgacgtctggtcgctacagggtgtgggtctcgccgccgaacagacgccgatgatccttggcaccgatgccgtgggcattctggacgaggacatccccggcaagcatgggctcaaggccggcagcgaagtggtgctgtacacgttcgtcggcaccgatggggcgggcgtggccccgggcgagcgccgtacgatcctctccgagaaataccccggcacgatggccgagaaaactgccgtgccgtccgccaacgtgttcgccaagcccgcaaacctcaccacggccgaggcggccgcactcggcaccagctggctgaccgcctactcgctgctgttcgatgccgccggcatcaagccgggcgactccgtgctcatccagggcgcgggcggcggcgtgtccactgcggccatccagctcgcccatgccgccggtctggaggtgttcgtcacctcgcgtgacgcggacaagcgcgccaaagcgctgaaacttggcgcgaacgccgcgctggagaccggtgcgcggttgccgcgcaaggtcgatgcggtgatcgagtccgtgggtgcggctacctggagccattcaatgaaatccgtgcgccccggcggcaccatcgccatctgcggcgccaccaccggcgaccagcccggcgccgaactgacccggttgttcttccaggacatccgcgtgcagggctgcacgatgggttcgcgcgaggatttcgcacgattgctgcgcttcgtggagcacgccgacctgcatccggtgatcgattccgtggtcagcgggttggacgccgcccccgaggcgttcgccaggatgatcgccggcgacatgttcggcaagatcgttattgagctgtaagcctcacagaattatgtattgagaacgattcgctgcgtggcttaactccgctatcaggagtacagtgggccttattctcaataactagggagtaaatgataatggcaaatgaatccaagcccgaagtcgcagtggtcatgggatcggccagcgactgggagaccatgaagcgcgcctgcgatattctcgaccagttcggagtcgcctaccacaagcaggtcatctccgcgcaccgcacgcccgagctcatggccgagttcgcgcacaacgcccgcgccaatggcctgaaggtcattatcgccggtgccggcggtgccgcccacctgccgggcatgatcgccgcgcagaccacactgcccgtaatcggcgtgcccgtgcgctcccacgccctgtccggctgggattcgctgctgtccatcgtgcagatgcccggcggcattccggtggccaccaccgccgtcggcaactccggtgccaccaacgccggcctgctcgccgtgcagatgctctccgccttcgagcccgaactggccgacaagcttgaggattaccgtaacgaactgaaagaaaaggtggctgaatccaatgcccagcttgtctgaggaaacaggcggtcgtgtttcgatgctgatgccgggatcgaccatcggcatcatcggcggcggccagctcggccgcatgatggctttgtccgcccgctacatgggcttccgcgtcggcgtgcttgacccgacgccgaactgcccgaccggtcaggtggccgacttccagatcaccgccgaatacgatgacaaaaccgccatccatgatctggccgtgcagtccgacgtgctcacctacgagttcgagaacgtggacgccgatgccatcgacgaggtgcgcggcatcaccgccaccccgcagggcactgacttgctgcgcgtgacccagcaccgcgtgcacgagaagcggttcatcaacgaccacggcaccgccaccgcaccgtggcgcgccgtcaacaacttcgatgagcttgacgccgcattggatgatattcattatccggccgtgctgaagaccgtgtccggcggctacgacggccacggtcagctcgtgctgcgttccgacgccgacttggagaagatccgttcccgttccgaccgtggtggcggcttcccgccgagcatcctggaaggcttcgtcgacttcgcattcgaggcttcgatcctggtctccggcaacggcaaggacttcgtcaccttccccatcgtgcgtaacgagcaccgcaacaacatcctgcacatgaccatcgcccccgccgaagtgtccgaacatgtggctcgcgaagcgcatgaactggcgattcgcttggccaagggcttcgaactggctggcacgctggccatcgaactgttcatcaccaaggacgatcaggtcatcgtcaacgagctcgccccgcgcccgcacaactccggccactacaccatcgaggcctgctcgatggaccagttcgacgcccacatccgcggcatcgccggctggcccatgcccaagcccaagctgctctcgccggccgtgatggtcaacgtactcggccagcatgtggagccgacgcgcgcgctgatcgccacccacccggagtggaatgtgcacgactacggcaaggccgaagtgcgccacgaccgcaagatgggccacatcaccgtgctcaccgacaaccctgatgccacggttgctgaccttgaggccaccggctgctgggacgacctgaaaaagaaggcgtgaccttatcgatggttgaacatatcgaacgccagaccaagcagaaggacgcgattcgcgccgccttggccgactgtgaggagttcatctccgctcaggacctgcaccgcaggctggaggacgaaggctcgaaaatcggcttggccaccgtgtaccgccagctcaacgccttggccgatgccggtgccgccgacacgatccgcctggacggccagcagctgttccgcctatgcggcgacgacggacatcaccaccacttggtgtgcaagcggtgcggcaaaaccgtggaaatcgatccgcccagcgaggcttggctgcgcaaagtggccgacggccacggcttcaccgtcgaatcccacaccctggaggtcttcggactatgccctgattgccaaaaggagcagaaagcgcagaaggctcagaaagcagtgagcgaataattgaatgggatcggcttcaaagccgatcccatttgctattccgctgctattccaccgacttcagggcgccgagcatgtcgaccgtcttcaaccgccggtagaccagcacgccgagtccgccgagcaccttgatggtcggcagttcgcggatacgttcggagacgttgagattcgtcagattgtagaggatcaccacggccagcagctcagccgcgagaatcagcacttccatgatctgatccggcaagtcgacgattgtggccacctgtttcttcgaagtcgtgttctgcacaatgcccttcgcgccgtccaactttatgagcttggcgctacgcgactccacattggaggtctcatggttcttgagcctcaccatataggtgttcgactggtactgttcgccgaacacgtgcttatagccacccgaagtcatgaacatgaaatgcccgatatgcatttcggtgatgccgtccacgcgcaccttgcgctcggtaccgctcgaatcggtgacggcaatcgtgtcgcctaccttggcgtccatcatccccgccatacgttcggagatgatcgcaccacggtcggtgagcacctgcggcttgtgcccggtgcgcgaacgcagggtgatgtagtcgccgaaattgtaggcgtcatcagtggcgatcagggtaatcgactgtttgtcgttctccttgccggccactttcgacatctcctcgtagtagatcggcgcggactcggagacggccccgcccctcatcgccttggccacttcggcgcgctgcgaataatgttttcgtcagctttggtcaggccataatcgctgatgacggttatgtcagcgagattgttctgattaaagaagtcggtgccggttatttgcatgtccgggccggtgacgaacaggcctacgagcgcaaaggagccaagcgtcatcaggctcacgatggaggcgaatcgacccttggatttggccatggtgacgcgggtgtctttccatagcatgcgcttatggaatgacccgttgcgtcggcggttgcgcttggccttgtgcgcgtggggcgttctgccggacgcggtataggagtcgtttgctgaatttgcggcggaatcggctgcggagtcggtcgcgggcgtaaggttggtcgtttcggtgaaatcattgagatcggtcatactgcttaccactccagatccttgatatccatcgggtgctcgttcacttcgatcgatttgacgcgcgcgtcatgcatgtggatcacacggtcggcaatcggcgcgatggcggaattgtgcgtcacaatgaccacggtcgcacccttcttacggctctgatcctgcagaatctgcagcacctgcttgccggtgttgtagtccagagcgccagtcggctcgtcgcacagcagaatcttcgggttcgtggccaccgctcgggcgatggccgcgcgccgctgtccgccgcccgaaagctgcgcggggaagttgttgatacggtcctgaagccccacgtcgataagcgcttgggtcggttcctgcgcgtctttcatgatttcggaggcgagctccacgttctccttggccgtgaggttggccaccagattgtaggactggaacacgaagccgaggcgttgcgctatgtcaagcgtgagtatgcgttcttcgacgcactgtcccgttcgggcaacgatatgcagatgtatgaccgggtcaaggatgtgttgaagcagatgctgcttgggcaggcggcccgtgtgggtgccgagctgagctacggcggcattccgcgcgcctatgcgctggaaattctggtctccgccgtctcatcgattatctggctatgggtccggcgcggctgcaaggaggcgcccgagcaaatctgcgccatcatcgagaaaaacaaaaccaccgcgcccgtagacatcatacggtaagcgcggtggttcgtgtcggaatctgactcccctccctgagaggagtcaatccgcaggagaaatcggaaacctaaaactcagacagccagctcggccttgagttccttgaggtcggccaggatctcatcgtggcacttctcgttggtgtcgaaggcaaggtggcagaaggcgcactcgtggccttcgcggttctcgtggcaagcgtgcaggcaagccttgcccccgcactcttcggtgtggttgtgctcgcagccggtgtcgtcacagcagtcgccggtgaagcagcagccgcagcggccacaggcggccacgccgtgctcgtgcttggtggcgtcgaacttggccagcgtgtccttgcagacggcgaaggtgccctcttcggtaacgatctcgtaagcatgctcatcgatggtcttgatagtcattgttgttcctttcagcgtttgttcgtctgcgactgtagggcggcagacggcagcggcgaaagttggtgaaagtgattatcaggcccattgctgctattaagagcaatgagacctcatgcagttttgtgtcggtaacgggccgattgttggccgagtgtcgacgcctggtataggtggtggcggtaccaatccaaatattggtggaacgacgacgatgagcgtgtctggcgtcggtgctgcgccaagcgttggcaatctaacgatgcgagtggagcttatatcgtcgctattgcgccaaggattggaagggcaccgatgctgaaggccagtagcgtcgggactgcgccattatttgttcgagcgccgacggccagtatcgtctggcgtcgtcagtggtccatcctttggtgaggtgccgacgctgagaggcggttcgatggcatgcttcgccgcacacttggggcacaggtcgaaaatctccagttcgtgggcgatggtctggtacttcaactgcttggtggctttgtcgatccactgctcaagtccgggaatctcgatttcgatggtccgcccgcattcgtggcatacgatgtgatggtggtgatgctggtccgagcactcgcggtagagggcctcgccgttgacgtggattacgtcgagctcgccttgggaggccatcatctgcacattgcggtaggcggtggccgtgccgatgcgcgtgccgcgctcgcgcaggatgtcggtgatttcctgggccgtggcgaatcgggatagttccgccaggacctgggtgatgaggagtcggggtcgcgtcacgcgccgagtggtcgcggtttgctcgatgctcatgacgttctgcccctttctgttaacaaatgatattcattatcgttattaaagcaaatcagatgcccggcatgttgtcacatgatttgaatcaactggcagaaatcccgcgtttcaacgaggcctgcgcgggatttctgccagttttgagccctataaaggcagagcccccgcgtacctttcgttgtaacgcgggatttctgccgatatggggcgagtcatggcgcagcgcagtgctttccatttcgggagacgcgtcatttactgccagtagaagtagccggtcggggcggctgcggctttgctgaccgaccggacctgcagtataaggccttggcgctcgtggccggcggagccgtagacgccctgcttgatgacggcgtcgacggtgacccagtcgtgattgtgcggggtgccggccttgccggagctggctatgaacccgaatggggtcatgtcgagaatgcagcaggacatgaactggcgggacagctcgaactcgtccgcgtcgaacgtacgcgacttgctcacaaacccggtgacctgcacatggtaaccgacgtaacgctgcggattatggtcgatctgctcgaaccatgagccgaattcgtcgtcgctgatggtcagggtcttgttcgccgtgtcgagtccgtgcagctgcgaggagccatcaggcttgtgcgagctgcggggaatgacgatagcgcggccgccggcgtactcgtcgaagccgccgctgccgctgctgggctggaacggcacg

SEQ ID NO: 923 - DNA, 16376 bp, Unknown
  R117_24m  MAG No. k141_
cgaaggtcgcacgcttcaaatgcggcagcagctcctcggcttcggctggcgatacctgcttgaacaatgccgtatgcagcaggatgttctcctcgtcagcaaaagcgtttggcgtttccaagctcatcgcaccatccttattgtcctacgaccgtcgtcggccatccgtcatattgtaacgcgccccacaggtttcgtcagaagcatgccatcattcgtcacttcatgtgtggcgcgatccgatagccgtacgacatgctgacgaatgtgttaccgcgaaaaacggcactgtcgcggttaccgcgctcgcccatgacaaaaccacgcacggccaccggcaaaatcgtatacggccatcggtgaaatcacgccgcaaaccagtcaataaggtgttcgacgatgtgttcgcggctgagacccgtctggcttttcatcgggtccacgcgtttgactgctgatttcaccgctttgtctgacatcttctcgcgactggtgttgagcacacggctcatcttggccgcatcgatgtcatacgccatggtcacatggtgcaacaccgcgccgcctgagcctacggggaagcgccgttgcgccgctcccccgatcttgccgtactgcgaggcgatatcattgaggcccgcgaaccgcacatccaagccaagttcgtgcagcgcttcgaccagccaccagtcacagagccggtaggattcttcgatgcttacgccctgaacgaaatcgagcggtgcatacagagaataggtaatggtgttgcccggttcgataaacatcgcgccaccacccgtgcaacggcgcaccacgtcgaaaccgagctgctcggcaatgtccagattcacctcgtcctgggccgattggaaacggccgatgaccacagccgggcccacccactcccataatcggatggtcggctgtcgtgttcctgctgcgacttcacgcgcccaggtctcgtcaatggccatttgctcgtccggagtacgcggatggtcgtggatcacggtgagttgaggtctgagggcgttccagcgctcccggtattcagagcttttgtcgggctgcttggtttgtgtattgatggatgccggggtgttcggcgcatcggggctgaccacccccacccgctgcgcgggagccgccaccagcgggggcaagttgctgcttacggctcggctatatgcggttttgatggcaacttcatctgtgccgataatttggcaactagggtgagcgtccaatacggaccgcaatgaatcatcactaattagagcctgttccaagtcacgcaacaaagcatgagattcggcatccgaaactgattcaataaagaaatcaccgctgatatggcatgactgtgcggtgccgtcatcatcgacggatacggtcacggcgactagtttgccgccaacggttttgcattccccatgtcgcatttgcatgcaactcagtataaacttggctcccctctggaggggagccaagtgggacatcacatgcgggccagaatgtccttgccgacctggtcggtggagcgcacggtggagccgagctcctcgatgtccgcttcgacggcggtgtgaatcttcttggccgcatcatcaaagccgagatgctcgagcagcatggcggcggagaggatggcggcggtcgggttggccttgttctgaccggcgatgtccggagcggaaccgtgaatcggctcgaacatggacgggaactcgtcggaggcgttgatgcagccggaggcggagtagcccacgccgcccaccacggagccggcctcatcggtcagaatgtcgccgaagaggttgtctgtgagaatcacatcgaaacggctcgggtcggagaccaggaagatggtggccgcatcgatgtgctggtagtcgtgggtgacctcagggtattcctcgccgaccttgtcgacgatgcgttgccacatatcaccggcgttgacgagcacgttcttcttgtgcaccagggtgacgtgcttcttgcgcttcatagcgagcttgaaggcgtaacgcaccacacgctccacaccgtatgcggtgttgatggacacctcggtggccacctcctgcggggtgttgcggcgcaccgcgccgccggcgccgcagtacagaccttcggtgccttcacgcaccaccacgaagtcgatgtcgccggggttggcgagcggcgaggtgacgcccttgtacagcttggaggggcgcaggttcacgtactggtcgaggtcgaagcgcagcttgagcagcaggccgcgttccagaatgccggccttgatgcgcggatcgcccacggcgccgagcagaatcgcgtcgttggccttgatgcgctcctcttcgtcctcgggcaggatcgcaccatcgcgcagataacgctcggcacccaagtcgaagttctcatactcgaagtcagctacgccttcagcggccttttccaaagccttctgagcccacggagtgacttccttgccaataccgtcgccgggaataacggcgattttatatgtctttgccatagttcaaggagcctactcgcgcgaccacctgccggcccgaacccgctcagctagtggacacaaccaacatgcgtatcgtgtcgagacattcattaggtcattttagtgttcattaggtcggcgtgggttcatttcagggactgaaatggcggcatttcagtctcacatagaagaggacaccgacctaatgaacgacgaaatgacctaatgagcgagccccatcacatccatgcaccaagcgttctcataggaaacctcttcccattgtttgtaacgcccggatagaccgccgtgaccggcctcgacctcgatcttggccaccgcgtccacgccggcggactgcagacgggccagccatttgagcggctcgacgtacagcacgcgggtgtcgttcatcgaggtggtaatgaagattctcgggaattgcgcggcggcgaccgcgccggcggcagccccatcagcactgccgtcaccggcagcctcgtcgtcgccgccctcgagtacggccaccggcacattctcgtatggcgtgtacgacttcatgtactgatacacctcagggtcatgcaacgggtctccccattcgtcccattcggtgacggtcaacggcaagtccgggtcaagaatggaggtcaacgcgtccacgaacggcacatccgcctcaacaccggcgtagcattcgggcgccatattggcaatcgcgcccatcagcaggccgccagcggatccgccgttggccacggtgcgccaagcatcagccaaatgcgccttctgcagcgcgcgtgtggcgtccacgaagtcctcaaaggaatgcttcttgttcagtctgcgcccctgttcataccaggcgcgtcccatttcgccgccaccgcgaatgtgcggcacggcgtacagcacaccgcgatccaacatgctcagacgagagaccgagaaccccggatcggaggaaatctcgtatgcaccatatccggtaatgaacatcggcgaatcctgcgccgggcaatcgcggtgccagacgagggaaacaggaatgcgttcgccgtcgcgcgcggtaatccacacacggcgttccatgtaatcgcgtggattgaagtcgcccaacacggtggctcgcttcagcagcgcatcttcaccggtggcgggatcgatttcgtgcagctcgcccgggcgggtgtagctggcgaacgagtagcgcatgcgcggcgcctcatacgatgggttgccgccgacgccgatggtgtacaagcgccgggtctcaccgggcaggtggtcgtcgctggcaccatcggaagatgacgtgtgatccgtgggggcctcatcttcggtccacaagatttcgccatgatcgccggtgaagccttcgcgatcggcggcaaccatgtcccagtcgtcctccagggcaggcggcagcagttccgtaaaccgccacggccgtccggccaggaagtcggcggcagccgcgctcttggtcatgtatgccacgtgcggctggccgtcggcacggtagctcagggacacaaagttgcgatgcaacgcgatgccttcgatgcccagaccgtgggcaccctgcaatatcgccggattggcggcgttgaagtatgcctcggtaatcggcttatccggctcaccatgttcacagccgtacggcgacccggcggcgatgcacacgccttcgccgagtcggtacggcggctcatggccacgcatgtcaatgacgtcgatttcgaaattcggattggcggcgttgtggtagaccacggcgagcggcacatccgcaccgttctcccccgcgccttcaaaacaggcaaagctcacatcatattcaatatcgttctgacgtggaatgaaggcttggaattcgccttcaggcgtggccaccggcagcatcagcacttcggtggtggttttggaaccggtgccgatcacgatattgcgctcatcaaaactgatgccgacgcccacccagaaccgttcatcggtttctcggtacacgcacacatccgattcgaccgccgtgccaacacgatgccgccacacggcgagcggccgccaggaatcgtccaattccacccagaacacccattggccgtccggcgtgaagcatgcgctgccaatgccggtgaactgttcgggcagttcgctgaccggctccccggtctccagcccggcaaggtcgcgaatgcggaaatcatatcgttcgtctcccgcaacatccacgccgtacagcatccaacggccgtccttgctcagatccaagccgccgagccggaagaagtcatgcccctcggattccttgttcgcatcaaaaacgacctgttcaccgggcatggatccgggcgcgccttgcggatccacgaccggcgggtcccagtcatcggcatcgcgcacggggatgcggcattgcacgccatactgtttgccctgctgcgtgcgggtgaagtaccagtaatcgttgatgcgcgtgggaacagacatatcggtctcttccacatgcgatttcagctctccaaacaacgtatgccggaaatccgccagatgcgccatgcgacgctcgcagtactggttttcagcagctacgtagctgcgcacatcatcggagtctttgtctcgcatccactcgtaatcgtcgtcgaaaacgtcaccgtggaattcgcggcgcttcggctcgcgcttggcgtaaggcggcatcgcggccgcggcgtttgtgctctcgtcagtcataccacgcgattataggcgaggcaccacaccgggacgcattcggcgttcatcacgccgcgcttatcgcaacaccgtcttcagatacggcagcatggtcttcagaatgttcgagccggtggtgccggtgaatactggtacatcggttaccggagtcggctgggtcgaggtgagtcccgtcaccgacgccaatccggttgattcgcgcgggctcaactcacgaatgacgatagccagtacacgtccgggatatctgcgggcgatggtggcgtacgtggtcgggtccttctgcccgtcatcgcccaccagaatgaacttcatgtccgggaagtcggccataagttgttcggcaaactcaagtttgtgctgggggccggtgggcacgaaggtcttgggcctcgggtcgaggtcgcgcagcagcagcgggccttcgggaaaaccatggtcagtgatgaagttgcgaatcgaactctccacattccagggcgatgtcgaaagatagaagaacggtgcgccggggaacaagtcggcgatgcgggtgaacagcacgctcatgcccggcacggaggctttcttcttggggtcgaggaacagcaggttgtacgcggccttccatggcaccggggcctgtgtgatcatgatggtgtcgtccacatcggagatgatgccgactttggcactggcggggatggtgtacaggttggcgctcacgggtttgcggttggccacgctgtaggagacgcgatggatgccgggcaccagacgatgctcggccacgaggtcgaggtatccggcggaatcggagatggcgtattcgctgccgagatcgcgcgtgcggtccaccttgtcatagacctcggagacgccgatctgcacggtgttcagcggcatgtcatcaatgctggcctgcacgtgggtgcgcggcgcgggcacggcaagcatgccgcggatgccgcggatcagttcgccggattgcgcatgcttgggggcgtataccgtgcggcagatcaggcgcgagtaatcgccggtgccataacccacatagggttccactcgcggataccagccccattggcgcaccacctgagtggagatgtgtgaccatacgccgaacacgcgggtgatggcacgacgtatgaatcgggtgatcggcggcttgacctcgatgcgctcacgcttggagggggtgtcgaacgtcgtggcagccttgcgtgcgggaatcggcacggtgggcatgtcatcggaatgttcagcattgctggcattgctggcattgtcggcgccattggcggatgccttgacgtcagagactggcgcggtggcggacagcgctgcattgcgagcagcagcatcccaaggcagtcgcttgcctgccgcctcaaaatcctcgcgtgggcttctcatagacaccaatataggccatacgcctcattttcttggcttccctccataagaggcacgatgcatataggtttgatgccacatactggctcccctcagggaggggagctatgggtggaactaccgcacgaccttcgcgtattcgtcggcgctcagcagctccggctcatcgtcgtcaagctcgaccttcagcagccagccttcgccgtacggatcgccgttgaccacggacgggtcgtccgccacgtcacggttcacatacttgaccgtacccgccacggggctgatcaacggctggactgccttggaggattcaagctccacgatctcgtcgccggcctccacacgggcgccaggctcaggcaaatccacgaacacaagttcgccaagctggtcggcggcgtattcggttatgccgatgattgcggggtcgaccgaacggtccacccaagcatgctcctcggagtattcgaggtggtcgggaatgtcgaggttcagcggctgttcgttttcgttgtcatcactcatagtcataagcctaacctatcttcgcggtccgtcacagctcgcgaccgagccattcctcaatcatgtagcgggcgatggtggcgcggcccggcgccgccatacggccggcgatgagctcggccgtgtattcgtcgcgtgtgacccatcgcgcggtcatggtctcctcgccgtccacatgcacgtcggtggtgatcgcatgtgccttgaacgccatcatcagcgaagccgggaacggccacggctgcgagcccaggtaccgtacctcgccgagcttgatgccggtctcttccatggcctcgcggcggcaggcgtgttcaaggttctcccccgcctccacaaatccggcggacaccgaatacagcctcgaatccttccatgccgcgttgtgttgcagcagcagacgatcgtgcccgtccacgatggcggtgatgaccgccggctccacgcgcgggaacagcacacggttgccgtccgcctcgttggtgcatcgctgcgcccatccggcgagcgccggccggaccgccgcgccacaggtggggcagaaccgctggcggctgtgccagatgcttaaggtgatggcactggtggcttgcccagcctcgcgcgcgttggcgtgaggggcgaatccgcgcaggtccacccagtcgaaccgggtcacggcctgttgcagcagcgtgggcttcggggccaagggctgtacgggcgcgccgaccgaatcatcgaaggcatcgtccgcaccttgtccggccgaatccggtacaccgagcggcccggcgattttggctgcggctacgccgccattgcccttggcgtttcccggctgccgtattccggcggcagcacctccgctgatgccgttcttgcccagcgcaccgtccacggtgccggaatcctgggtgccgagcacgccgccggcagcaccggaaacaccagcaatcccgccaacaccgggaacaccggcttccggcacgcgcgtgatatccacggcgaccacggattcgccgcgcgccccggcataggagccgaggaacatggcgaccgcttcggggtagcgtgccagttcggcggacacataggcgcccggcaacgtggcgagccgcattttcacgttctcatagtccacgagctcgccttggccgcgcggtacggcgacaagtccgccgcgcgtaagcacgactttggtggtcggctcggccaacagctcgtcgatcagaccgggttcaccgcgccggtccacctgatagtcgatgtcaccttgcgcgagcggcaggaacggcagcgcatgggtcagcgccaggggcgaaaaatgaatgtcagtgcccatcgaggtctcctatgcgttcttctgcgcgttctgcacgcgcctgacgagcgagagcagtgctcgcgccacggtatccggatgttcgacggcactgaaatggccgcagtccggaatgtcgatgaattcggcgccggcgattcgctcggcgagcggacgcatcacactcggattgctggaggggtccagttcgccagacaccaccaggctcggtgcgctgatcgtttccggcaccgcccccagttcgggccggccataggtcatgcgctgacgccaagccagaccagccgggttctgttcgttgatccagccggtcatggtcgcgatgaattcaggagtcttcttgacggtggaatcgccatcggccggttgcgcgaagtgcatgaccggttcgaccgagttcgtctgttcggcggcgtccgccatcttcagtcggttctctccgcccacgccgtcggacgcggccatcgtgtcacacaaggccagtccggccaccgtttcggggtacaggcgctggatgtccatcgccacgtagccgcccatcgacagtccgacccagatcgcctgctcgtagccggcggccttgatcaggtccacgtaggctccggccaggcgatccagcgcctcgctgtaggcgccgttcgccatgcgggggccagaatcggcatcgctcggcaccggggatgcgccggagccggccatatccggcgcccaaatcgggaagtccggcacatcgttcaggtcggcggagtcggcgagcgccttcgcgcacacgtcccacatgcggtggtccaccgggtaggcgttcatcagcaccaccggcacgccttcgccatcgcgatagatatgattggccaattcgattgccatgaattactccttcacattcacgtcccaccagcgggaagcaaaacaactgtcagattccggcccaggccaacgcctgccgcacgatgcgcccgtggccgttgaccatctgcgccacgaacgtgttcattacgtcgctcttgggatccacccattccacatccagcgtctcgtcctgtggcttgcagtcgccggcgataggcaccatgtagcacagtgcgatggcgtgctggcgcggatcgtagtattcgctcagtcccggcgtggggaagaattcggccacggtgaatggctggagtccgaccggcagcagcggcagggcgatgtcgcccaggtccttggccacattgcgggcgatggcctcgcgcagcgtctcgtggtacagcacacggccggtgatcagcgtgcgttcgatcgacccgtcatcggatacgcgcagcagcgagcccacctgggagatgcggcccatctcatcggtgcgcacgggcacgatctccacgtatgcgatgggcatctgatgacgcgcccggttgatgtcggccggtcccagccagcccggcgggttgccgtggccggaaccgcccccgtggatgaagtcctcgggcgtgatgttgtcgaattcgccgcggccacggccggcatcataatcgccctcgtcgggcacttcatcattcatgactggcatgcatcccattattgcgcgtcacagcgcgccgcgcgtcaccttacagcgaaatcttgggaaacgtttggccggcggcggaaaatacgacacaaatgttgggtggtgctgggaagctggtagccagcagggagccgacggccacgaaccgcacggctccaagtgccaagacgtattgcatgaataaggcaatcgcccggcggccacgcacgagggccgtacggcgacgccaaggaaaacacagaagaagggaacatcatggcaaccaccgctatcacctctgccgatttcgagaagaccatcaccgacaacgagatcgtgttcgttgacttctgggccacctggtgcggcccgtgccgcgcgttcggcccgatcttcgaggcggcctccaacgatccggagaacgcggacatcgccttcgtcaaggtggatatcgacgccaaccaggatctggcccaggccgccggcatccaggcggtgcccacgctgatgatcgccaagcagggcgaggtcatcttccagcaggccggcgcgctgcaggccgccgatctcgacgatctgatcgcccaggccaaggcactcgacctcgccgccgccaaggccgcccagtccggtgccgaccagcaggcctgagcctgattttccttcatccactgcgccgcctatcatagtgggcagtgtgaaatccgatcaaggagcgcaatgacgagacatgccaagccgacccgtatgctcaggccgttgaacaagcgccagtggatgaagatcgcggctgtggtggccgcggcaggtctgctcggcgcggcgggattggtgtcgcgcagtttctaccatgctgatgatgtgaagccgatttccaccatcacttcgttctcggctaccgattcggccgcatcccgttctgccactcgtggcgcaatcaacagcgccgacaagaacaccacgttcgttacggtgaagattaatggcgattcgcgcgtagtacttggcgaaaaagccaacatgaccaccgtcaaggacgtgctggagacgggtgatatcacgcttgacccggatgatgccgtatcgccctcgctgaaatccaaggtcaccgaggccaccgtggtcaccattaatcgcgcggatgccgatgtggagaccaacgataccgagatcgccttcaatgaagtgcgcaaggagaccagcagcctgcccaagggtcaggaaaaggtcgagaccgagggccagaagggcattatggagaccacctcgctggtcaagcgagccggcgacaaggtcgtctcttccaacgtattcgcctcatgggtcaagaaggccccggtggataaggtgatcctggtgggcactggttccaccgagtcgccgtcgacgtcgtcatcatcgtcggccgatctcggcaccactgttccggctggagaagttcagtcctgggcgcatcagtatctgttagacaacgggtatagcgaagcggacttcaccgctgcgaactacatcatcaatcacgagtccggttggagccccaccgccaccaaccccacgtctggtgcttatggcttgggtcaggccttccccggtagcaagatggcttccgccggcgcggactggcagaccaactacaagacccagttcaagtggttcatcagctactgcgagcagcgctacggcggcatcgtcgcagcgtacaactactggatcgcccataacaattactgattgcgattattctcggtctacgcaaagaacctccgccggttggcctaaccaccacacaaggggttacccccctaactttataattgcgtatgcaattcaatatcgctcgcataattcacggagacggccatgacctttaatcggtatatttgctttcgtgccatccttgaatccataggtgccattgcctgcatgctgatggctcttattggcaataacctgctcggagtaatcgtggcagcgatcgcggcgctgttgtggatcggcggcgaagtatggggcatgactgtattccgacggcagaacccgcgacgcgacgagctttccgatatgcatcaaagcgcggccatgcaattcgcgctggtcagtttggtgggcattctggtaattgtcggtttcatctacaccacactgaatttgattgaccgctcgatagttcacattattccgccaatgctactgcccgcattggccatgtgcgccttggccatttccgatattcgatatctatggttggaacacgataccggcaccgggggcgacgatgaagactagtctgaaacttcaccgactccaacgcggtatgaagcaatccgacctcgccgatctggtcaacgtgcgacgtgagaccataggaaggctggaacaggggcaatactgcccatcattgcgtctggccatggatttggcgcgggtgttcggcaccaccgtagaggacctgttcagttttgacgacgagtacgaatcagaatccgagtagcccgtcggcgtgtcgcagaaaaaaatttccctgttgtttaccatgcacgtatcgccaatcaccgcaatcgttggaatagcaacgttttcagaacgtcaggagaccccgccgcaacggtaatgcggcgacaatatgttcgaacgttgtcacatgatgtgaccacgttgtcacaccccccttatccgttaacataattaccccttatataccggcaaaggggggtgtatggttgggggctgtaattgaaaaaagaccgattttctattgataagaaccgattttttattggtagtaaccggttctattgtggaggttcgaagttatgaagaagaagattatggccgtgctggccgttatcgccgcagttctgggctttggtttcgcaacgaataccgccatggctgatgattacggtgcaacggttacttacagcggcaccaccgctaccgtgacgttccctgcaggcacattccaaccgaatgaatccgtcaccgtgtactacgatgatgccatcgtcgccgacgtccagcagatcgctgaagtatccaagacgttcactgccaaggcagatggttccttgactttgctgtacacgttcaaggccagccaggctggcaagaccatcgcggtcaaggctgttggcgctgtatccggtaccaagaccgccaccattcaggttccggcaaccggaaccggtgaccagtccggtaccacgactgctaccaccgccaacaccggtgcggccatcgcaccgtacggtgtggccgttgtgctgcttgccgccgcgggcatcgccctgttcgccgtccgcaagagcaccactcgtcgctgacgtgactgacataataaacggtagacgctgaagcatagttcgcgaataccactgaaccgggagtcgatgattcccggttttttcatgttattgctacggtacataacgcacgcatattcgcgaagaatgctcactggaatatatgagggaatgctcacaacacttgagaagggacgttgttatgcaaatcatgtatgtatgcaccggcaatcaatgccgttccgtgatggccgaatactacacccgagccaagcttgccgaccgaggaattggcttgcagagcggcaatatcaccgtgcgcagcgcgggtactctgcactatcccccgcatcccgctgatccgatggttatcgatttgctgaagaacgacggcatcgacgcgaattcccattcttccacccctctcaccaccgatatcagccggcaagccgacctgattctgtgttttgagcgtgagcaaatttccgatttgcttgagcagaatccactggctattcgcaaagtatttctgttcaatgacttcgtgaacgcttgcaaacatatgcatgctgagggtccgattgccggcgataccgccgcagacaggctcatcgaaatcatggattgcgtacctatgctgcggccgtttttgcctacggcactcgaaaccgaagaccctcatcgtcaatcacgcgaggtgtttgaacgcgtgtatgcggagatcaagcacggcgtcgatattatgctcggcgctgtggcctgaatgcaatatcggcgaatagagcaagcaaaaaggccgtcagttattgcgatgttgaaattgcatattgctatattcaatacggctgatattgcgggttcttgtttccgcttttcttggtattggttaaatcagtgctattcgaggagcgcaatacgtaggtcaaatgttcttcaattatgcaatcatgcatgcatatgatttgtataatgcgaaattagctggttacaattagtgacgtaaataaaaacacgtgaccaatgcaataaggagagcaattatggcttcattgcttcagggattcgaagaggttcagctggtcaagccggtgggcaagaccgttctgaccgtcaccgattccgccattcgtttcaacaaagccaccgctgaagtgctcggattcccggcgtacgtcaaggtgctgattaacgacaagaccaagcaaatcgccgtgaccccgaccaccgccaaggccgacaacgccattaagttcagcaagcccgaaggcaagcaggccgcttcggtaagcgtcaaggaagccacgctcattgaagcagtgaaggcatacttcactctgcccgaggctccggaaggtgaaatcgcctaccagtccgtcaacggtaccgcctaccccgaaagcaagaccgtgattttcgatgtggccaatgccaccgctggcaccatgaagcgccgcggtcgcaagaaggccgcctgattcttctgccttgaaatggtgccctgattgaagacgaggggccggaacccgtaaaagattccggctgttccgctgacaagtcagcggcctcgtctgagacttaatccaagcagtaccagtacagcgatgatgatggccgtcgaccatccctgcccaacttggttggccagagcgatcaacaggcccgtcatcaggccttcccggtattgccggtcagatctcggacggttgtcatggtcgttgccttccatgagaacctcctctttagttgtaaccagtcactatgcctgctggcacaatgacaccgtgccaaggtgccacgctagtagttccttggtttggtctgtccagtgtacggggaaggttcgatggatgctggtatgctgtgttgtagcagaaaggtcgcgctagcttcggggcaatcttctcggcggcgccacagactttcgccccgttggacccaactgccgaggtttcctcaacctcagttgttaccaaaaaggtctctggctggtgaacagccagggaccttttactttttcaaattccgggttaagggccagtttccttacctcgatttgcaaggaaagcccgacgccataaggcaccaccactaagaatcgtgccgcaaccgcgctttgcgacccactcaagcaaataccaggcaaataaaattttggcggaattccaacgtttcgcacatgtggagtgcagaatacgcagtaacgaagcaaataaaaaagtattgcttcaatgtttgttgggcgggttcggcagtgtttttccgcagtgtccgatggcctcacatgcttagccggcgagcgccctgttgttgatgataagcaggcgcgagtggctgaaacattcaagaaactccatcgaggcgatatggacatcgttgcctacgaggatgagcacaagtttgatggggacggggacgagccggcgtagcatcagttcgcttgaactcacatattcatgtatatctgtgtatataagtgtatatttttacctagaacttatggaaggccaaaggaaccgtgcagcgcgggtcctcgcgaacccatttcgccagcgcgccctcggacgggtagccgagcttggcgacgaccttcctggtggtcatgccctccgtgaaatacaggtcaacggccctgcgccgatcctccatcgaaaacatgcggactccaatccggacgccaaaacgtccaactttccgtccgcccattaccatgtttggtaggcctcgatggtcggggcctaccaaacatggtaatgggctgctgcatactgcaatgcagcagcccccttttactattgatgaacaatgtcgtcatatacatcggaaaatgcgtaatctgctatcgcactcagcattaatctcaaaatactatggcgtttccgcattcgtccgagtcaatcagtggttaggaacaatcacgactttgccttcggccacatccttgagatgcttgccataggggctcttgccgtaacgttcggccgattcgaggagctcctccttggaaatccacccattttcgtaggcgatttcctccacgatggc

SEQ ID NO: 924 - DNA, 51206 bp, Unknown
  R117_24m  MAG No. k141_7807
ccgcgtgctgcagattgccgacattcaggatgggccgaaagtctccaaagacaccatcgccctgattgaggccagccttgatgccacacggcctgatctggtgattttctccggcaaccagatcgccggctacgatccggcctttgccaagagcttccgcaaacgccgttggtgcgaagaggcgattcctgaatctgcgttgaaccatacgcgtgaattggtgcgcaaggccatcggtcaatttacctctcctttggcgtcacggggcataccgtgggcggtgacctacggcaaccacgatttccagtgcggtttgagcaatgccgaactcgacggaatctaccgcgagtttcccggttgcatcaatccgccgagcgatgcgctggccaagcagaccgtatatatgtgtcataaggacggctcgcctgcggcaaccaatggtgaagaaaccgatgcgccgatttccgcgtccaccattcccggcacttttgcattgccggtgatggatgtggattgcacgcgcaacgtactgggactggtactggtgaattccggtgactatgcgcatggaggcggtttcggcacgccttcgcccgagacattggccttcctcaaggctttgcccgaacatatcggagccaaatcaatggtgttccagcacatgccgctgccggagtattaccaggtactcaaaccggtggccgccaatgcggctttcgccatgcagggctaccgcaagcatgcggatacctattatgtgctggacgaggatcgcactcaagccggcgggtatctgggggaaggcatttcctgcccggatgagtcggacgagtttgaggcgctgcgcgaggggtatttcggcgtcgtagctggtcatgatcatcgcaacggtttcgtcggcgaacatgagggtctgttgcttatcgctacgccaacctgcggattcaatacgtacggaccggctccggccaaacgtgccacgcgattgatcgaatttgatatccgtcacccttacgagccgcgtacgcaattgctggagtttggcgaactggtgggcaagcccagttccaaacgcgcctacacctatgcggtgaaccaaaccgcgcctggcgagggcgagggtgatgatttgctgcgcaagccgtcgctatggagccaactgtccggtttattcaggtaacccggtttattcaggtaactgttcctgatagaggcggaaagcggcgcgaagtattcgtatacgcgcgcggccggaggcgcggccgtataccggttccatatcccggcacaaagatatgccgacatatgatacaagtgataacatttgttgaataaagggttacgttttcgcgtttagggacgtgtgcttcggcacgcattcaaacaagcgcatcccttgcggtcactatctcacgatggttcgcgcgaagcgatgaaccgtcagtatgtgcggagttctggtatggtcacacgtttaacgcggttggcgacggctgtcgcgctggtcgtcggcatgatcgtaccggtcgccacggccgccgccgtcgacgggggggggggttgtcgatgccgcgcaacagacgccggcgtgcggacgtccttggaatcaggacgaacaaggcaccgtcgttgattctagccagccttccggccgattggtcggctgcatcagcaatgccgcggtgcaatatcgattgcagaattcgacgcaatggcagaacgttcccttggatgaacacggcaatgtctcgttcgattacagcacgaagatagcgcaattccgttttgacgcgcaattcgtcatacccaaaggaagcatcaccgaagacaaccacgtgttccgataccacatcgcgggattcaacggcaccggtaccaccatgtcgggcacgctcaacgacgatctcggcacgtacacgatcgctcccgacggattggtgaccatcgtcttcagtgagcacgccatcagcaagaacgccgccgccccactggacaatggccgattgtacatcgaagccgatcgcagtaaggtgaccggcaataatccagggcagaccgtattggatttcggcaacggccataccaccaccatcaccatgtaccgcagaagcggcagcacctccaagcaggtcgtcggcacaccgacgctgcaaccggacggaacgctcaataccagatggcaggcgcaatacgtcaacacgggaaccatcgaccagccaatcgtgaagatcgaggattggttggcctatgagaacgttgatcaaccgaacgccggttccatctcgttaagccgaggatggtacacggcagataacatcaacgatctgtaccaaacgttgaccacaacgatggggcacggcacgttgacggtatatacggtcacgctgccgaactacaaaggcggacccgccgtcacatggccggccggcggattggccacgggaacctattggaagtgggttttccagccggattcgtattcgattcccgcagggcagacgttgacgttgcaatacgattcgacgttcgccaatgacgtgctgtatcccgcttcgaaaaacatttcgcggttcgtccgttccaataacggaggcgactatttcaccaacaatgcaatcgcctggaatccgctgcggccaaggatctcactcaccaaaacggcgggcgggcagcagaccccctcggcggagcagtgccagaccatgggcgtggcggaaggccattgcggccttgcgtcgtggaatgtctcggtgcgcaatgccggcgacggtcaattgccggcgggatgggtcatgcaggacaccggcagcggcgtctggtacacgaagcaactgctgcaggacagtctgcgcgtgaccgtcgacggtaagcagctgcccggagcgacgcaagtgtcctccgacaatggcagaacctggatagacctcgacaaggcccaggaatcacagcgatacacgtccttccggttcgtggccgacaacgcgcttgcccccggcacaaccgcggcgatcacctatcaaagcctgttcgattccagcgaaacgaccgtgcgtaagaattcagccaccgcgggaaccggcgtcggtggagcgttcgtcaaacccgtcacctccagtgtgcaagtcgcctctttggtcaaagatggttgcggcgatccggtcgacggacaggggaatcccaaattcacctcctgctcggccaacggtgccgactacacacgtaccgccacccccgatccggtgtccgtgaggcaagtgggatggcgtatcagcgcgcacgtgaccgacaattggcgtcgcgcgccgctcgtcttcacggaaaccctgccggagggcctgcacgacgtgaagttcgcgttctccgatcatggcgaccgcaaacagtggcttaccgtgggggagacgcggttcaccaatacccagggtgtgcaatatgtcgttaccgtcaagcagaccggcgaccgcacgtaccagatcaccatcccccaacaggcgaccgatctcatgaacgacggcaacgtgtatctgtatgtggccgcacgcactcccgacatcaacgacggcaagtactgggcggaaggcaaatacgacggcaaacggggttgcgtcgccgatcccgcgctgaaaaacggtgccggcgattgcctgacggccaaataccgtaatacggtttccatgggctccggcagcataccttccgtgtccacgtcggaaaccttcgtcgataatttccagaaaaccaataccggcgtcgaggacaagcagaacgtcgacggcggctggtcctccgacggcaaaagcttcacccgaacctattatgtgcgcgccaaccggtatggactgaacatcgatgccacgcatgcgaaacaggatgacgtccccgataccgatatgctgcccatcaaagacacgctgaccgtgccggccataccggaaggcagcaatccgcaggtcacgttcctgggcaacgtgaccgtgtgcctcgcctggataggcaacggacagtcctgcccggccggcaaaacgtaccaaccatcctcggatgcgatcgtatatcaggaaaacgatgccaaactcggcggcgtattgacggtgtacgttcccgattccacgccggtgaccatcagctaccagtacgggttcaaaggctccgccggattcgatgtggcgaacaccgcgcaattcgccaactcgccatggtccgatgccggcgcattcaatacgaacggcgcggccatcagcagtagcggcgtcatcgtgcagacatcgacgatgctgttgcataaaaccgatgatgatgcgtccggctaccgggatttggcgggcgccaaattcgaactgctcgaatgggacggccatgactatgcgtcgagcaagcccacgcccattacagcggtgacggatgagaaaggcatgatcgtcgtcggcaaaacccaagggttgcagtgcggcacggcgtatcggatcaaagagctccaagcgccgctcggctatgagatcaacgacgggcagaccgatttctatctgacgaattgcggcggaggcgcgtatttcggcccgacgaacgcggatggcagtccgcatgcgtcggtgcatcaatggaccggtggctatacggtgacgattcgagacaagaagatcaccggctcggtgtcgtggagcaaggtggacgccgatcatcacgaggaatacctgtccggcaccacgtggcgacttgaacgacgcaacgataacggtacgtggaacaaggtcaacgattccctctataacttcgccgattgcgtgggcgacggtgatgccgcctgtgccggcaccggagacaaggatccgaccgtcggcaaactgaccatcgacaatctcgactggggcacctaccggctgacggagatcaccgcgcccggcggataccggttgcccgacagcgaccgtacctgggccgaattcacgattcgccaggaggatcccaaggcgaaagccgtactgcacggacggggtgattgggccggcgttacggacaatcgtctgaccaatcggccgcaaccggtttccgcgctgccctccgcggggcgtcgtgccgcgtgggtggtgacgattgtcggcatggtggcgtccggaggggcgttggcggtgttagcaatcgccgcgcatatcagaaaacgttcatacgggaaccgttccgtatgaccaacatggattcatccatatattccataaggaggagaacaatgaaagcaaaatcatggatggcgggagtcgctgcggcggccacactgttcgcggccatgaccgcaccggccagcgccatggccgaagaggcgggtgcgccgggagtctcgcaaacttccacgacttgcgcgaccaacggcaacaccatcacggtgaagggcacggatgcggacgcgttcaagacatggaacggaaagacctcttcgagcaaccgcacgttcaaagtggcgaaagtcgccaactacaagatcggtgatgacacgtccggcggctcggtgcatcttgagacggtggcggcctcggagacgagcattcttcaggcgatgcaagaactgaaatccaatgatggtacgccactgtatcaaaataaggatcttcaaggtgatccaatgaactggcttgccaacactgggcaggattcgttaatccgtaagtacgcggataatccgggagtcatcggcaccgtgcttgaagcgaataaggtgagtgtcgacgacacgaacaataccatgacgctcactatgaccgaacccggcctgtatgtgatcttcgatgctacacagcccaagaagcagaccaaggacacgggcgataccaccgttgagtatgcaggcttcaacaatatgctcgtcggcactccgcttaccgccggctgcaacgtgtcgaacagcacgggcaccgtggatctgacgtccaatgcaaacgccaagaccggttccacgacgaccaatcgcggcggcttccagttcaccaaggtaggtgtagaaaacgacaggaccggcttgtcgggtgccgaattcaccgtgtactctgacaaagacttcacaacggttctgcaggacgccaatggtaagaatgtcacagccacatccggcggtgccggtctcgtcgattttagtagcttcaagctgaataccggcacctattacctcaaggagaccaaggtgccgaatggctattggtccggctccgcggccaaactgcaggtcaagatgaagaacgacaacgggacgattaagctggagtcgatcaccgacatgagcgttcccgccagtgggctgctcagcgatggcggtaacggttacgtgtaccgcaacatcaaaagcatcacccagctgccgctgaccggtgccatgggcatggccatcctcggcgtcgtggcggtactgtgcatcggcggtgcctcgatcgtcatcgttcgtgcccgcaaaacgaagcgtagtttcgcagcctgagtaagggccgaatgacgccggtggcaccttcgttcgagcagctggtcgacgttgccaaagaataccgggcgcatgcccgtatgcggcggcgattgcgtgtgatgtacgccgtcgcggggattttgatcgccgtggcggtggtatgcacggtggttccgctgctgatgcagtatgcgtcgcagacgtccatgtccgcgtcggcgtcttccgtcgaacagcaggtgcgactgtggccggaaagccggatcgacgacgaactgcgggcggcgcgtgcctacaaccgcaatctcgtccgatccggacagccggtgctgggagcccaggccgacccgttcagtaacggggaacgcctgtcatcccagtcagcgcaggatcaacgctacggcaggctgctcaacgaaggtcacggcatcatgggccgcgtgtccataccgaagatttcggtggatcttcccatctaccacggcaccggagacaagcaattgtcccttggttccgggcatctgtacggcacgagcctgccggtcggcggcaacgacacccatgcggtcatcaccggccatcgcggcatggtgcaggcgcagatgttcaccagattggatgaaatgcgcgaaggcgatttcatctacatctcaacgatgaacaggaccctggcctacgaagtcgatcgcatcaccgtgatcgaaccgaccgatacctcgcagctgcgcatcgttcccgggcaggatcggctgacgttgatgacctgtacgccatacggcatcaattcccaccggctcctggtctccggccatcgtgtgagcatgcccgttcccgcccccgatccgaccgatctgcatgacggtcggaccgccggcacatgggtgtgcggggcggtgctcctgtgcggttggggcggcattgcggcggtccgtcggcgcaagcgcgcgccggaagggccaccgcgccatgccgtgcgggtgtgattggatcaaggtccggcatggcgatgccagccgttgcggacggattcggggtgcgacgcaggaggttcgcctggtccggagaaaacagtctacgcggcgggaaccgttcacgtcgaaatcacctgcacggcctggagtacccgcaattcgggaaacctgtgcaaccgtagaacgtgcgtgccggtgccgaaacgttcctcggcgtcatcggacgcagcctcggcgtgtgacggcggcgacgcgtgccgccgacaccgattgcgggcggtgacgggtgcgtgacgtgtgtgacggatggtcggatggcggggtggacggaccgagcggaaccgggcggtccgtccggaaccggctagagaccgaggaaggcgcggatgtcgccgatctcctcgtcgacgatggctgacccatgccaggatactcgcggtattcgagccggccggtggcctcgagcacgcgacgcgcggtctgctggtccgcaggtggaatcgtgcggtcccgcgagccgtacaagagcaggaaacgggtgggggagtcgaaaccggtgaggtccgtcgactcctcgcccttgaacgacgggctcatcaggatcgccgcgtcgaacacgtgcggatgctcgagcaccatgcgatacgacatatagccgccctgggagaacccgacgaggatcttgcggcggcctgcgaacatgggggagtcgagcagggagacgacggcgtcgcccatgcgcgagcactcgcggcggcgtagacagcgtcgatgatgcggatcatctcacgctcgtcattgccgtacccatggaacatgacgaacaggcggtcgtcctgttccgatgcttgaacttggggagctccaaacgtttcatacgtattgggtgtcttaggcgttcgagatatgtcgtgtgtctcgtcggggaacgacgattcgaatcgatggtcgcaataacatgtcggctccttcctcgcggcttgtaccgcttcctcatcatcccgcgccatgcaggcgcgtggaatagaatgttcgacttacggcgtcaatacgtgttgaaggtgttgagcaatccggttcgaaacgctttctcgcatggtgacatgcgggatatgaaatcggcatagtcgacggccgtatcgggaatcgacagtccgagtttggccacgatgatgtcctcccgtgctttgacgtctccgtggaacgtcgttccttgcagcatgtgcagctccttgcgtgaggtttgcttcgcatcggggtagaggaagatgccgagtttggaatcaaaccggtacatatatgccagaatctgccagtaatcttctttgtgaatattggatataggcttgtacttggcgtccgcaatgatgggatgttgtttggaacggctgatgaaatcaggatagatagggcctgtgccaccttcgaacaggtgttgttttccttctttcaatttgtttcgcggatggaagaagctatcgccaatcagggaatcgacgtattcctcccatagccaggagccgtcgaagagaatgccatgaagtcggttttcctgaccgttgaacgcgtgacgctgattgctaagaatgatgatgcataattgttgcagcatgcggtattgcgtaaaatacgcatgattgaccggatgtctgagattgtattccagaacggtgctgcggtttgcgcgacgatatgagggagtacattcgattatgtaacgtacctccttgcggatattgcctaatagcgtggaaccgtacggttgaagggctatatattccattgtgtgacgaatcagctgtgtgagaggattgtctgcagtaagctcgcgcacatcatatgcgatattgccggtgaaaggaatattagtggtgatatgccgtggaatatcaattcttccacggatgtggctgtcattgtacttgtgctgaatgtatgtccgataaatcccttgtcttaaagctccccgtaaacagtatggaaacatgaatacatggaattggaacagtctcgtcgataaatcggattgaatactcaggcttgacaggttgggaatattcagtacacgatacatcatgtattgcaggaagaaatcccctgcggatgaggcaaaacgtgaatcgatgaccaactgttcgtcttgatagccaaggtaccccatcagattccctgagcggtagcctccactgtccttttccaataccatctggcattcgtccaagtccggagaatcctgaatcgactgcgggaacaccagcagaccttcttgcgaaagccgggctatggaacgatcggacacagccgcgacgatatccttgacgggagccagcgtggttgcctcaatgcgggagttgtctttgatcgatacggtactcataccgaccgttccgctggctgcggcgaatccgaagcatcttcatatgccgctttcagcttctccatgatttctgtttcgttatacatgccgcgcacgtaatcgtgcaatagcggttgcaggaaatcacgccaaaggtcatcgaacgctttcgccgtggattcggatttggaaagattcaggaaatacgcagggccgacatggtaatccgaacccaaaccgatatcgggggaggatatggtctcattcagcttcgtcaagcggctctcggcttcctccgacaagcctccaagttcttcaagcatgtccaacccgtcttcggccttgacctcgatgaagcggaaccgtcggcgcatcgcgaaatcaaaggtgtcgacggatcgatcgatgtcgttcatcgtgccgatgatatagacattgtccggcacatacagctcatgaccgtactgggtggtcacattgccggcagggccgcgataaccagggtcgatggagaagaacagctcgccgaatatcttggagatttcacctcggttgatctcgtcgatgatgaacacgaagggtttccgaagaaccttttcggatgctcgtgaagccgacgaaggcttgtgcttttggatttcctgtagcaaggcgaatgcataggagtcctcccgctgtcgacgctttcgctcgagaatttgatgcacgtcttcaccatttgttggaggggtgctggattgcataagcgccagaaggtcttggacgcgtattcttaattcctgtttgatgccgtggggagcgtacacaagaacatgatgttcggtgacgttggttacttggaaaggcttaccagtcgagattctgaactgattgtcgtcgaaatcaagagaatcaaagtaggcgtccagacgttcccgaacggatggttccctccgttcctccttggaaagccgggactgttcgacgttgtcccgagccttgtcaaggaaacgcttgaatatgccgtcctggatggagaagccgtgagttcccgtcgcatccgtctcctcggtattggggcggatgccctccacgaaatccgtgtagtcgtagctgggatgaaattggacgaaaccgatgcgtctgcgctgttcatcatcaagcttggaccaatcgccgcgcttgccgtcgctgacgatatcggcggcgatttggcgggcaagataggttttaccggttccgggagcgccacggaagatgatgttcttggaatccaacagtgtctgcgaatacttattgttgtagacaggggacttctcatcatcgggtgaagcgtaacctttttcttcttctaccgaagcgtcagcattcgaggcttcttgggaggtcttacgacgataccgcaagatgaaggcgtcattcggtttgccgaagcgtttcagacactcctgaacgaagaatagcgtcgagaagatgttccagcagtagagatacatctgtacatccgttccgcgccaataacgcacgtattcgattgagttcttgcagccgcttctgaaacgttcctcatcggggaagatgccggtgattagcggcttatccagaccgtaccgacagatggggaaggactcgcgcttgtcgtacggcaattcgagaagcttatcttcgaatacctgacaggtcagacgtggcagtgtctgacatgagatccggcgttctcccttgttacgatttcgttcgattggttcgccgtccgcaggcttgaacttgacgtcttcgggggtatacgcacttcccatgttggcgaagaaggaagggtcggtataggaatcggtatcgggctcattcgactgaatcgagtcggccgtgatgatcatctcatatgttccatcgggttgtgtcgtcattgagcaccttgccttatagcgtctcgtgttgtcaactatcctacactgtgcggattcatggcgtgtttgtcttcataggaatcggcctgcggccgatgcggtgtttttgcggcctttggccgcggtctctccctcagtcggcttcgccgacagctccctcgtcagagggaacccgcgctgcgcgcgttttgtcggctcgctattacctgcatgatgcctacggcatcgtctcgtcagagggaacgtcctgtggccattgccggtctggtctgtaccgcatcgggaacgctccgtaccgtgtcggacggcgcgcgaggtgggggcgtgcggcgacgttgcgatgggaatcggtcagcgcgggcggcctcatgctggtgagaaaggccgtgtgcgttccggcccgaacaaaggacgatgggatgggccgagaccgatgaaccgatacggaagggactacgacatggacaatacggcgcgcagggatgcgggattgccataccactacgacgacccggccatcatggacggacagctcgcatggcagaacaaactatgggaatacaaccagaccaaacccaccgaacgggagcggcgcgccgaactgctcaaagacatgtgcgccgaagtcggcgacggcgtgcacatcgaaacgccattgcatgcgagcaacggatgccgtcgcgtacacctcggcaaagtcatctacatcaacgcgttcatgagcatggtcgacgacgcggagatatggatcggcgactacacgatgttcggaccgtccgtcaccatcgccaccgccggctacccgatcttgcccatcctgcgcgaacaccacactcttgttcctatagcccagaaatcccgcgtctctttcgttgtgacgcgggatttctgccggttgggctatcggttggattgactggtatgtttcagcgaacggctttgaccagtgcctcggtgaggtacttgccggcggccatcaccagcggcgcatagcggcgtccgggggcggcacccatgcggccggtcgggccggaaatcgagatggcggcgatgacctggccggaggcgttgcggatcggggcggaaatcgagcacacgccctcttcgcgttcgttcacggactcggaccagccgcgcttgcgtacggcggccagcttggtggcggtgaacttggcgtggcgcaatccctggtgcagacggtcggaatcctcccaagccagaagaatctgggcggcggaaccggcttccatcgacagcatggcacccaccggaatggaatcacgtaggccggaggtgcgttccacagcggcgatgcacacgcgctgatcgccttggcggcggtaaatctgcgcagactcgccagtgcgatcgagcagggtctgcaggatcgggccggcggcggtcagcagacgatcctcgcctgctgcggcggcaagttcggcgaaacgggagccgagtacgaatcggccatgctggtcgcgcagtacgaaacggtggcgttccagtgcaatagccaaacgatgtgcggtcggtcgagcgagaccggtggcggccacaagctggcccagcgtagacgggccggattccagtgcgtcaagaatctttacggttttatcaaggacgccaacgccggaatggatttccccatcgtccttggcggtggtgtcttcaaccggctcggactcggtcaagctgttgttcaatggttcttcccgggaatcagtcataataagggcgattatgccatctcacatagtgaaatggcaaattggggaagtgtctcacagggtggccatgaagttgaaagggcgttcgtggatgccgaagagacatgtctggagcggaaccgagtcatgactaggtcatgttcgagtcgggtccgagtcatattgaggccatcatttgaccgtatctcaatatccggcatgctcatggccgggcccatcgcaagcacataggctaataccacgaacaaggcgcgaacacaatacctcgcgcggaattttttggaggaatcactatgggaacgacactggccgagaaggtctgggccgatcatctggtgcgcaagggcagcgacggagctcctgatttgctgtacatcgatctgatgctcatgcatgaggtcaccagcccgcaggcgtttgagggcctgcgcttggccggccgcaagccgcgtcacgtggatcagctcattgccaccgaggatcacaacacgccgaccgttgatatcgatcgcccgaacccggatgagacgagcgcgttgcagttgacgactttggagaagaactgcaaggagttcggcgtgcgcctgcacccgctgggcgacgccgatcagggcatcgtccacgcgttcgccccgattctgggcctgacccagccgggcatgaccatcgtgtgcggtgattcgcatacgtcgacgcacggcgcgttcggcgcgctggcgttcggcatcggcacttccgaagtcgaacacgtgatggccacacagacgctgtctctgaagccgttcaagaccatggccgtcaacgtcaacggcaagctgcccgcggacgcgacggccaaggacatcattctggcgatcatcgccaagatcggcaccggcggcggccagggttacgtgatcgaataccgtggtgaggcgattcgcaacctcaccatggacgaacgtatgaccgtgtgcaacatgtccatcgaggccggtgcgcgtgccggcatgatcgcgccggacgagaccacgttcgagtacctgaagggccgtccgcacgcgccggaaggcgagctgtgggatcaggccgtggcgtactggaagacgctgaagaccgatgacgatgccgtattcgacaaggtggtggatattgacgccaccaagctcggtccatatgtgacgtggggcaccaaccccggccaaggtctgccgatcaccgcctccgtgccggagccgggcaagatcgccgacgccaccaagcgcgccgccgccgaacgtgcgattacatacatgggtttgaagccaggcatgccgatcaaggacatcgccgtggacaccgtgttcattggttcgtgcaccaacggtcgtatcgacgatttgcgccaggccgccgcgattatgaagggccaccgcaaggccgagaacatccaccgcgtgctggtggtgccggcctcctcccgcgtgcgtttgcaggcggagaaggaaggcctcgataaggtgttcaaggactttggcgccgaatggcgtaacgccggctgctcgatgtgcctgggcatgaacccggacaagctggtgccgaacgagcgctcgatttccacttcgaaccgtaacttcgagggccgccaaggcaagggctcgcgcacgcatctggcgtcgccggccgtagccgccgccaccgccatccgcggcacaatctcgtctcccgccgatctctgagccaatacacgtgagccccctctgacgaggggctgtcagtcgaagactgactgggggagagatccccgaaaggaaaattgttatggaaaaactcaccacactgaccggcgtgggcgtgccgctgcgccgctccaacgtcgataccgaccagatcattcccgctgtgttcttgaagcgcgtgaccaagtccggcttcgatgacgccctgttctacgcatggcgccgagacccgaacttcgtgctcaacaagccggaatacgccggtaagggccagattctggtcgccggccccgaattcggcatcggctcctcccgcgagcacgccgtgtgggcgctgcacgattacggtttccgcgtggtcatcgcgccgagcttcgccgacatcttctacggcaacaccgccaagaacggcgtgctggccgcgattatgccgcaggagtccgtcgaactcctgtggaagctactggaggaagagcctggtcgtgagatgactgtctcgctggagacccgcactgtcacttgcggcgacgtgaccctgccgttcgaggtcaacgattacgtgcgttggcgtctgatgaacggctacgacgatatcgatctgacgctgcagcacgaggacgacatcgccgcctacgaaaagatgcgcgccgaaaagttccccttcaagcccaagaccatccccgccaaacactgggccgaagaaagaatcgagtccgcccgcgagcctgaggacgcagactggatagggccgttggccgatcgcggcattatttagccgcgatcggcctgctgaaagcccggtgggctttcagcaggccctgtgccgagctgcgacagcagcgaggccagcattgagcctcgccgaaaggcgagtccataattgcaggcccagggccgttggctctgtgtctgattgagattattgggtcgctcgcatcgcatcaaacaaaggtctcactggtgcccgcgccccacatccattgcgcggcgggcaggagttgcggcaatattcccttcagcgccaacaacgccatacggtcgttatccaccgcagccaccaacatcggcgtggcggcgctttcctcaacactcatgaactccgtcctagcgttcgaaatactgtgcctgaattcgtacacatttgtggacataatcacgattcatccagtaatgacggttaggttgagcatcatgaccatgaatgacatgaatccgtcgaacgattccgatacggctccggcgcaatcgctgtcagcgcaaccgttgccacctcgaccggcaccgcagtctgcggcacagtcacagacgccgatgccacagacgccacagtatgttcagcctgggccgagcatgcagccgcaatatgcgggtcagccggaggcatgggcacaaccgctacctccacaagatgtttcacggggtgttccacggattgtttcacaaggtgtttcacaacctgtgccgcaagccgcaatacctgctgtgcagcctgcacaatacgccgcgcagctcgtatacccgacatatcccgtccaacctacgtatcctgcccagccgatgtatcccacgcagccgacgtatccggcgcaatccgcctattccccatacccggcgcaacagtcggctccacagcccctcgctcatccgtactacgctcaaccagtgggctacgcgccacaaccctattccgctgcgccgcaaccattcgtgcaaacggctccggcaatgccagtcacaatgcccaacgcaatgcctgccacgatgcccgcagcaatgcccgtggtcatgccgatcgatcctcgccgtgtatggcgcacgtggcgtcgcaaggtggtcaatcgtgtaatgggactgactctcgcctatgaaggcatgatgctcttgggcgcaatggtcgccaccattatcgtcggcataataaccgcgagcgatttgtccggcgtgcagtgggatggcatcatcagcctgatatcggtgttcgtcgcgttcggatttctgctgctcatgcgccaccgtgacatcttcacctgcgaattctggcttggtggccagcatcgcgactcgtacggggagcccaatcagcttggccacatcagccaatatggcggcgggcgcatgcagcctctctgggcgttgatgttcatcgtgctgggcatgggtgtgcaaggcatcgttatgttggtgcaggtcgctttttccatgctgggcaccgatcttgcctctcccacgtcagacagcatcgccgaatccagcgtcaccgtaagcatgtggctgtacgttgggctggtcgctccgatttgcgaggaagtactgttccgcggcgtactgatgaaggagctcaagccgttgggcaagaacttcgccatcgtcacctcggcaatggtgttcggcctgttccatgacgacgtagtgcaaggcacattcgcgttcctctttggcctgattctgggattcgtggccatggaatactcgttggtttggtcgattgcactgcacatcttcaacaatgcgattctttccggcgccatcgatacccttgccggcaactatcttgatgacaacgcatatttgatattctcattgtcgctatctgtgatcggcgtgatcggatcgattatcatattcgtgatatacggcaaagagatgcgccaatatcaccgtacgaatcgtagtattccagacacgtactttggctgggcagctccgacgttcatcatctttgtggtagccaatgccgctttcgccattatttcgtttgtcggcgcgatgatgggttgagtgtgcgtgtgcgcatgcaggttggcttatcgttgaagcatgagtgattttgagccgttttacgatgtcagccgcagttacgaagacaactatgagcaagggccgttcggcgcgttcgccgaggcgctgaaggatggcaacggtgccgatgccgccggaaccaccagcgagggtgcctccgagggtgccttggccacctttttgggccagccggtcaacctgcctttcggcattcccgcaggcccgctgctcaacagccgtttcaccacggccgctttccacatgggtttcgatctggcgacctacaaaaccgtgcgttcgcgcgcctggggctgcaacccgttcccgaacgtgctcgccgtacaccccaagtcggcggacggttcactgacgccgggcagcgccgaactggacgaaggcgtgctggccgacaccaactatgaacagccgatttccatctccaacagcttcggtgtgccctcgcagagccctgacgtctggcagccggacatgcgcgccgccatcgaggccgccggtcccggtcaagtgctggtcccgagcttccaaggctcgcgtgtggagggcatgagcgaggaggaatacatcgccgaccatgccactaccgcccgcctggtcaaggagaccggtgccaagctcatggtgatgaacaccagctgccccaacgagggccacaaccgcctgctatgccacaatccactgctcgtgggccgcatcaccgaggccgtgaagcaggagatcggcgacatcccgctgatggtcaagctcgcctacatccccagcgacgacgctctggagcttatggtgcgttccaccgtgggccacggcaccgtgcagggcttcagcaccatcaatacgatttccgccaaactggtcgatgccaatggcaatcaggccctgcccggcgcgggccgcgatcgctcaggcgtgtgcggcaatgcgattcgtggcgccggcctcgacatggtcgcccgtctggccgcgattcgtgaaaagctcgggctcgatttcgcgatcaacggcgtcggcggcgtggtctcgcccgccgactaccaggcgtaccgtgacgccggcgcggactcggtgatgtccgccaccggcgcgatgtgggacgccgaactggcccacaagatcaaggccagccggtaaatcggctccaagaacaagcaacagcctgtacgggccgtgattcccagacgattcccagacagtgcccatgttgcattgaaactgttgctgttatatgtaatcacggccgaacaagctgcataacttaacctctttcttcttctctcctttctctccccggcgcccatcacgccggggtttcttttttgcggtgggtacagccgtcttactcggccgccgccttcatggccacggcgccgacgtagtagaccggcttgtcgaagttcggctggaacaggaagtccacgttggcgagctggtcgatggtgaagccggcctgaatcgccatggaaatcacgtttgccgcgccggagatatcggccttggaacagaactggccgcccttgaccttgcgggtttccgggtcccaggtcagaatcgacgtgactggggtggtggtgagcatgaagtccgggcgataatcctcggtgagcgaggtctcgcggaccgtgagcccgcggcgttcggcaccggcgcgggtcaggccggaggcggcgagcgagagatcgtacagctgcacggcggacgtggcctgcgtgcccatgtacttcacggtcggcgtctcgatgttgcggcccaccagcaggccctggcgcaccgcgttggtggccagcggaatgtaatcgtgctggccggtggggttgtagaacacggtggcggagtcgccggcggcgtacacgcccggcgcggacgcctgcatgtagtcgtcgaccacgatcgcgccgttcggcagcatgtccaccttgcccttgagcaggtcggtgttcggcaggaagccgacggccagaatcgccatttcggccgtgtactcgcccttttcggtgaccacagtgacggtgtcgtcgtcattgtcgcggaactcgaccaccttctggccgagcgcgagcgtgacgccgtgctcctcgaacacggccgccacctgatcggtgatggtcttatcgaaattattggccagcgggcgatcaaggccgtcgaccagcgtggtcttgacgccggtgacgctgaactgctcggcgatttccgcgccgatatagcccgacccgatcaccactgccgacttggcggttttcgccttttccttgatggcgatggcgtgatcccagttcttgcacagcagcacatgcgggctgtcgatgccggggatcggcgggatgaccgggcgcgagccggtggtcacgaccagtttgtcgaaagcgagggtctgttcggtggggtctccggcctcgtccagcgcgcggtaggtgagggttctggcgtcgaggtccacggacgtcacgtcggtgcgcatatgcatggtcgcgccggcttcggccagagcggcaggggaggagtagaacattttcttcgggtcggatacgtggtcgcccacccacagggcgatgccgcaggagaggaaggacagcgtaccgttgcgctcgaaaacatggacggtccaatcggggtgctcggcgagaatcgaggtggtggagaacgtgccggcgtgcgtgcagccgatgacggcgactgtggtcatgaatgctcctttgcttgtggccatggcgtctgatgccattgccctgaatcgtagcgtagaagtatggagaacgccgtggcggcaaatgtgaggaagatcacgttatcggtttgattcgacggggggtatgggatccgttgtgcacggtgatcaaagttcggctggggtgcatttcacggagtcggcacatggcttatggcaaactggacggtagcattttttgaatcttgattgattgaggagagtggcgtggctgagaatccggatgacgtgttgcatgtcgagggcggcaagcctttgaatggcacgatcaaggtgcgtggcgcgaagaacttcgtgagcaaggcgatggtcgccgcgttgctggcaccgggcaagtcggtgctgaagaacgtgccggagattcgtgacgtgcatgtggtgtccgatttgctacgtctgcacggcgtggacgtggatgtggacggtgcgaacggcattgtgaccatcgacgcctcgcgtgtgcagctggccgatgtggccgacgtggatacactgtccggttcgtcgcgcatcccgatcctgttctccggcccgctcgtgcaccgtttgggtgaagcgttcattcccgcgttgggcggctgcgcgattggcggacgtccgattgacttccatctggagacgctgcgcaagctgggcgccacggtggacaaggaacacaaggacggcatccacatcaccgcgcccaacggcctgcacggcgcgaagatccacctgccctacccgtcggtgggcgccaccgagcagactttactggcggccgtgctggccgagggcaagaccgaactgtcgggcgcggccactgagccagagatcatggatctggtgtgcgtgctgcagaagatgggcgcaatcatttctgtggacgttgatcgcaccttccgcatcgagggtgtcaaggaactgcaggggtacacgcacacgtcgctgacggatcgcatcgaggcggcgtcctgggcgtccgccgcgctcgccacgcacggtgacattttcgtcaagggtgccacccagccggagatgatcacgttcctcaacgtgttccgcaaggtgggcggcaaattcgaggtgacggacaagggcattcgtttctggcatccgggcggggacttgaagcccgtggcgatcgagacggacgtgcatcccgggttcatgaccgactggcagcagccgctcgtggtggccctgacccaggccaacggcctgtcgatcgtgcacgagaccgtgtacgagaaccgtttcggcttcaccaagccgctggtcgagatgggtgccaccatccagttgtaccgcgagtgcctgggctcgctgccgtgccgtttccggcagcgcaactacaagcattccgccgtgatcttcggaccgaccccgctgaccggacgcgacatcgacgtgccggacctgcgtggtgggttcagccatctgatcgcggccttggccgcgtcaggcccctcggacgtgcacggcatcagcctgatcgaccgaggctacgccgacttccgcggcaaactcgaagcgttgggtgccgacttcgattaattcggccgttcctcggctcccctctctgaggggagccacaatttttacaacagcccgtccgcctcaagtgcggcggccatgcggtcgaagcattcctccagtagcgggtagggcatggcgaagttcatgcgtacgcatccatgcccgacctcgccgcattcgcggccgtccgtcaacgccacattggctttcttgaagaaatagtcggccgggtcgtcgatgcccagtgacgagaaatccagccacgcgatatacgtgccctgcggctccacatagcgcaccttggcgaatctcgtgcgcatctgctcgttgaccagcgcgatattgcgctcgatatatgccatcacgccctcgaaccatgccgcgccgccgtcataggccgcagtggtggctatggcaccgatggtggccgtctggtgctcggaccattccgcgttcctcatccacagttccagatcgtccggattggtgagaatcacctgcgcgcacttggtgccgggaatattgaacgacttcgaggctgaagtggaggtgaaagcctgcatggccgtctgccggttgattgaggcgaatggcacatgcgtgtggccttggtagacgaacggcgcgtgaatctcatcggagaatatacgcacgtcgtacttggcggccaggtcggacaatcgcagcatttcctcgcgcgtcaataccttgccgatcgggttgtgcgggttgcacagcacgaaggcatggcagccgttcgcgaacgcctgctcaatggcgtcgaaatcgaacagccattcatcattgcgcccgctgctctcgccggcgccctcgcacagcatcggaatctcaagaacctccacgccatacaggcgcggcacgctcaggaacggcatataggccggagtcggcaccacgatggagttgccggcgcgcacaatctcgcgcaggaacacttcgaacgcctccagcacgtccggcaccggacggatgcacgtcggatccacatcccagccgtatcgacgctgccatgcggcgcacgagcgggcgacctccttcttccacgggtcgggaatgtagccgagcgcgccacgttcggtggcctcttcgatggcttcggccacgcacggcgccagaccgtaatccatctcggcgatgaatgcgccgatgcagccggggtagcgggtccatttgtccgaaccgacctgcttcagatcttcgatggtcgtcacgtcgatgtgattggcatcaaagcaagaggcaccggcggttgcgctgctcaaagtcgttgactgggaaacgttgttcatgctcataacatgtcattgttcctggtacagaagggctgctcaacggtctggctccccgaaatcgtgatggcgttcgcaagcttgcttatcgctgtccgactacttggcactcaaatatttgagtgacgtgcgctcgagctcttcgagcaatgaaccgagcgcgggacgatggtcgccggcacgagtcacgatgccgacctcgcgcgccgcaaaatcgtcggcgatgggacaggccaccagatcgccttgcagattgatatgtgtatcgagcgccggcaccagcgagacgcccatgccaacctcgaccaggttctgcgtggcccagtaatcatccgtgcagtggcggatatccggcttgaatccggcacgggtggccagtttcaccaaatttgcgcggcaggtggggcagccggcgatccaatgctcgtctttggcggcggacagcggcacgggttcgccggtctcctcgaatcgtttggcgatgtcgctggagcggcggaccaacaatcgcatcggatcgtaacccagcgactggaaggtcagatcgtcgccgatgtgcaggaagttcgggatgctgctgtaccggaacacggcggcggcatcggccttgccttgggaaatcagaccgatcgcctccggcggctccatctgaatcaggctcagctcgatgtccgtgaacatactgagcttgaccacggtacgggccgcgatagtagagcagattgacggtggggccaccaaatgcaggtgagcaaaccgatgatgccgataatcctcgacctcacgggccgcccgctccagccgatcggcgatggcctcgccgtggcgggcgagcatcgaaccggtggcggtgagttccacaccatgcgaggtgcgttgcaccagagtcgaaccgcactgtgcctccagctttttgatctgctggctgatggccggctgcgaccaacccgtggccttggccgtggcggagaacgaaccatactgttcgatctgccacaacgtgaccaatgattgggggttgagcccggccatatgcacctctttcgcgcgtcgttccattatggccgccgacaatgaccggacgcggcatggtgtcgccgtcgccggtatccttagaagaatgagccctgaagccttaagtgaactgatttccagcattgcccacaacctcgtcgccgccggccaggccggtacgctgaccgacgagctgattccgcccgtcgacaagctcgccgtgatgcgcccgaaggaccgcgcgcatggcgactgggcctccaacatcgccatgcagctggccaagaaggccggcatgaagccgcgtgatctggctgagccgttcgccgccgcgctcgctgaagccgacggcatcgccacggtcgaggtggccggccccggcttcatcaacatcacccttgattccgcctcggctgcagccgtggtggatgccgtgcttgccgcagccccagcagttgatggcgacaagcacctcaacaaggtcaacgaatacggccgtaatgcccatctgggcggccagaccctgaacctcgagttcgtttccgccaaccccactggtccgattcacatcggcggcacccgttgggccgcggtgggcgacgccatggcccgcgtgcttgaggccaacggcgccaaggtggtgcgcgaatactacttcaacgaccacggcgagcagatcaaccgcttcgccaagtcgctggtcgccgcttgggctgaggccaacaacctcggtgaggccggctaccagaccgaaaccccgtgcgacggctacaagggtgcctacatcaacgagatcgccgcccgtgttcaggccgaagccgagtccgacggcgtggacctgaccgcactggcccaccaggatcaaggcctgaacgacgacggcgaaccgctcggcgaggccgacaccgaagtgcgcgaggaattccgcaagcgcgctgtaccgatgatgttcgacgagattcagaagtccatgaaggacttccgcgtgaacttcgacgtctggttccatgagaacagcctgtacgccgacggcaaggtcgacgccgccatcgaagagctcaagtcccgcggcgacatcttcgacaaggacggcgccacttggtttgaatccaccaagcacggcgacgacaaggaccgtgtgatcatcaagtccaatggtgagttcgcctacttcgccgccgacatcgcctactactgggacaagcgccatcgcgccgaaaacccggctgacgtggccatctacatgcttggcgccgaccaccacggctacatcggccgcatgatggccatgtgcgcggccttcggcgacgagcccggcaagaacatgcagattctcatcggccagctggtcaacgtgatgaaggacggcaagcccgtgcgcatgtccaagcgcgccggcaacgtcgtgaccatcgacgatctggtctccgtggtcggcgtggacgccgcccgctactcgctggcccgctccgactacaaccagaacttcgacatcgacctggccctgctcgcctcgcacaccaacgacaacccggtgtactacgtgcagtacgcgcacgcccgctccaagaacgtggaccgcaacgcagccgccgccggcatcagctacgagggtgccgacctggccctgctcgacaccgaggccgacggcgaggtacttgccgccctcgcccagttcccgagcgtgctcgccactgcggccgacgaccgccagccgcacaaggtggcccgttatctcgaagagctggccgccacctatcacaagtggtacaacgtggagcgcgtggtgccgatggccctgaccgatccggaaacccgtggcgacgatgaggctcgcaaggccttggtgatcgccaagaatccggagccggcccgtgccgccgcccgcctgaagctcaatgacgccgtccagcaggtcatcgccaacggcctcgacctcctcggcgtcaccgcccccgagaagatgtgattatgcctatttctccaatttggccggccgctacggctgtgaatgccgacggtgccattacattccacggtcgtaccgccgaatcgctgcttgacgagttcggctcgccgctctatctcatcgacactgatgaagtagtcgcacgtgccaggcacttcgtgcgcgctgccgccgaagcattcaacacatccactacgcacgtgagctttgccggtaaggcgttcctgtccaaagaaatcgtgcgattggtcaccgaggccggcatgttcgtggacacctgcacgatgggcgagatgaaaatcgccctcgccgctggcgttcccggacgtcgtctggtactgcacggcaacaacaagtccgatgaggaaatcgcgctggccatcgaacagggcttcgccaaaatcgtgattgacgagcccgacgagccggagcgcgtcgccgccatcgcccgcaggctcggcaaacgcgcccgtgtgatgctgcgcgtcaccgtcggtgtccacgccggcggccacgagtacatctccactgctcacgaggaccagaagttcggcgtgccgctgctggccgccggggccgacgccgccgtgctcgatgtgctgaacgacctcaaagacgtgacgcctgccgttaccaacgcgcgtatctctgcgacgcattccccggaaaatggcgcggaaaagaccgagaaatcagagcgcgagctgcactacgacgtcaagtacccgtacgacctgagccacgaggaagtctccgacacagacaaggcgctggccgccgcgatggaagccattgcggacggtccgtccatcgccgtgctcaagaccatcctcgccgaccaggacgtactcgaactggtcggagcccactcgcacatcggctccaacatccacgatgcggacgccttcattcacgcggccaagcgcatgatgctgctgcgcaagaccctgtgggccaccgacgcctacatcctgcccgaaatcgacctcggcggcggctactccgtggcctacaccgatggcgaagattcaatggacattgacgtggaactcactcgcttggcggatgcggtcaacagcaccaaccgtgcgctcggcatgcccgcgccagccatcagcttcgagccgggccgctacatcgtggcacccgccggcgtaaccctgtaccgcgtgggcaccatcaagcacgtgcacttgtccgatgccaaagacagtgccggcaacccgattgccgagcgcgtgtacgtgtccgtggatggcggcatgtccgacaacattcgcccggcactctacggtgccgactacaccgcgcgtctggcgaatcgcaccggttccgctgaaacgatgcttgcccgtgtgtgtggcatgcactgcgaatccggcgacattgtggttcacgaggtgcagttgcccgccgatttgaagcgcggtgacattctcgccgtgccggttaccggcgcatacggccgcaccatggccagcaactacaaccaggcgctgattccggcggtggttgctgtcagcgagtccggcgcgcacgtcatgctccgccgccagaccgtagacgacctactgaacctcgacgtcagcgagtaatcagcgtgcagaggtgagcgcctgacagtctgtaatgtgcggccaaaaccgtcataatacgaaaagggccgtcagcttgatgagtactttcggtctgctgtcggaaataatccgtaaaataggcgtgggatatagaaaactttttggaaggaccctgaattggctcacaacagcgaaaccccgattcgcgtaggcctgcttggtgccggcaccgtcggctcccagaccgcccgcctgattgtcgagcagaaggacgaactgtccgctcgtatcggccgcccgatcgaactgaccggcgtcgcctgcctcgacccgaaggaaaccgagaagttcccgtggatcgaccagtccatcgtcaccaccgatactttgagcgtggccaccaactcggacatcgtcatcgagctcatcggcggcaccaccgtggcccgcaagttcgtgcttgccgccatcgaatccggtgcttccgtggtcaccgccaacaaggcgctgctggccaagtacggcccggagatctactccgccgccgaggccaagggcgtcgacatctacttcgaggccgctgtaggtggtgcgattccgttcctgcgcccgctgcgcgagtccctggtcggcgacaaggtgaccagcatgctcggcatcgtcaacggcaccaccaactacattctcgacgagatgaccaccaagggtctccagttcgacgacgtgctcaaggacgcccaggccaagggctacgccgaagccgacccgaccggcgacatcgaaggctacgatgctgccaacaaggccgccatcatggccaccctcggcttccacacctccgtgaccatcgacgacgtgtccgtcgaaggcatcaccaagatcaccgccgacgacatcgccgccgccaccgccgagcacaaggtcatcaagctgctcgccgtggtcgagaacggcgaggccggcgtctccgcccgcgtctacccggccctgatcgacgagaaccacccgctggcctccgtgcacggctccttcaacgccgtgttcgtcaaggccgaggccgccgacgacctcatgttctacggccgtggcgccggcggcgctccgaccgcctccgccgtcgtgggcgacgtggtgaccgaagcccgccacattgctgctggctgcaccggcccgtccatcccgctgtacaagaatctgccgaaggctccgattaccgcctccaaggctgcattcgccgtgcgcttcctgatccacgacaagccgggcgtgctggccgccatcgccgccgagttcgccaagaacggtgtctccatcaacggtgtgaaccaggatctgaagcccaccatgaccgaccccggctacgacggcgagattcagcagttgcgcatcgtgacccacctgaccgacgaggaaaccctgcgcaacaccgtcaaggccgtgcaggcgctcgacttcgtcaccggtgacccgtccatcctgcgcgtgctggactgacaccgtctaggctccctctgatgaggcggtcgaacggctgcccgtgagttgaaagctgaatacccaagctcccctgacaaggggagctcctttttaaggaacaaccatgaacccaatctgcaatagcgttcacgtgcgcgtgcccgccacgtccgccaacctcggctccggcttcgataccgtgggtctggcgctcgactaccatgacgagctcactttcacgctcaacgacgacccgaacgacggcattgcccacgtgatcatccacggcgagggtgccgacaccctcccacgcgacgaaacccacctcgtggtctccaccttccgccgtgcctgtgccacgttcggcctcggccgactcggcttcacgctggaagcgaccaacaacatccctcaggctcgtggcatgggctcttccgccgaggccatcgtggccggcatcgccgccgccgcggccttcgcccagaccggtgacctcaaccgtccggccatcttcgatatggccgcccagatcgaaggccacccggacaatgtggccccggctgtgttcggtggcctgaccgtctcttgggacttcgaaaccgcggaaggcgtcggctcggtcgccgttcctggtggtgaaccgctgcacggcggattccacgccgtcaactacccggtggacccgtccatcaccgccgccgtgttcgtgcccgactatgagctgtccactgagaaggcccgtcaggcgctgcctagggaactgccatacaaggacgccgtctacaacgtgtctcgcgtgggtctgctgcccgctgcgatgaatcccgtggtgctggcccaggccgcccagcagggcaggtccggcgtcgccgctgccccggctcaggataccgatacgtgcgcttgcgctgacggaacccgtgaatcggcattcgccgacgagcttgcggccgcccaggcccagtccaacgcgctactgttcaccgccacgcaggacaagttgcaccagccgtatcgcggtaccctgatgccgccgtccaccgagctcattgcgctcttccgctccaagggctatgccgccgcagtctccggtgccggcccctgcgtgctcgtgctgcactacggcaacgcccgcgaagccatcgaccagatcgcatcggagcagcttgcttccggccactggcgtgtgcttcacctgcccatcaacaccgccggcgtcgaaatcgagcgtcgctaagtcgaggagaaggctcccgctggcgggagctggccgccgcaggcggtctgagagtggtccgccataccggcagagaccaccctcagtctcacttcgttcgacagctcccgccagcgggagcataaggacttaagtcatgtccattccgctaattcttgcttccaagtccaagcctcgccgtgacgtgctgtattcggcgggtatctgccccacaattcgcgtctcgcacgtggatgagcctgctgcgctggaagcggccgcccgtgaggaaggtgtcaccgtcgacgatttgagcatcaagcagcgtgtgatgattcttgccgcagccaaggccgaggccgttcaccgtgcgtatcgtgatgtggccgatactgccgccgccgcgaccggtgaccgcgtgatcgcctacccgctcaaggccaaggagatcaaggattcggaacgcgaagctgccgtcgaagacctgcgcaaagccgccgccggcaagcccatcgactattccaaggcggaaatcgccaccacgcgcgacttctccggcatcgatatgccgaccgtcaccgaacccatcgccaccgctattgccggacagccgggactgaccgaggcgacagtcggcccgctgattctcggctgtgattcgatgttcctcttggacggcgaatgctacggcaagccgcacagcgaatccgtggcccgagaacgactgaagcgcatgagcggcgcgaccggcgaactgtggaccggccactgcctgatcgatttcgcgaccggacgtaccgtgcgcggcgcaagccacgccaaagtccatttcggcgaattcaccgatgacgacatcgaacggtacattgccaccggcgagccgctggaagtcgccggatcgttcacgctggaaggcttcggcggcgcgttcatcgacagcattgagggcgatccgcacggcatcatcggcctcagcctgccgttggcccggcatctggccggcgaactgggcatcacgtggaccgacctgtggaatgtcggccgtggcgaactggagccggaaagcaaggcctcgggcaaccagcacgctggcattctgccgccggtcgaaaacgtgcatcagcccggcgatggctgggtggactgcgcctgcggccgcaagcattggggcaccaacggtgcgtccggcattctgctggctcgccgcgacccggcgagcggcaaggtgactcacgtggtcatgcagcaccgtgccgcgtggagcgccgaaggtggcacgtggggtatccccggcggtgccactgcggacggcgaatcgtccatcgaaggcgcgctgcgcgaaagctacgaggaagccaacatcacccccgaagacatcgaggtggtcggctcctaccgcgaggaccatggcccgtgggcctacaccaccgtgtttgcctttgaaaagcccggccacaccgtcgagcccaaggcaaacgacgacgaaagcatggaaatctgctgggtcccgattgacgacgtgcccaaccgcaagctcctcaccgctatgaagaccgactggccccgcttcgccgcccgcctggacgagctggcctgtgctggacatcggtagtggtgttggctgggccaatgttttgccgatgagtttacttgggtaatgcgtgtgaaccgcgtgtggaccgggacggattctgctgtcccggttcgtcatttcgtctcttttgggacaaccgggacagatttcgctgtcccggttcgtcattttgcctctttttgggcaaccgggacagaatctcattcacctgacgccctatcgtgcgatggtcgccgtcggggaatggcggaattccggggttttggatttgcatatatcgggtgttcatggaagggcctgtcccggttcgccaaaagaggccgaaatcccgaaccgggacagccgaatctgtcccggttcgtatgtcgatcgattgaccccgccaccgggacatcaaccgcgcatagacaggacgcttcaatgtctggcgggcatgaccatatcggatgacacacgttccctcgtgcgtttcgccacgacctccgccccaagtcagtgcgaaaatggcatttttagcggtgtggtcagctgtcgcatgcggaaaatcctaaatcaaccgccgaagagacacatcgccgactcggcggaactcgctggtctgcgcgcaatgaggagtgttgtgtctgaatgcgattcagacaatggtcggcgtcaaatagcggtctccagccattaatcattggtgattgtggacattgagcggagtaaacattctagatgattcagggatatgccgaaaatcatatcgttcagagaatgaaataccgcatctcggagtaactgactgtcgacgtgcatggtttgaaatctgatatccaccacgcccatcatgcctagcaaaattacgggaatggggttcggactatttcgcctcagccaaccgggagcttccgaatgctcaatgctgtatgcacttagtgtgtggaaaccagccaatcattgaccaatggcaggccgcagtcgaaaccagaaatatcctcgctcgcagtcaggtgccgaggctcagtgaagttggtcacgtccatatgggatcacgctccaacaattcattcagacgtaggcccataggttcgtttaatgctgcggtgaaatcattccacgctttactgttgagccgaatgatatgagcttcatggatgtcccgatctgcggcggcgagcagattcgataatgcccattgcaacgaagtcatgcctttggactcggccgcttggtcgattctggaacgttgctcttaggtgagtctcatttcaaaacgactgttcttgttattctctgtagtcgtactcctgttgtacgacttttgtacggacacgattggtgtgtgcgggatgtcgattgcgatggccatgtgggctcctttgcttggtctgttgtggttccagcttccgaaccggtcttccactgttcctcgtcttctcgagcaatgaacatctgatatatggattgtcgcgtcgactgcgtatctctaatccttgcggatgaggagcgggccggtgatccagaaaggttcataccgcagcccgatggtcggctgggcgttcgctccgtacgctcgggagtatgaacacagcagcatcgcaattgcagcagcctcagccggcgtcgggaccggcggctcagcctcagcagtctcagcaaccccaacagttccagcagccggcatcgcacacccagcagtgggccccggtcatcgaggcgcacgacctggtcatggactacaccgccagcatggcccgcgcacaggcagggcacggcgtcaccggcgtgatgccagccggcacgggagccggttatgcgtcggcgaatcccgctgcggccggaccgggtgccattcaggccggccagccagcccagccagcccagcccggcttcgccatgccgaccatgcacacgctcgccctgaaccacgtgaacttcacgctccgggagggtgagacagtagccgtgatgggcccgtccggctccggcaaatccactttgcttcacgcgttggccggcattatcaagccgactgccggcacggtcgtcttccgtggcactgacctgagccatatgagcgacgccgaccgtaccaaactgcgtcgtaatgtcttcggattcgtcttccaatccggccaactgctgcccgaacttccggccgtcgaaaacatcgccctgccaatgatgctcgacggcgtgccctaccgcaccgccaccgacacggcgattctgtggctggaacgtatgggtttgcgcgcactcgccatgcaccgaccgggggagatgagcggcggccagatgcagcgcatcgccatcgcccgtgcgctcgccgtcaaacctgccgtggtcttcgccgacgagccgaccggcgcgctcgaccaagccaccggccgcgaggtcatgggcattctcatggccgccgcgcgggacaacggttccgccgtggtcgtcgtcacccacgaccccaacgtcgcttcgttctgctcgcgcaccgtgaccatgcaggacggccagctgggaggcgtacgatgagcgctttcgcattgtggcgattgttccatcgccccggctcgcgtggcagtgcgggtcatacttcggtgttggccatcattgcttttgccgcagccaccactatctttctcaccgttttgggcggcgtgcatgggttcatgtggcgcgcctccgccgaccacaccattggatgcgcaatcaatctcgacgcttgcaaacccggaacagcggaaatctggaagcagcgtatcgccaatccccacagcctggatcaatacgctacggcatacgtcgtgctggcgttctttgcctgcctgctgctgattgtgccgttcgtggcgcttgccggttccgccgcgcgattggctgcgtcccgtcgtgacgctcggctcgcatccctgcgcttggcaggcgcgaccacggggcaagttattcgccttacggcgcttgatgcggctgggcaggccttggtgggggcgctgattggcatcgcggggtactgcgtgttgatccccctaatcatgttgctgcatttccagaatcagacgtttacgttcgagcaactgtgggtggggccgattgccttgatcattacgcttgttggcgtgaccgtgttagcgctgatctcttcgctggtcacgcttcggcgcgtggccatcacgccactcggcgtcacttcacgcgttgcgactacgctgccgtccggctggcgtgtggtggtgttcgccgtcatcatggtgattgccgttcttctgttcaagaatccgatggtgctggctcaggccggtgaagtagtgatgtacggcgtgatcatcggtttcatgctgctgtgcttcgcgctggtgaacctcgtgggctcctgggtggtcaccgcccgcgccaaagccaaggccaaacggcccaaggacgcggccacgatgattgccatgcgccgtattctcgacaatccgaagcgcgcctggcgcaatgtgtccggcattgcactggccgtgttcatcgccggcatcacctcgatctgcggattctttggctcggccgccgtggtcggtgacgccaacgacccgtccaccgtgttcattcgcgacatcggcaccggcggcatcctgacgctagtgttcgccgctgtgcttgccgcggtcagctccggtgtgatgcaggccggcagcgtgtacgatcaggccggcgaatatcgcatgctggtgttggagggcactgatgtcaagaccttgaaccgtgcgcgattcatcgaggtactcaccccgctcaacatcgtggtgatcgtggccggcggctgttccatgctgcttatggcccctctgttcgccgcttcgatgaccgaaccggccacgctggccagcttcttcggcgggcttgtgctgtgctatgcgctggtttcggtgggtgcgttcgcgtccaatcgggtggccgccagcttgaatctggccgattatcgggccgatgactgaggcggtacggtactttcccgggtgacgacactggtggggaggatgacgtgcatatcaccctgattgcccttgcggctgtcgatgatcatctgcacggcgcgttgggctatttcgctgaacggctgatgcacgctggtcagggagggcatgagttggccggcggggaaaatgtcgtcgaaccccatgacggacaattgctttggcaacgcgatcttatgctctcgtgcggcacgatacgtgcttactgcagataagtcgttgcagcaaaaaatcgcggtgggtcggtcggtgagttccagcagccggcaggctgcttcatagcttgtttcggcggggaagtagtcgccctgttcgatataggactccggcagatccaccccggcctgttgcagagcggcggtgaatccgctatagcgcgcgatgctggtctgtaggttcgccggcccccggataacggcgatgcgtcgatggccgagcgacagcaggtgtttgccggcctggtatcctgcggtccagttatcgatggacacgctcatcacatccgaatcgacggtatcgattgggtcgatgatgaccacgggaatactgcgcgatttcaacaaagacttcgcttgagtggtcagaccgcccatctgctgcataatcacaccttggggatttctatcgatgatgccgcggaaacagtcttccgtggcatcgccatggttggtctgggtgaccgtgatggcgaggcccgcctgctgcgcccagtatgaggcgtatttgatgagttccatcgtgccgttgtgctcaatgtattcgacgacgagctctatggtgggggagagtttggtgttgaccagaggccttgagtaaccgtgatctttgaggatttgctcgacttgtctccgcgtctcgtcggaaatgcctgacctgccattgatgactttggaaacagtggatgcggatacgccggcgatttttgcgagctcgccgaccttgagcttgtgggtggatgtatcgttaaccatcggtgtttccctcttggatattcgccgttcaattactgagacgatttcgtcgttgttcccaccattatgacgcattgtgccgtaacaattccatgttttcttgccctttgtccggccttgaataaaaattttcgcaaataggcttgcaaatttctttattcggacgtacgatatagccgttggttcaccaaggcgaaggagcccgaacacatgagtaccatcaccaaagtcaagacgtatgacttccgattccccacttcaacgacgctttccggctcggatgcaatgaaccccgatccggattattcctctgcgtacgtggagatttccaccagcgccgacgacggcatcacgggtgtgggattcgtgttcaccatcggccgtggcaacgacgtggtttgcaaggccatcgaatcgatgtcgcaggtgctgattgggcgcaacaccgaggaactgctcgacaacatgcgcattgcatgggacctgttcgtgcatgattcccagctgcgttggcttggccctgaaaagggcgtggagcatatggccatcggcgcggtgctctccgcgttgtgggatatcaaggccaagcgtgcgggcaagccgttgtggctgctgctgggcgagatggagccggaggagctggtctccacgctcgatttccgctacatgaccgacgccctgcgccctgaggaagccgttgcgattctcaaagagggtcagaagggcaaggccgagcgtatcaagcatctgctggaggtcggttaccccggctattcaaccgctcccggttggctcggctactcggatgagaagatggtcgcgctcgccaaggaggagacgcaggtcaagggattcaagcagatcaagctcaaggtcggccagaacatcgacgacgatctgcgtcgcctggccaaggcccgcgaagccatcggccccgacgtgcgcctcgccgtggacgccaaccaggtgtgggatgttcccaccgccatcgactggatcaacaagttccacgacttcgatctggcgtgggtcgaggagccgaccagcccggatgacgtgattggccacgccacgattgcgcgcgccatcaatcccatcaaggtcgccaccggcgaacagatgcagagccgcatcctgtacaagcagtacctgcaggccaacgccttcggcatcatgcagattgacgccacccgagtggccggtccgcaggagattgtgctcgaatacctgctggcaaagaagttcaacaagcccgtctgcccgcacgccggcggcgtgggtctgtgcgaggccgtgtgtcacttcgcgatgttcgattacgtggccgtgtccggcacgatggacggccgcatgatcgaatacgtcgataaccagcatgaacatttcgtccacccgaccgagatcaaggacggcaactacgtcgctccgaccgctccgggcaacggtaccgaaatgacgctggagacggccgagaagtacctgtatcgcggctgaccgcaactggaaattcataaccgaacaacacaacttaacacaacaacacacaactactccggctggggtgccgaagccccggccgggcgtgacatggaacacccatgaaacgcagaataaggatggacgaaggagttcccatggatctgcatctcgaaggcaaagtcatcatcatcaccggcggtttcaaaggcatcggcaaaggcatcacgctgcaactggcccaggagggggccatcccggtggtgattaatcgacccgacagcgctctcgacgagttcaagaaggatatcgagcagtacaccaccacctatgatgtgcacttgcttgacctcaacgacaccgacaagatcgccggcgtcgtcgaagcaacatacaagaagtacggccatatcgatggcattgtgaataacgccggaaagaacgacaacaaggatctcgagaccactacttggcgtgagttcgaggaatcgcttcacggcaacctgactcactattacgagctggtccacgcggccgtgccgtatctcaaggaaagccgcggatccatcgtgaacatctcgtccaagaccgcgcttaccggccaaggcaagaccagcgcctatgcggccgccaagggcgcgatcctgggcctgacccgtgaatgggccgccgcattggtgcacgatagcgtgcgtgtcaacgccatagtcgtctccgagtgctggaccccgctctatgccgattggatcaagacctttggcgatgaagcggcccagcaggcgcgcctgtcggtgatcaccgacaagattccgctggaacatcgtatgaccaccaccgaagagatcggtaatgaagcggcattcctgctctccgaccgctccagccacaccaccggtcagtgggtgtacgtcgatggcggctatgtccaccttgaccgtgcgctgagctgacaagcagccctttcccgaatattcgcgcggcaattccggagctttgatcattgctccatccgtacgccgtatccgcgtatgccgcccgtatcacccgcgccctgggtcatccgtttaccaacatggcccagggtggtccacttctcgctaggcaatatcggggaaactcgtatcactaaggagtcaatgatgacatccaaaaacacaaccggttccaaggcgaccatcgccattgtgctggtgacctcactgttctttatctggggtttgaccatgaacctcgtgaacgcgttgaactcgccgttcgcaaactacatagaactcagcagcgccgaagcgtcattactgcaggtggcctattacggcgcatacttcgtcatggccattccggccggcttgatcgccaagcgtttcggttataagggcggcgtcatctccggtctgttcctgttcgctctgggcgcgttcatggtgatccctgccaccagcatggccagctacggcctgttcctgttcgccatgttcgttatcgcgctcggcgcggcatcgctggagaccaactgcaatccgtatatcaccaagctgggtgatgaaaagggcgaatcgttccgtatcaacatggcgcagagtttcaacggcgtcggcaacatcgttggcccgctgattcttggccagattctcggcaccaccgtcgcatcaggcgagtccggcttcgacgccgctaaggcgcagttcctgaatgatacccgcacgatatacattgtgatcggcgttgtgctggtcgtggtgctcgccgtgttcgcgctgttcaagctgcccacgcctccgggagacgaagaggaggccgcgggcggcgcctcctccgagaacagctccttcttcggcctgctcaagcgcccgcacttcgcattgggcgtgcttgccgagttcattttcatcggcctgcaagtggccggcatggcggtcttctccgcctacgcgctcaagcactggggcgcgggcatcacagccggcaccgcggcgatgatgctttccgtgctttccctgctgttcaccatcggacgcttcgccaccaccccattgatggccaaattcgatccctcgaagattcttggcgtatacatgaccatttcagccgtgctgatgttcgtggtattccttggcctgggcaaggtctccgtcatcgcgttcatggtggcgtatctgttcatttccatcggatacccgaccatattctccctgacgctgaaaggtatcaagggttccgcggcgaagaccggttcctcggctttggtgatgagcattgtgggcgccgcgttaattccgctgctgctcggtgtgattcaggatgcggcaggcatcgagatcgccatcctggtgatggtcccgggcttcctgttcgtggcatggtacgcattctggggttccaagatcggtctgaaggaggcctgatatgacactcaacgtaatcgattcccacttccatatctgggatccggatgcgcaggatctgccatggctggcaggattgccctcgctgcaacacaagtacacgattgaagacctagccgcacagtacgccaaatttggcgtgaatttcctcggcggcgtatacgtggaggtcgacgcggccgaccatgagcttgaggaccggctgctgtacgagaatgcaagtcctctgatcttgaagcgcatgttgcaaggacgggtaagcccttggatgcgtgtcccgattaatgccgatggcatcagggaaccgctgcatgtggattccgagccgcggggccgtgcgctcgaacccgaattcatcgccggtctacgcgcgatggccgccaagggattgccattcgagctgtgcaaccgtggcccggagttgggcgacatggccaaggcgttctcgcaggttcctgaagtgacggtcatcatcgatcatctcggcaacgtgcccgggcttgatgaggaatcgtgcgccgcactcgcagcgttggccgaactgccgaattcgtatatcaaggtttccggcgacaacccggtggacccggacatcgtgaaatacgtgcgggacacattcggcccgaagaaggtgctgtacagctccaactggccggtcgtggaactcaactcgacctttgccacgcacttccaactcatgctggacacgttcggcgaggacgaggacttcttcgaaaacaacgcccgccgcgcttacaacatcgactaaacccaagccccctctgatgagggggctatcgtccgcaggacgactgggggagaggccgcaaacccggtgccgcttgtgcggcacccctattccgtgacgaaaggaacaatcatgacaagcagcgccgaattctcaggcatcatctgcccatccatcaccatcaccaaggacgacggtgacatcgactatgaacgttgggggcagcatctcgatcatctgatcgaggccggtatcaacggcgtgctggtgtttggcagcatcggcgagttctatgccttccctctggacgtcaagaagcaggcggtcgacttcgtggccaagcatgtcgccgggcgcatcaaggtgttcgcgggcgtgggcgataccaacttgaacaatgtgatcgacttcgcgcgggcagtcgaagcaagtggagtggatgcgctcgtggtcgtttcgccgtattacttcggccctactgcgggaggcgcgaaggcgtacttcggcgcggtcgctgaagcgacgaatcttccggtgatcctctataatttcccaccgcgcaccggcagcgacttgaccccggagctcgtggccgagcttgccgccgcgcacccgaacatcgtcggcatcaaggacacggtcgacacaatcagccacacccgcaaggtgattcgcgcggtcaaggccgtgaatccacggtttgcggtgttctccggtttcgacgagtactatctcgtcaaccgcgtctccggcggtgatggcgtgatctgcggcatgaccaatgtggagccggagaccttcgttacgctgcaccgtgcatatgaggccggcgactatggcaccgcaattgaggccgccgaacgcatcagccacctgatggcgctgtacgatcagaccgacctgttcatctccgccatcaagggtgcggtcaaggccaagggactgaacatttccaccctgatccgtgagccagcggtgcaactcactgctcagcagtatgaggcgattaaggcgattctcaagtagtgtatatctcaggcttccgcggaatcctacggtggatttcgcggaagtttttttacggtgattacagttgccggctcagctcagcagcgccgcgatgatcgcgataaacaccgggctggtcatggtgctcatcagaatgccgtcgcgcgcgaaggtgaggcccacgttgtagcgggccgcgtagttgtacacgttctggccggtgggcagagcggcgagtaccacgcaggcgtacagctcggagccgcggaagcccatcacgaaataggcgagcaggaacgcgatgattggcatgatgatgttcttgaggaccgcgaccgtgaagatggccgggcgatcgcccttctgctgcagcggcttggtgccgtgtagggacatgccgaacgccatcaggatcattggcaccgctgaatcgccgatcatgtcgatcgggtcgaaaatgaatttcggcactgggaaccagccgcttttagcggaaatcgcagagaccacaatgcccagcagcgaaccgataagcagcggttgatgcagtggctgcttggcgatttccttgatggagaccttgcccttggtggtcacgtccagcactgtcaggcccaccggtgtgaagatggcctgctgcatgaccagaatcggtgccaccagagccggattgcccagaatgtaggtggcgattggcaggccgatgttattggaattgaggtacagcgaattcagggcgccgatggtggcgtccggggcgttcaggtggaagaacatgcggttgagcaccaggaacaccacgcctaccagcacggcggagaagaacgccacgataatcgagggatggaagatgtcgaagatcggttccttggagaggatggcgaacatcaggcacgggctcgatacgaagaaggagaaacggttgagcaccatctgagcggacggcccgccgattcgcattcgtgcggcgacatatcccaccgcaatcacgatgccgataacgcagaagccttgcatggcgctgattagacctgacataatcctccctttcgccaccccagtgtggcacataaaaatgtattcggccgcaaaatctcatgtagtgggtgtgctgggcccgccgcccacgcggtacgctgttcacatgacgcttgaattgaaccgcaccgcatccactgccgagcagctgaacagcctgctcacccagatcatggagaacttctccgtgtccgaccacgagggccccctcaccgacgaggtcgaggccttccttaacgagcaagagcacctgaccgtccgccgtcacggcgacacagtggtggccagcaccgacttcggcgagccgaaccgtgtgatcttggccgggcacctcgatactgtgccggtcatcgacaatttcccaccgaagtggctggagcccggcgattcgctgattcgcgaagaaatcgcccacgctcatcccgaagaccgcgtgctgtggggccgcggtgccaccgatatgaaggcctccgacgcggtgatgctctacctcgccgccacgctcgacggccgcacgccggaaaccaccccgaaagtcgacctcacctacgtcttctacgaccatgaggaagtcgtcgccgaaaagaacggccttcgcaaagtcgtcgaggcccatcccgattggatcaccggcgatttcgccatcatcggcgagcccaccaacagcggcatcgagggcggctgcaacggtacgattcgcttcgacgtcgtgacccacggcgtggcagcgcactccgcccgcgcgtggatgggggagaacgccatccacaaggcggccgacatcctgagccgactcaacgcttacgagccggccaccgtgaacgtggacgggctcgactatcgcgagggcctcaacgccacgctgatttccggcggcaaaggcacgaacgtcattccggatgaatgccgcgtacacgtcaactaccgcttcgccccggacaaatcactggccgaggccaaggctctgatgatgggcgcggatgccggtgccgaactcggcaatggcgagcatgtggccactggcggcgtgttcgagggctacggcatcgaaatgaaggacgaaagcccctccgcgcgcccgggcctgaacgccccgctcgcccaagatctggtccgactggtcaaggagcgcaccggccgcgacccgttggccaagctcggctggactgacgtggcacgcttctcccagctcggcatcccggccgtcaacctcggtgccggcgacccgctgctggcgcacaagcacgacgagcaggtgcccgaatccgacctggccgccatgaccgcaattcttaccgactggctggtctgacacctctccagctcccctctctgaggggagctgtcaccgcagggaggggagccgagagaacgtcagcctcgccgggccacacccgcacaaaatatgtggcatactaaaggatggtggttctgcataaccatcagcgtgcgagatggcgtcgatccccttgcggctctcgagaatgagacaacgcaagcgccggtgtccgccacccgcaggacagacttgagacgaagttgcctttacgcggcgcgttttcgcgcggccacggtgagagcgtggtgtgagtcaagcgtataggcctggaaataggcgtcgtgatgcagcgcgccgcgaggagcattgtgcccactgacaaccgtgaaggtttcgtcaacgacggaaccgataattcaaccgtatccaatgccgattcggctgcagccgtgaacgctgcgcctgccgccgcctcccagcccgtcgaacctgttcgccgtcgtcgtggcggccgccgcgtggtccgcggcaccggtgctgccggcgcctccctggaactgcaagtgcaggaacgcaccccgctgttcgaagcccccgcgcttcccaatgccggcaccgcggccgattccaagtcatccgattccggcgattccgatgaatccagcgattccaaggattccgccgaacgtccaacccgccgccgtacgcgccgcgtttccacggccgacgatgccgccgaaacgccgcgtcgcacccgtcgtacgtccgccgcatcttccagcgataccgatgatgacgacgagactccgcgccgtccgcgccgcgccgcttccgcagtggccgacttggatagcgaggatgatcgtccgcgccgttcgcgccgcacggtcagtgccgatgatttcgatgacgatgccgccccgcgttcccgccgccgttcagtcgtggacgatgacgattacgacgaggaccgttcggttcgccgccgctctcgctcccgccagtccgacgatgatgactacgaggatcgcccggttcgctcccgcctccgccgtgcgcctatggatatggatgatgatgacgaagaccgtacggttcgccgtcgttctcgccgtgcagttgcggatacgcacgaggacaccccggatgagcgcctgttcgacgcggtcgaatccctgccctctggccacgagaccgtgcgccgtggcaagccgatgacgtccctgctgttccaggaaccggtgctgcccgccgccgtggatgcgcacgataccgctgacactcgtgatgacgatgttgacgccgacgaacgcccgtctcgtcgctcccgccgctcgcgcagccacgacgatgacgatgcccagccgcgcagccgtcgccgcgacgatcgcgacgaccgcggccgcgcctccgccgaccgtgacgcttcccgtgacgccgcgtccggcgataccaacgccgatcacgacgatttcgacgccgacgacacctcggactcccgccgttcgcgccgctcccgccgtctgaacgcccaggagcgccgtgcagccgccgaagtcgagcagattgaggaagacctcgagctggacgatatcgcctactcgccgattgccgaggaggagggcgacgaggaatccgacgtcacccgcacccgttcgcgccgtcgccgccgtcgtggctcacgcggcgaaaccggtgccaacggcgagcacgataccgccgagaacgatgccgaggatacgcgttcccgccgtcgtgacgatcgcgatgatcatgaccgtgatcgcgatgaggacgatgaggagcagaccgtcactcgccgtcgccgccgccgtcgtggcggcaagaacggcgagggcaccgacgaccagagtcagaacagcgaacagccgctggtccgccgctcccgcaagcagcagtacatcgacgaaatcaccgatgtggaaggctccactcgtctcgaggccaagaagcagcgccgccgtgacaaccgccgtgagcgcagccgccagagccagcttatggaacaggacttccttgcacgccgcgagaacgtggaccgcctgatggtggtgcgcgagaaggaacaccacacccagatttccgtggtggaagacaatgttctggtcgagcattacgtctccgacattcaggaagtacagaccgtcggcaacatctatcttggccgcgtgcagaacgtgctgcccagcatggaggccgcattcgtggatatcggccagtcccgcaacggtgtgctctacgccggcgaggtcaactgggatgccgctcgtctcgaaggtcagccgcgccgcatcgagctggcgttcaagtccggcgacccggtgctcgtgcaggtcactaaggacccgatcggccacaagggtgcccgcctgacctctcaggtcacgcttgccggccgcttcctggtgctcgtgccctccggtggcatgaccggcgtgagccgcaagctttcggagcgcgaacgcagccgtctgaagaacatcgtctccaagatcgccccgaaagacatgggcgtgattatccgcaccgcggccgaaggcgcatccgaagacgccatcgtcaaggatctcgaatcactggtccgccagtgggagcgcatcaacgccaagcgcgaggaattctggcacggcaagcgcccgaaactcctgcagggcgagcccgacgtggccatccgcgtggtgcgcgacatcttcaacgacgactttagcaagctcatcgtggaaggtgacaaggtctacgaccgtatcgaggaataccttgacaccatggcccccgacctgaaggacaagctggagaagtgggacccggccgagcacgaaggcaaggacgtgttcgacaaatggtccatcgactcccagctgcgtaagggcatggaacgtcaggtctacctgccgtccggcggctcgattgtcatcgatcgcaccgaggccatgaccaccatcgacgtgaacaccggccgctttatcggcaagggcaagtccttggaagaaacggtgacgcgctgcaacttggaggcgtctgaagagatcgcccgccagctgcgcctgcgcgatatcggcggcatggtgatgatcgactatgtggatatggtcatgcccgccaaccgcgatctggtgctgcgccgcttggtcgaatgcctggcacgcgaccgcaccaagcatcaggtggccgaagtcacctcgctcggtttggtgcagatgacccgcaagcgcatcggccagggtctggtcgaggcgttctccgaggaatgcccgacctgcaagggccgtggtttcatcctgcatgatcagccgaccgtttcggccgactacgacgatccctacgcgcttcgcggtggcgacccgttcgtcaaaaccaacaagcacggtcgcggcaccgctcccgctcccgaaccggctggttccagcgccgacgtcaaagccaaactggctcagattgccgccgctgccgtcgccgccaacaatacggcggaagagtaacaggtgtgtcgtgcttgacacgcgggcaaaaatcatttgatttagtccgcatggtggtgtagatttgaaactcggtgtctgaccgcaggctcggtgcgtgttaggcaaggtagctttccaaaacataaaaggaacgataatgtacgcgattgtgaaggccggtggccatcaggaaaaggtcgaggttggcgacgtcatcctcgtgaaccgtctcgacgccaagaagggcgataccgtggaattcccggtctccctcgttgtcgatggtgacaaggtcaccctcgccgccgccgatctggccaaggtgtccgtcaaggctgaggttgtgaacgatgaagccaagggcccgaagattgacatccagaagtacaagaacaagactggtgttgctcgccgtaagggtcatcgccagaagctgactatcgtcaagatcacggcgattgcctgagttatagaaaggaccatgaatcatggcacataagaagggtgcgtccagctctcgcaacggtcgcgattctaacccgcaatacctcggcgtgaagaagttcggcggcgaagccgtcgtggccggcaacatcatcgttcgccagcgtggcaccaacttccacccgggccacaacgtcggcatgggcaaggaccacacgctgttcgccctcaccgatggctccgtgaagttcggtgtgcgtcgcgaccgcaaggttgtcgacgtcatcgcctgagcgatatagcgtcaagcttttttcaagccgcgcccgtaaggacgcggcttttttgtaaggtaatcaatatgagtgattttgtggatcgagtaaccgtccatgtcaagggcggcgatgggggcaacggttcggccggcatccgtcgtgagaaatacaagccgttggccggtccgaacggcggcaatggcggcgacggcggttccgtggtgttcgtggccgaccgtaacgccaccagcctgctcgactatcgtttcatgccgcatcgtgtcgccggcagcggcaccatgggtttgggcgacaataaggacggctccaagggcgaggacctgattctgcccgtgccctgcggcaccgtcgtctttgaggcgcgcggcgaacagggcaaagccaagcatcccggcgcacagctcgccgacttgcgccacgagggcgaccgctgcgtcgtcgcccagggcggtgccggcggcctcggcaacatcgccctggccaacaagacccgacgcgcccccggcttcgccctgctcggcgaactcggcgaggaacgcgacgtgattctggaactgaagtccatcgccgacgtggcgttggtcggtttcccctcggccggaaagtcgtccctgattgcggcgatgagttccgccaagccgaagatcgccgactacccattcaccacgctggtgccgaatctcggcgtcgtcatcgccggcgactctcgatacaccatcgccgacgtgccgggcctgattcctggcgcctctgaaggcaagggcctgggactggagttcctgcgccacatcgaacgtaccgaaatcatcgcccacgtgattgattgcgccacgcttgaaccggaccgcgacccgatgtccgactaccacgcgctggaaaacgagttggcactctacgccgacaagctcgaactgccattgggcgccatcccgattcccgaacgcccgcgcatcgtgattctgaacaagatcgatgtgcccgaggccaaggaattggccgagttcgtgcgtccggagttcgagaaactcgggctgaaggtctttgagatctccaccgcctctcatgaggggctgaaggagctcaacttcgcgttgtctgcgctggtgcatgagatgcgtgaggaagtggccaaccgcgagcaggccgaagaggagacgcgcgtggtcatcaagccattggagaccaagggccgccgtccgcgtcgcgctgacgagggcggcagtgcgcttgagttcacggtcgagcgccgcgaactcggcaatggcgaagtgttcttcgaggtgcgtggcgtcaagccggagcgctgggtcatgcagaccaacttcgacaacgacgaggccgtgggctatctggccgaccgcttggccaagctgggcgtggaggacgagctgcgccgcaagggtgctcaccccggcgacgaagtgcgcatcggtcgtggtgcccgtatggtcgaattcgattgggatccgaccatctccgccggtgctgaaatgctcgacggctccaacctcggtgcccgaggcaaggatctgcgtctcgaagagcaggacccgcgcacgcaccgccgctccaacgccgaacgtcgtgcccaatactacgagatgatggacgcccgtgccgccgtgcgcgacgcgatgatggccgaacgcaaggccggccactgggccgacccgaccgttgacgacgatcgccatgacgaaaccagtctgttcggccacggtgagtccagcgaagatggtgaaaccgaggaataaatgagcactccgagtcag

SEQ ID NO: 925 - DNA, 15509 bp, Unknown
  R117_24m  MAG No. k141_8088
ccgaccacgaacggcaaggcgaagttcaccgccatccagatcaacatggagcggatatcggcgccgatacggcgatataccaccagcaatgatgcaaacaggccaaataaggctccagaagccccataggctgccatctgccagccgatgcctcccggagccaccgcagcccacaccataagtcccagagagccgccaaggccggaaatcacatacagtcccaagaaccgccagtggccgatcattcgttccagcactgggcccacggaatacagggcgatcatgttgaacaggatatgcaatagcgagttcggcgcatgcaggaacatcgaggtgatgagcgtccacggctcagccaccagtctgaccggagccgccatgccgaggtacatcaaccaagccctcaggcccggggcaataaatcccagcaatacctccagtagccacactgccacgcacgcaccaatcagcgcccaggtcatcaccggaccaccgcgctcccactggtatcgaatctcccgctgtgtaggaatatgcatgcagtccactgtatcgaaggtctcggatgcgttccacgcgccgcgaagatgctgagccgaccgagggcatgcgggcgtggatgaatcgcccacgaatgtcattccacccaatcgtcacaaacagcggcctagaatagggagcagagtcggtctgaatgggcataccgaccagacgatccctagggaaaggagccgtcatggagaacaagtcttctaacggttggaagttcttcgcgctgctgttcggcggattgctcgccgcgcttgttggcttgtacatctacaagcagcagaacccagattacgatccgtgggaggagccgtgggagaacagctcctcgccggtcgacctgggtctgaacaaggccgaggatgaggccgatggcgaggcggaagccgccccggccgaagcctgatagggcggtttttcaacgcaagaagccccgcaaccgatggatgtcggttgcggggcttcttatgttctggttcccctctccgaggggagccgccccaccgactcagtcagccagaggagcagtgtgccagatgtgcggagccgttaagcgggaagcccggtgggcttcccgtaggcgacgccgagcggcgacagccgcgaggtagaaaccagcacgtagccggcgcgctgctccggcggccgtcaggccagaggagcagtgtgccagatacgttccaaatagtcttccatggagcggtcggagctgaagtagccggagttggccacgttgagcagggccttgcggttccattcgagctcatcggcgtagagggcctcgatctcggactggatgtccatgtaggcggagaagtcggccagggtcatgaaccagtccttggtcagccagtcggccacgagcggggagtaggcgttgcggtcgccgttggagaaggtgccgtcggccaccagatcgatggcctgcttcaggcgcggatcggcctcgtagtaggaggcgggattgtagccctcggcgtacttcttctcgacctcgtcgacggtcatgccgaacaggaagaagttctcggcgccgacgcgctcacgaatctcgacgttcgcgccgtccagcgtacccacggtcagggcgccgttcagagcgaacttcatgttgccggtaccggaagcttccttgccggcttgggagatctgctcgtcaagctcggtggccgggatgaggttctgagccatctcgacgttgtagttcggcagcatgtggacggcgagcttgcccttgacggccggatcgctgctgatcacgcgggaaacgttgttgatcagctcgatggtcatcttggccaggtagtagcccggagcggccttggcaccgaagaacacggtgcgcggagtgatgtcctcggccttgaccttgccggacttgatgtcggcgtagttggagatcacggcgagaatcttcagagactggcgcttgtactcgtgcagacgcttgaccatggtgttgaacagggtgttctcgtcgatatcgatgccgtagtggtccttggcgaagcccacgaatgcgtgcttgttggccttcttgacggcggcgaacttcttgacgaactcatcgtccttggccagcggctcgaggcccttgagcagttccagatcggcgacccacttgtcggtgcccaggccctcggtgatgaggtcggacaggcgcgggttggcgagcttgacgaagcgacgcggggtcacgccgttggtcacgttggtgaacttgtccgggtagacgtcggagaagttcttcagggtgacgtccttcagcagctgggagtgcagctcggcaacgccgttgacgtgggagccgccgtaggtggccaggtaggccatgcgcacggcgtcgccagtgtagatggccatgtccttgatggtgtcggcggcaacgcccttggccttgagctcggcctcgaactgctcgttgatcttctcgatgatctcgaggtgacggggcagcagctcgccgatcaggctggccggccagacctcaagggcctccggcagcagggtgtggcaggtgtagttgaaggtcttggtggtgatggaccacgcggtatcccagtcgtagccgtactcatcgatgaggatgcgcatgagctcggggatgccgatcaccggatgggtgtcgttgagctggaagacgatcttgttcgggaaggtcgtcaggtccggtttgtcctggcccgggtagaagacgcggatggcgtcgtgcagggatgcggagacgaagaagtactgctgctcgaggcgcagttccttaccgaccttggtggagtcttccgggtagagaatcttggagatgttctcggccttgacctgcggggccacggcgtccatgtactcggaacggttgaaggcgagcagatcgaactcgtcgtagctcttggcggtccacaggcgcagagtgttcacacgctgggacttgtagccgggaaccatgtagtccaccggcacggcgcgcacggaccaggccggttcccaggtcttggtgccgtcggcgttttcgacgaccttgccaccgaaggagaccttctgatcacggttgtagtcggtgtggccccacggctcttcgttggccagccagtagtccggggtttcgacctgcttgccgttctcgtcgaacttctgcttgaagatgccgtacttgtactggatgccgtagccgaaggccggcacgccgagggaggcgagggagtcgatgaagcaggcggccagacggccgaggccaccgttgccgaggcccggctcgtattcgacgtccacgatgtccttcggcttgaagccaagggcttccacagccttgtcgaactggtcggtcaggccagcgttcagcagtgcgttctccagctgcttacccatcaagaactcggcggacaggtagccgacggccttggtgttgccgttgacggtgtcggcctgggtcttgaaccaggagtcggcaaggtggttgcgcacggccttggatgcggcgacatacacgtcagcaggggtggcctgctcggcggtgacgttttgagtgtatttcagttgttcacgaatctcgtcggcgaattgttccgccgtgacaggagacttcggtgcggtgatttcggtcattctgactttccttccgggataagtgcccgtgtttattatgccgcgcgataggtatcgtcgcatagacgtaagcatgaactctccgtaacgacgatggcggagcgttcttgcatacgttctcattgagagcgtatcacatatctcacggttccgcatcctacagtatgccatcgtttgcataccttgcggtttcgcgtgccggtgccatgatggagcatatggcagtaattctcgaaaaagacttgaaacgagggcacgacgcactgatgcaatggcgtgccgcagccctggaactggccgacaacacaccacatcgcctgaccacctcccccgttctgccgcgcccggtgtgggcgatggctgtgcgctactcgctgttcctgctggagcggcgcgcgcccggccctggcgtggaggtgcgcgttgcgccgtggggtgcggtcaaaatcctggacggcccggaatcggacccgcacaacctcactccaccggacgtcatcgaactggagcccgaggtctggctacggctggcctgcggcatcaccacgtgggcagaggaaaaggacgccggccacatcagcgcggtcggagagcgcgacgatctgagcgacctgctgccgctgtaaatcgtcggatgcccggtatcggatgccctttatcagaactgtgcgatgctccaacgctggatgtgctcggcccagcggtccggcgtgggtagggtgatgaggctgcgcatcgtcagcgcgtaagcggcggcagctaccagtacggtggccagaatcaggcaggtcggaccgtagccgatggtctgcataccccagccggcgagtgccacggccacgccataggcaccgtactgcaacaccatgctgcccgctccaacgcggccgagcttgtccttgcccaccaaggtattgctgaggcctccaagcaccgcgttgcccgcgggcaatgccagtaccgagcaggccacaaatatggccttgccaactatggagggcaccaacgcggcaccggtgaatcctacagccagcaagacgaacatcacacccaccagtacgccgccgggcacacggttgaccagttgcgaggccaccagtgcgcccagcaacatgccaacggcggaggcggcgttgatggatccggcggatatcagctggctgccaccttgggagatgtccagcgcggtcagcagtaggaaggcattgctggcaccggtcaccatggccgctgcgatgatgagatggcgttggaaccggtcgcgcagcagccagatcatgccgtccagtgcgtcgcgccagcgtggggcggagtcatcggcatcatcggcgtccgagacggccccgacctccgaaccggtatcaacattgcccggacggccgctatcgctcacagtcgcacgtttccaatagcggcggatacgccatgcggacaccatgcccagcacgctcagcaccgcgctggtcaggaacggcaccgcatgtcccacggtcatcagcagaccgcccaacggcccgcctgccagcgtgaccgtcgaatccctggcgtcgttcaacgccatcgcgtgaggcagctgctcatccggcaccacgccacgcagcatggcattcgatgtattctccaacaggccatcgcgcaccgaaaacagcacgacgatacacagcagcgcgatcggaagcacgtgggcatagggtccgccgaatgccggagcgtttgccccgttaaccccatggccgctcgtcttcggcgcattgccgaacagcatcaccgctgccgccgccaccgccgagagcaccacaccggacgcaccccagatcagcatgagcgtacggcgatcataccggtcctgaatcacgccgccggcaaggcccagcaccgtctgcaccaccacgcagatgctttccgtcgtggtggcggcggcagaggatcctgtcgtggcgagcatgatcagcggcaccgcgaacgcgatcaggctggcaccgaccgcgccggacgtgtccgcagccagccaccatccgtaatcagttccccgccataaatccgtatcacttgccatcgttgccctccctgggattggtccttatggacgccaccatagggagccgccgccgagccgaacacccgcaatcctcggttatggggacatggctgcggtcgtcgtcctcatttgtgaggacagggcacaatcagcgccggacgccggacatcgcagcttctgccccatcagccccgcacgcatggaatgcgcacgtaaatcatccacgtgccatcatccgaacgggcggtcaactcaccgcccaactcctgcacacgggtgcgatgcatggccagcccacgccccgaccgctcctgcgcggacaggccactctgcgcgtcggcatcgtcacggatatcgttggtctcgcgaatctcaatccattcgggagacagggtgacgaacagcaggtaggaatcatctcccgccggtgcatggcggcggatattcgtgccgatctccgtcatcagcgacagcgcctcggccgccgcctcggggtccacgaccatgacgatgccgttgaccgcggccgtcccccgatagccctgcgcctccagaaactcctcggtatcggtgatctgcgccttcacacgcgtgacgaaggattgcggcatgcccgctgtggattgcgtacggtcatcgccaccggcgttctcgggcacggcattgtcaaccacctcattcgcaatcgctggacagctcccggcacctaccgggtcacgagccagggcggattctttcgtcggcgaatcaacctgccctgattctgcagtcgccacctcagatgtcccggtgccaccgaccggcaaggactcgtcccggaagccggcgtccattccgctctgctcggtcagaaaatcgatgatgccatgcacttccgcaaaggcacgttggctgcgatccagcacgcgctgccagtcgccaccatcgatgccggctggcgcggccagattattccgggcgatggtcgagatatacgtcagatcgttggacagcgtgtcgtgcagttcgatcgcgagctggttgccgtggcgcagatcggccagcgccgattccatctgctcgttttcgttctcctgattcaccacgcgcttgcgccagcgcaacgcaatgcccagtaataccagcagcacgcttgccgtcagcgccgccgacgccgtgaccagccacgacccggtcaccgcatagacgatggccgccaccgcaagcacaccgatcgggccgaacatcgccagcggatgattgagttctatatcgatatcaatctgatgatgcttcttgccgtcggcgtgaccatacgaatacgacgaatgccgcgaaatgataatcggacgtttcaccggcccgctccccttatgcgccttgcgcttcttctaccgtgtccccacacacccatcggcgccttcatcagtgcaggttcatgcgaatccatgcgccgataagttccttgagattgccggcgccgagcttgtcggccgcacgcatcagatgcgtgcgcacggtggtttcggtgatggacagttcggcggcgatctgcggcatagtccggccgcgggaccacagttccgcaacctccatctcacgcgcgctcagccggttgtccttctcggccttgatgcgcgcggacgcaacggccgcggtctcgaaccgcacgtcgccaccatcgccccatattttgacggtctgcacctggcggatagccacggcctgcaatcgcacatcatcgttcttgctcatgatgccctgtgcgccggcccgggccatctcctgggcatgtcggcccacaatcgaggcggtaatggccagtatcgccgtggtcgcgttttccctgcggattgcacgcaccacatccggaccattgatgtcgttcatcgcgatatcggccaatagcacagcaggcgggtgtttggtggccgtgcacagctgaatggctttgctgccttcgctcaccggcggaaacaattcgaagtctggcagggccttcgacaaaatcgactgtaatgccatcagggccatgcggtcgttgtccatgatgagcatggtgggccttggcccatcctgcccgctgatatccggcatatgcctacgtgcgcttagctcttcttcggcttcagcgctgagggcatgggcatcggaatcggcttgcgtggggccggcttcggcttgggcgcggccggcgcggaggccgggaactcgccgctggtcgcctttgcggcggcttcggctgcccacttggcgtactcgtcgaggtcgtcctcctgcgcggcgggcgagaccttggcggcgtcggcgtcagcagcagaatccacatccttgtccgcatactgatcatcaatatcggcgaacgggtcaggagagcccgttcccggctcctgctcgctcagctcttttgccagctcatcgtaatcggtatcggtggtcaggtacttgagctttcgggcaattttctgctgttttgctttttgacgtccgcggcccatctgaccccctgcgattactgtgctgttcgattcatcaacaatagagagtaccactaatagtggcttgttcgttgtcggctcacacttttaccataaaaagcgtttatctgagccctatttaaaggattttcgcatgaccgacgagcagcaactgacagcggcaggcaatgagataagcgcgagcttcctcgcggccaaaaagcgttcggacgaaacgctcgccaagctggaggccaagccgtcgtccttcaccatgttgaccggcgaccgcccgaccggccggctgcacctcggccactacttcggctcgatccgtgagcgtgtcgccatgcaggagcgcggcgtcaacacgaacatcatcatcgccgactaccaggtgatcaccgaccgcgacaccaccgagcacatccaagacaacgtgctgaacctggtgctcgactacatggccgccggcatcgatccgaacaagaccatgatgttcacccactccgccgtgccggccgagaaccagctgctgctgccgttcctgtccctggtcaccgaggctgagctgcaccgcaacccgaccgtgaagtccgagatggaggcgtccggccacgcgctgaccggtctgctgctcacctacccggtgcatcaggcgtgcgacatcctcttctgcaaggccaatgtcgtgccgatcggcaaggacaacctgccgcacgtggaaatcacgcgcaccatcgcccgccgtttcaacgagcgttacgccaagaagaacccagtgttcccggagccggccgccattctgtctgaggcaccggagattccaggtctcgacggccgcaagatgagcaagtcgtacggcaactccatcatgctgggcgccaccgccgaggaaaccgccaagctcatcaagaagagcccgaccgattccgagcgccgcatcactttcgacccggttgcccgcccgcaggtctccgccctgctgaccaccgccggcctggtgaccggccgcgacccgaaggacatcgccgaggagatcggtgattccggcgccggcgcactcaaggcatacgtcatcgaatcagtcaacgagttcctggccccgcaccgcgagcgccgcgccgagctggccaaggacatggactccattcgtgacatcctgcacgacggcaacaagcgtgccaacgccatcgccgaggagaccctcgaccaggtgcgcgaggccatgggcatgaagtactgattttcccgccgctcgtagcaagacgccgtgtcagccccaactgggcaactgacacggcgttttttgtattgcggcgtctgctgtgtcctatcttcacttcgaggggcggatttcttgttttccggaggtctatctccgcttcgaggggctgttgctcaagtaggcgaggcacaaaaacggcggaatgacgttggcgtgaatgggattttatctgagattgagcgcatgaccagccccttgaaacggagatagacctccggaaaggctcaaatccgccccttgaaacggagaatcaagcgttagtaactctcaattcaaaaaacacaacatgttttccgtgcaacgcggctatcaagacggacctctggtcacttcatgccgatggcttgcatcaatacgtacgctccccgcacagcaatgtcattacgacgtgttgcggcatagcgcgcatggcttccggagtatcggcggcgtatgggtcggcgtccaacaacaccatatcggccgggtcgccggatgcaaggcggtcacggccagtggcggtcgaggctgccagcgaggtgcgcacatcgaggcactgctcgggctggaacggctcgcggtcagagctttcggagccgaacacggcggcggaaatggccagccacgggtccagcggggccacgggcgcatccgagcccatgcgcagcgtggtaccggcgtcgtggagggccctgaacggataagggataccggccgggttggcccagaaacgggtgatgacgtcgcggtcatccatggcgtgctgcggctggatgctggccgtgagccccagctcggcgaaacgcgggatatcgatgggtttgagcatctgtgcgtgctcgatcgatccatgtgcgtgcgtggcggcgactgcgttgagcgcaatggtgttcgcttcgtcgccaatagcgtggcaggcgatgtcgaagccatgctcggtggctaggcgcatatagtcttcgatttgctgcggcgtgtagctcagcgtgccatacgtcggcggctcgatgcccgaatacggcgtggagcagtaggcggagcgggtgttgagcgatccgtccgagatgagcttcatggcgcccacatggccgagcccggcgctgcccggcagtgggttgccggtatgccaacccgcgtcaatggcggcttgcaaccgctcggggtatacaccggcgtccacgcgcaaaccgttaatgccggccgcgaaacgattggtccacgtatcgatgttttcggccatttcataatcgcggatgcccaccacgcccttgcttgcggcgtcctgttcggcctcgcgcagcagacggtcagtctcttcagcagcgcccggcaccttgtcgaaggcggtgtaggcgttgaaccattcgagttcaccgaccagaccggattcgtccacatgtacgccaagcctgcgggccgcggcggagttcacccatccgcagtgcatgtccgcgctggagagggccaccggctgttcgccggtcacggcgtcaattgcggccagtgtgggctgctcgtcgtcggcccacagcgagtgacggaatcgcatgcccaccacgaaggcatctgggtcaagcgtgccggcggcgcggcgctcatccagatgacggcgcaacatgtccatcgcttcggcggcggaacgggcattgatgaggtccagtcggcccagcgtcttagcccattgcgtgaagtgcgtgtggcagtcccacaggccgggaataacccacaggccgtcggcgtcgatggtggtttcgtcagcaggtgcggaggccgacgttgggattgagacgctgccagaagcaatggcattcgtcgcgtatgccaacgatgtcgtatgcgccttagtctgcatcgtgccgtccgaagccgagaccgttccagcagggccgacagacgcaacaaccccatcgcgaagcaccacatccacgcggtcctgagaccccggaacaccggcattgacaatacgcaccaagctactcatacccgccatcatgccacctttgcatgaacgccatggagattcgttcaagctgaatcgcgccgtcggcggcgattcccgctggctgcctgcaaacccctacgttccatgtaattgcgggatggcctgcaactgcgatgaacacccatagtttatccaccgacttatccacatttatccaccgaaaaattggggcggtagacagggccggtagccggaccctacactgcgaggacaaagcgaacatcacgaaggggtgatcatcatgggtagctcaacggcattgaccgagctgacaatgcagaagtatcaacgaatgcagacgtgcgcagatgttcaacgacgaagcgcatggcgcccaccctatgccctgacaacagcattggagcttttgtcaattgaagtaccccgcatatcaagcaaacacagaggccttgcaactacaaccattgttgcggttccacatgccaatgacaaacggcacattgtgggggtcaaagtggttgtatggcctttcccactagacacggtcataatcgagggacaattcacatgcacttcaccagcttgcacatgggccatgttctccgcgtatctcgaacttgaagaactcatcgttctcgctgattccatgatgcgacgagatcgaaggctctgcagaacaaccatcgacgccctttctctgtatctcgatgaggccgaggcccaggtgcgagccgacaaagagaatggcaccaattcgtatttgttccgcgggtataacaaatgccgtcgcgccctgcttttggcgcgcgcgggcacagattcctccatggaaacacgaactcgtttggttctcttgaaatacggtctggattgcccgcaggtgaattatccaatattcgtaggaaacaacaccagacccatatatctcgatcttgcataccctgaattcaaggtatgcatcgaatacgaaggctctcatcatgccgggcaatggctgaatgacgcgagacgccgccagatgatcgaagacgctggctggaagtacattcaagtcaccaaattagatattggcgacgaagcgggagaagaggcccttgcccgaagagttgccgagaggatacaggaggttacgggcaaaacggtccagctcacgatgcggcaaaccacccagcaaattagcgatgtccgaaagctacgccgtattccgctgtacaaacggctgaaattcgagcctctgctgccaattattccgacgacgcaggaataataagcccggtagagtcagtccgcaccgtccgcaccgcgctacggtattcaaaacccatttcaaggggctgatttggcctccgccggaggtctacttccgtttcaaggggctgatcatccgctagatcacgtgtatcaatgcccttacgccaacgccattccgccgttttggagccgcgtctactcaggcatcagccccttgaaacggcagtagacctctccagaacgtcaaatcagcccctcgaagtccgttttggcctcaatggttcctgccgaaccacaaaaaagccactcctctgccatacgaggcgaccgcacagcaggcacgtgtcatttgccgctgcgaacctcggactccatggcttccatgggctcgtcgacgagcacggtgccggacggcagggtgccgggcagcggatcgtccatgtagtggtcgaattcgtagagcatacgctcgttcggcttggcggtcagcaacgaaaccaccacgatgaacagcagcgaaatgatgaacgccggcagcagctcatagatggcgaatacgccacccaagggcttgacgaggttgtgccagatcagcacggccgccgtgccggacagcatgccggccacggcgccggccttgttggcgcgacgccagtatagcgagcacagcatcaacgggccgaatgaggcgccaagcccggcccacgcgtaggacaccacctggaagatcgacgagttctggtcgtatgccaccagaatgccgaacaggaacatgaccaccagcgtgaccctggccacgatcatgacctgcttgtcggtggccttgcggtgcagcagcccgcggaagatgttctcgcccatggccgaagcgccgatgatcagatacgaggagctggagctcatcgaggccgcgaaaatgccggagaccaccacgccgcacatgaagctcggcagcagggtctgcgccagcacgatgaagatggtctccgcatcggtggaggtcagcagttcggtgggcatcatcgcacgtcccaccaagccgatgcacactgcgcaacccagcgaaatcacgcaccaggaggtggcgatgattcgggacttgcgcacttcttccacgctgcggatggacaggaagcgcaccagcacctgcggcataccgaagtaacccaggccccacgccagcatggaaatgatggtgatgatgccgtagtcggagggcgcgccgaacacggccttgcccgcctcgacgagctgctggccggtggccgggtccagcttgggcgcggccacctgcgtgccggacaggtagccggggatggcacgcaggaattccacggtgttgtcgatgccgcccgcgctggccacggtgccgatgaacaccaccgcgagcgcgaagaacatgagcatgccttgaatgaagtcggtcatcaccacggacaagtagccgcccaccacggtgtagacgaacacgaccaccgcgccgatgatcatcatgacgtggtagtcgaaaccgaacaacgtggcgaacagcttgcccacggtcacgaagcagctgcccacgtacacgctgaagaacaccaggatgatcacggccgcgatggtggagaccacgcccttcttgtcatggaaacgcttggcgaagaagtcaggaatggtgatggcatcgccggccactaccgagtagcggcgcagtcgccgggccacaagcttccagttgagataggtgccgagcgccaggccgatggcggtccacatcgggtcggccgcgccggtgaagtaggccaggcccggcaggcccatcagcagccagccgctcatgtcggaggcttcggcgctcagggccgtgagccacggccccacgccgcgcccgcccgcgaagtattccttggaggaggagttggagcgtttggagtagatgaatccgatggacagcatggccgcaaaatagatgaccatggccagcagaatccagaaatcgttggccaactgcgacacctccccaatcatgacgccaagcggctaccgccatggcagaactatgtgctgatatgcgtgctgatatgcgattgacgccggagcggcgtcatacagaccgtcacagccgtgaatacggccgcaacgcacttcgcctgatggtagtggatacaagggctcaagcaccttccaccgtttccatactgagacgctgttttatccgagctccccacctgaggggagccaagatgacggtcagatgtcgtagcgccaggacttgtcggtcaccacgcgggccatcgccaagccgatcggcagacagataatcaccatgaacgcacggaacgcccagtccagcgcattcatggtctggaagctgccgaggtaccacatggcacggtacatatacagaccgggcaccatgatcacgatcgacggcacggtcaggcagatgcgcgggtagccgaggtgcggcggtagccagccacgtcgcacggatgaacgccacgccgatgccagaatgcccgccagaaacgcgccgatgaaggtagccatctcgggtgccacgttgaagtcctgcaattccaagcgcagcgtgtccgtgatcgcaccgattagggcggcggtcaggcacatgcgctgcggcgaattgaacagcacggagaagccccacacgccgacgaacgccgccacgaaccgcagcaatccgttgacccacgggtcaagccccagcggttcaaagccttccgggtgcaggtgcaccatcacggccacggcccagcctgccagcgtggccatcaggatgatgcacagcacgtacgccacgcgctggatgcccgaggggaagtcgattttcgccatgtcgagtccgccggtgatgagcgggaaaccggggatcacgaacagcatggcgcc

SEQ ID NO: 926 - DNA, 2878 bp, Unknown
  R117_24m  MAG No. k141_8116
gagccgcacaatgcccgattgggtgaagtacggggtgttctggcacgtgtatccgctgggcttctgcggtgccgatatcaggcccgccggcccgcgccagttccatggccgcggccttgacgcgatgatcccttggctggaatatgcccgtgacttgggcgcttccggtctgctgctcggtccgatattcgaatcggcgacgcacgggtatgacacgcttgaccatatgcacatcgatgttcggctgggaggagatgctgcattcgaccggctgatcactgcctgccgggatatgggtttgcaagtgatattggatggcgtgttcaaccatgtaagccgcaatcatcctgccgttcaggcgtcgcttgacgaagccgtcggccgcttggatccggccgataacccgtggcacggtctggtccgcacgcatgtcggcgataatggcgaacccactttggatgtgttcgaggggcacgacgatctggtagcgctggaccattcgtccgataagaccgttgactatgtggcccatgtgatgaactactggctggatcgcggggctgccggttggcgacttgacgccgcgtatgcggtgccgagcgcgttctgggcgcgagtgttgccgcaggtcaaggccacgcatccggattcgtgggttttcggcgaggtgatccatggcgattacccgcgcatcatcgaggaatccacgatggattcagtcacgcagtatgagctgtggaagtcgattcagcatgcgctggagacagagaacttctttgagttggattggaatctcaagcggcataatgcgttcctggattccttcgtgccacagacgttcatcggcaatcatgatgtgacgcgtatcgcctcgcagataggcccggccaaggcggcgttggcggtggcggtgttgctgacggttggcggcgtgccgagcatctattatggcgacgaacaaggctatgtgggcgtcaagcaggagcggttcggtggcgacgatgatattcgcccgaagttccccgactccccctccaatctctccacattgggtgagccaatataccggttgcatcaggcgctgatcgcgctgcgccgccgcaacccatggctgattgacgcgcgtaccgaggcactcgaactggaaaacaagcatttcgtctatcgctcagtgagcgccgacgcccaacactccctaaccgtggacctcaacatcgagcaatcccccaccttcaccatccacaacgccgacggctccgtagcgtaccaatattaaccagcgcttggccccctccctgaggggagccaaggaacgtcatcgacgtccgttgcgggtaccggacgagcggaatggcgagctgttcttcttggaatggtgacgcttcgggccttgtgtattgccgtatttggcgatcatacggcgctcgtgacgcttggccccctcggaacgctcatcacgcacgatgcggttctcgttcttgcggtggatacgcttgctgccttcatgcttacgcgagccgaactcatcgcttcgatcgtaatcgaatctgtctcgccgatcggacttgccgttcttggagtacttatcgccgcgacggtcatcataacggtcatcagatttcttaccgcgacggcgatcctcatatcgagtgtcggcacgatcctcgcgtcgattgccacgacgctcatcgccatgctcgaacagataatcgcgacgctcggcctcgggattgctcatgccggcgcgacgttccgcacggttgcggttcttcttcatggccttcttgttggctttgccgccgtgcttgtgctgcggctgatcatcgtaggactcgccgccgacattctcgtagcgagtttcggtctcggcaacgttctgctcgccacggttgcgattgcggctatgcttacgcttgctgccgcggccagactcatcgccagccatatttttggcgcccttgttcttgcccttgcgcgggttgccgacgggctgcgacttgtcgagactccagccgtccacgcgctcggctcggtcgcccacaagctcaagcacttcgggcgaatcgtgagtgacctcaatcatcttggttttgataccggcctgattcagcagtcggcgcgtttcacgacgctgttctggcagcaccagggtgaccacgtcgccggacttgccggcgcgggcggtacgaccggagcggtgcacgaacgacttcgggtcggccggcggctcgacctgcaccacaagctccacgccgccgacgtcgataccacgggcggccacgtcggtggccaccatgacgcgcacatcaccggagtcgaaggcagcgagattgcggtcgcgctggttctggctcaaattgccgtgcagttcggcggccggaatgccgttctgagtcaggttcttggcgagcttcttggcctgaaacttggtgcgggtaaacaggatacgacggccagtaccggaggccaacgtacgtacaagctcatgcttgtcaccgcgcgtggtttcaaacacatggtgggtcatcaaatccggttcggcggtggccgaatcgacctcgtgcaccttgggatcatgcaggaaggtgttcaccacttcatccacgccgtgatcgagcgtggcggagaacagcatgtgctgggcgtcgggcgagatctgctcaagcagtcgcttgaccggcggcaggaagcccatatcggccatttcatcggcctcatcgatgaccacgacttcgatggacgagagcgtgagcgcctgctggcgcagcaggtcctcaaggcggcccgggcaggcgaccacgatatcggcgccggccttcagatcgcggatctggtggatgtacttgacgccgccgtacaccgtggtggtgttcatgcc

SEQ ID NO: 927 - DNA, 31281 bp, Unknown
  R117_24m  MAG No. k141_8440
accccgtaatgacaccaatggaaaacgacgcgaccgtttacgggggtgtcccggacggcccgttgtgcgtcattcgctgttgtggttgtcccgtgtcatcgccggcgccttggtcctacgcaaaagcaccttgcggattattccatatcccgtctacacgatgcaatggggttctggcgggcgggaattagcgattcggtcatcgggaggagacgtggaaggtggcggcgatgccgtcattgccgacgccggtaaatgggcgctgggcatgccctgtttcctgagcgagagcccggccctgtatcgtctggcgatttgtcgatcgttgcgattccggcgttctgccgggctttcatttcgaaatgacgcatctggaatagtgcggccgtctttggtgctcctctcttcagtgatccgccgaggttacgcccatggctgaacgcccggaatatcccgcgaaatccggcgagacggtctaggccgcggatgtaccgtgaatggcgcataggcgtgtcggtcgccgcaatcatggcaatgagaggaaaccccgttatggatcatgcatcccgatctcagcatcagactcaggccgatgcgtcttcgatctcttcaacgaatccgacggcctcgtcgccgctgcccacccaggcgccgccgtggggcgcgctgtgggtgatggccctgggattggccatgatcgtgctcgacagctcgatcgtcaacgtctccatccccaccatcatcgatgatatcggcattaacctgaccgacgcccagtgggtcacctcgctctacaacatcgtgcttgccgcgttgttgctgcctttcggcaagttgggcgacgccagggggcgcaaactggtgtttcaagtcggtaccgtgatcttcgtggcgagttcgatgctcgccgccgcctcgcagggtgcggggatgctgcttgccgcccgtgtgctgcagggcatcggaggcgcgatgatcatgccgaacaccctgtccacggtgtctgccctgttccgtggcaaataccgtgccgcggcgttcggcgtctggggtgcggtgatgagttcggccgccgccctcggtccgctgctcggtggcgtgttcaccgagaccttgggatggcgttggattttcctggtgaacttgccgttgggtatcgcggtctttgtgtcggccatcttcctggtgccgcagaccggtgggaacgcctcggtcgccggtgccgcggatgccgcgcaggatgcccgatcccatcgtgtcggtgtggatatcccgggcgtggtgttgtctgccctgacctcggccctgttggtgttcggtcttatcgaaggcgagacctacggttggtggaagcagacctcaacgcagttgaagctcggcgggttgagctggaatcgtgactggttgtcgccggtgccgatctgcctgatcgccggcgcgcttctgatggccgtcttcatcgtcttcgaatccgcgcggggcaaagccggtcggccggtcatgctggacatgaccctgttccgcatcaagacgttctcgtggggcaatctggcggctgcggccatcgccgccggcgagttcgcgctggtgttcatgctgccgctgtacctcatcaacgcccgcgggctcaacacgctgcaggccggtgcgatgctggccgtgatgggcctggggtccatcgtcgcaggtgcgcaggcccatgtcatggccgccaagctcaccccggccggcgtgattcaactcggtcttgtgatcgagatcatcgccgtcgccttggtcgcggtccttatgcctgtgggattgtcggtgtggtggcagcttgttcccatggccgcgtacggtctgggtctgggcttcgcctccgcgcagctgaccagcgtggtgctctccgaagtgccgatcatgcagtccggcgaagggtcggccacccagtccacggttcggcagctcggcaccgccgtcggttcggccatctccggcgcgtcgttggccatggccgtcaacggaacattgccggcgcggctcgaatccctcgggctgcccgccaaggtcggcgacggtctggcccaagcggtcagtggttcggcgggtggagtgatcggcgtgttccgcagcggtgatggaccggcggcccgattcggcgacgaggcgccgaagattgccgatgcgatgacttcagggttcgtcgaaggcggccagtggacgcttctggtcgccggcatcatgctgttcatcggtttgctggcctcggtggccgtgcgtcgtgccgcgttgtcgcacaacgtgcgttgacgcatgacggctactgtcttatggggagtgcggtcgtgcgcggtcgaacgatatggtccgcataccgtccaccacacctgcggtcggttcgccggtggaaggaacgatgtatcagacggcgtgtcgtaatccgatgatgctgtaacatatcctcttgtgcctcagcgaggcacgcacggccccgtagctcagttggttagagcgccgccctgtcacggcggaggtcaccggttcaagtccggccggggtcgccaccaaactcccgatgcatgtcgggagtttttttgtttcctgccgttcttcgatgccatccgcaaggacggtgaaagtgattgcatccgattcgacacgccgtccgcaccgatgccggcgttaagggggcgcccgtttgcaacgggtgaaatgcatgaggaagcgcatcggcggaatgttcgcgacgcatgacgaaccacggaaaaaccgcggtgggaggtcatggcggctcgctactattttcgctatctcgcatgttacgaaagtcttcaaggagtaagccatgaccacgctcgccattgatatcggaggaaccaagatcgccgccgccgtctgcgatgcaaacgacagcatcatccagcgctggcgcgtccccacgccgatggacgccgacgccatcaaccagcacatcgccgaggtgtaccgcgaggctgtggccgccgggcacaccgatatcgaggccgtcggcatctccgccgccggcaatgtgagcgcggatcgcaagacgctcaccttctccgccaacattccggcatggatcaactacgatctgtccgagcacgtcggcgcgctgatcgaccatgccgtgccggtcatcgtcgaaaacgacgccaactgcgccggatggggcgaattcgtgcacggcgccggccagggtagctccaacatggtcgcgctgaccgtgggcaccggcctcggcggtgccatcgtgatcaacggccagctctaccgcggctccttcggcatggccgccgagctcggccacctgccgatggtcccggacggcgaccactgcggctgcggcctgcgcggctgcgccgaacgttacacttcgggaacctcgctggagaacttcgccaagtccgccgtgcgccgtcgtcctcaggacgccaagcgtcttctggaactgtgcggcggcgacatcaccaaactggaggggccgatggtgtcccaagcggctcaggaaggtgacgtacttggcctgtatgcgttcggcaagatcggcgaatggctgggccgcaccatggccgccgtttccgccgtgcttgacccggacctgttcgtgatcggcggcggcgtggtggccgtgggcgacatcctgctggagccggcccgctacaactaccagcgtttcctggaaggcagcgcctaccgcggccatgccaagatcgtcgcggccactgcgggccaggatgccggtctgatcggcgcggccaacctggctctgcgctgacgatgtcgctccggcaacgggacgttagtctaatggtgagtcatggccggtgccatggctcactgccgcgctgatagtgcggtcgatgagtttccgctgcctgaccatggaatcgaattccgggttctcagcgatttcctcgtactcgtgttcggtggtcacgccggcgatttcggcgataatctcctcataggacgtttcgacggttcgatgcacgccggtgacgtgcccctgacgtatcacgacaatgcggtcggataccgcgaacacatccggcagatcgtggcagaccatcaccacggaccggccttcggagcgcagtctcttgatatatgcgagcacttccgccgactgcatcaccgacagtgcggtggtcggttcgtccagcagaataagctgcgggtcattgagcagcgtgcgtgctatggccacggtctggcgctggccgacggataaggatgcgataggggagccgacccgaatcgccgagctcagggtcttcagcacggaacgggcacgcgagttcatcgaatcgtcatcgcgtatgccaatctgattgatctccttgccgaggaacaggttcgaggccacgtccaggttgtcgcagaactcctgcccctggaacaccgatgcgatgcccatgcggtccgcctccctgatcgagggaatggtcacctgttcgccgttgagatagatatggccgaatcccggctgcagaaatcccgcgatgaccttgatcagagtggactttcctgcgccgttatcgcccacgatggcgacgacctcctggcgttggatggacagattcaccgatttcaacgcctcgacgaagccgaacttcacacagatgtcctccagccgcagcagaggaggtgtgctcgaattcctcatggtgtgttccttcttctcactcttctcctggtaccggtcactggctgacgtcattgcgaaccgagaactcgatggcgcataatgcgccgcctagcgcgcagttgtcgttcgggtgggatgacacgagtacatcgatgggtgccacggcatcagggaacagcatgcgctgcaacgcttcattgaacggttggatgaatacgtcgccggtcatggccagcttgccgccgagcacaatgacctccggatccacgctgatgcacagatcagccgccacctgaccgatacgcacggccgtgtcggcgatgatgcgacggcaaccggggtcgccttcgttggcaaaggacaccagatcatccagcgtcatattgccgtgtgtgacgctgagcaactgcaccagcctgttttccgccacgacggtgtcaaggcagccgcggttaccgcacgaacagatggcacccagcgggtcgacctggatatggccgatttcaccggccaggccggtcacgccatgcatgatttcgccgttgatgacgatgcctgcgccaaccccgtcgttggctgagatatatacgaaattgcgtttgcctgccgccacgcccatacgggattcgccgtatgccgcgaaattcgcgtcattatcgacgtatacgggaacgttgaacgccgtgcgcaacggggccgtgatatcgacgccgtcccatccgggcagaatgccgggaatcgctatggtgtggtcgctggtggccaccggtgcggccacagccacgccgatgccgaccagctcgctggcttcggcgtcgatgctgctcagggtctcattgatgagcagcatggcgcgttccagcgttgtgtccgccttgtggcccaacggcagggggagcgtgtgctcagcgatgattgacttcgagaagtcaacgatagaaagcgtaagatgacgtcgcgcgatccaaagcccgacgccgaggccctgatgccgtgcaagggtcaccagagtggctctgcgaccgttgcgaacggtgtttttggtctccagctggtcttcgtcgacaagctgatggacgagcgtggacacggtcgcagtggacagtcctgtcacctctgccagttcgacctgtgtcatggcgccgaacttgtggatgctggccagcaagttggcgcggtttgcctcgcgaagcgaggtctgcgaaccgaaaagccttgttgccataagagttcagtgtagtcgttaccggcatgaggcacagcgaggcgcagagcgtggatttttcggcgtgtcgccttgtgatgcgcgaaaaatcgccattgcgttcattggttgaacataaacgacgggaaattcgctttcttgagtttgacaacttaactcaatacggtattctatgagatgaacctgaggttattctcaggttcgggcgaccaaggagggttcgccatcccctcgaagatgaaggagaacaaatgaagttcactaagaagatcgtcgccgtggtggcaggcgttgccatgtgcgcgggcctcgcggcctgcggtggcagccgtagcggccaggcaactggcggtgatgccaagatcgaaaagggcgccactatcggcatttcgatgccgaccaagtccgaagagcgttggaacaaggacggcaacaacctgaaggccaagctggagaaggccggatacaaggtcatcctgtccttcgccgacgataagccggcccagcagaacgctgacatcgagaacatggtcaacaacgacgccaagatcgtcgtggtcgcttccaaggacggcaccgcagtgggccccgccgttgagaaggcccgcgatgcaggcgccaaggtcatcgcctacgatcgactgatcatgaacaccgacgccgtcgactactacgccaccttccagctggagcaggtcggcgtgctcgaggccacgtggctcattgaccagctcaagcttaaggatggcgccaccggcccgttcaatatcgagctgttcaccggttccccggatgacaacaacgccaagtacttcttcaagggcgcttgggatctgctgcagccgtacttcgagaagggcgtgctcgtctccccgtcccagcacggtcagggtggcgtgaccaaggacttcaccgttgaggattggcagaagatctccgtgatgagctggaagaccgagcaggcgcagaaggacatggaatccatccttgactccacctacgcccacggcgagaagctcgacgcggtcctcactccgtacgacggcatcgcccagggtgtgatcaacgccatcgaatccaagcgtcccgacatgaagccgggcaccgactcctggccgtacatcaccggtcaggacgccatggagatcgcagttgccaacatcgccaaggataagcagggcgagaccgtgttcaaggacgtgaacaagctggctgacgccgtgtacgacatggtcgtcgagatcgccgagggcaaggaagtctccggcctgaacggcaagttcaacaacaacaacatcgacgtcccgtccaagctgcttgacccccagaacatcaccaaggacaacctccaggatctggtcacggccaactacatcacccaggatcgattcgacgagctgactaagtagtcctcatcaggcaatccgtaaacaaacacaatgacatgcggcgcatagccgatatgcgccgcatgtccatgaacacagaactgtgacgaggagtgatgacatgtcatcaaatgacaccatcttgacgatggaaaacatcacgaagacgttcggtccggtcaaagccctcaccgatgtgaatctttccgtcgatcgcggcgagatccacgccatctgcggcgagaacggtgcaggcaaatcgaccctgatgaacgtgctttcgggtgtgtacccatacggtagctattccggcaaaatcacctttgatggcaaggaatgcaaataccatactattaatgattccgaggccgacggcatcgtaatcattcatcaggaactggcgttgagcccgttcctgtccattgcggagaacatcttcatcggcaacgagcaggccaagggtggcgtgatcgactgggacaagacccgcgccgaggcgaagaagctgctcgatcgtgtgggacttcccgaagacccggataccagggttatggacatcggcgtcggcaagcagcagctcgtcgaaatcgccaaggcattgtccaaggacgtgaagctgctcatcctcgatgagccgaccgctgcactgaacgatgaggattccgcccacctgcttgacctggttcgtcagctacgtgacgagcagggcgtgaccagcatcatcatcactcataaactcaacgaggtcgccgccattgccgacaatgtcaccatcattcgagacggttcgaccgtcggtgtgatgtacgtgacgccggagacgccgctcgaccaggaagaactcatccgcaagatggtgggtcgtccgctgcacaacctgtacccgaaccacccctccaataccccgggcgaggaatacctgcgcgtcgaggattggaccgtgcatcatccgctcgacgcggagcgcgtgatcgtagaccatgcgaacatcaacgtgcacgccggcgagatcgtcggtctggcgggtctgatgggtgcgggtcgtaccgaaatggccatgtccatcttcggccactcttacggttccaacatctccggcaaggtgttcgtcaagggcaaggaagtcaagatgcccaacgtgcagtccgcgattgacgcaggtctcgcctacgccaccgaggatcgtaagggcaacggtctgaacctgctgcagaacatccgagagaacgcatccctggcctccctgaccaagatcagcaagggcggggttgtggacgacaaccttgagcgcaaggaagtcgaacagtaccgcaaggacttcaacatcaagtgtcatgacatcgatgtgaatgtctccaccctctccggtggtaaccagcagaaagtgctgctcgccaagtgggttatctcgcagccggacatcctcatcctcgatgagccgacccgaggcatcgacgtcggcgccaagtatgagatctacgaaatcatcgataagcttgccgatgcaggcaaggccgtcatcgtgatttcctccgagctgcctgagctcatcggtatctgcgaccgcatttacacggtgtcctacggtgtcgtcaccgacaatgtcgagaagaatggatttacccaggaatacctgatgaagggtatgaccaaggaaagggaggtggcagcctgatgagcgccgcaactgcaacacctgcaaagaaagaagaaaagaccggcctgctggccacggtcgccaacaatgcccgtcaatacggtattgtcggcgcactgctgatcatcgtcgtggccttcgagatcctgaccggaggtgtgctgctgaagccgaactccttcgtgtccctgatccagcagaacgcctacgtgatcatcctggccattggtatggtgatggtcatcatcgccacccacatcgacctttcggttggttccttggtagccttcatcggtggtgtgtgtgcactgctgatggaacgcgccggagtcaactggatgctcgccatcgtcatcgctctggtcgtcggcctgatcgtcggcgtctggcagggcttctgggtcgccgtcatcggcatcccgggcttcattaccactctggccggcatgttgatcttccgtggtctcgccaccgtgatcgtcggcgaatccgtgccgattacctccctcgaattccgtggcattgcccgtaactacctgcccaacatccttggctggtggggtccgttcgacggtctgaccattgtgctcggcatcctgtgcattgtcggctttgcctggagccagctgcgcaagcgcgcccgtgtggccaaggtcggcctggtgcccgagccgatgagcctgaccgtcctcaagattgtgcttgtcgcggtcgtcatcgccttcgtcacctacctgctggcttcctccggtaacgctgatcagggtggtaccccgatcatgctggtgatcgtcggtgtgctggtcttcatctacaacttcatcctgaccaagaccgtgttcggtcgccacgtgtacgccgttggtggcaaccgcaaggccgccatcctctccggtatcaacacccgccgcgtggacttcctgctgttcgtccacatgggcttcctgtccgcagtggccgctgtctgcatgctttcccgtctggcttccgcaactgctcaggccggtatggagttcgagatggacgccatcgctgcctgcttcatcggtggcacggccgtcaccggtggtattggtaccatcccgggcgctgtgattggtgcattcgtgatgggtgttatcaaccagggtctgtcgattatgggtgttgacaccgccgtggtgaagaccatcaagggcctcgtgctcctgctggccgtcgccgtggacatcatatccaagcgcaagaagagctgaccttcccctttctcctcctcgatgtgggattcgtgccggtgccgctggtgcggatcccacactgttatctgccgtcattcttgtaatcaaaggactttttccgccatgaaactcaccgcgcgctccacctcccgtatgtatgcattgacctgcttggcctgcgttatctggctctggcagtcactggtcgaggccaataacgatggctcgctgttcaattgggccactattgtcttctcgctgtgcttgctagtggtcatcggatggagtggttggaatgccgtcaccgggtggaacgccaaggagactgaggccgccacggcgggtgccaaggatgatgagggcagcactgatcggtaacgtatatacggctgttgttgccgggaacatataggtcccggcaaacctgcagcgatatgtgcattgcaagccagggatcccctggcttttttatgccgaaacggaactcgacacgggcgcgcaggtcgttgggtttgtctagagcctgcatgtagttacttatggtaatgactattggtaactaattggaggttgggccagcgatgtgcgattcccgaaccgataccaagaccggcttgcttccggtgaatgaggtgcggagcctcctggatgtctgctggaaggccaagaccatcaccgaactgatgccggcattgccgaaaggtatgaaaccgcgctatgtccacgtgatcgacgccgtctggcatatcaacgaaccgaatgggcaagataccggcaccgcgcgcgtgggcgacgtcagcgcattcctcggcgtcactacgccgagcatcaccaagctcgtcggcgaaatggccgacctcggactcgtcgtcaaacacgccgatgccgccgatcggcgtgcggtgacgctcacgctcaccgaacgcggcttggatatccgccgcatctatgtggaggaatatcacgcgcatttgagccaactgctgggcggattgacctcggaccagtgcgaaaccacggtacgcaccttgaccgaggctctgcgactcatgcaggaagacttccaacgtcgtagtcagaatatctgaatgaatggaggagagaacaagatcgtgactcattccgcaacacagctgcctaacggcggcaagcaaccggtctccaacaaactcgtcatcgcggtcgtctcgctcgcgatcctgaccttcctcggcatcctatcggaaacgtcactgaacatcgcctactccacgccgatggaggagttctccatcggcgcctcggtggtgcagtggcttgtcaccggttatctgctcttgctgtcggtgtcgattccgagctcgccgttcatggtgcgcaaattcgccaccaaaacactgttcatcatggccatcgtgattttcaccgccggcacattactgggcgcgctcgcggtcaacttcccgatgctgctcgccgcccgactggtcatgtcgctcggtaccggcatctccctgccgcttatcaccaacatccactggcacgaagaagcgtgattccaacatgcaacgccctattatgacttcgcggtcgtttttgcgcacaccgtctgaagcggctgggcccggcgacgaggcaactattcaggacctcgtggatacgttggaggccaaccgttcacggtgcgtgggcatggccgccaacatgatcggcgtgagcaagcgcatcatcgtcttcgtggacgaagatctcggtggccgtatcacggtgatgctcaaccccgtgatcaccgcttcggatggtgccttcgacacccaggaaggctgtttgtcgctgaccggtgaacgccgcacactgcgctgccgccgtatcgaggtcaactacgaggaccgtcggttccgcgcccgccacgccaccttcaccggctggaccgcgcagatcatccaacacgaagttgatcactgcaacggcatcgtcatctgattcattcggtgctcgttgcagcccaccccccccccgaggctggtcatcgcgattacgatgcaattacatcgcaaccgctatgaccagtttttttttatgtgcactggtggggtgggtgttctcagcggtgttggggtgccatgcgctggccggttggcttcgctgaggggtgtgggtggtgtcatgttgccagcggttggctggttggcttcgctggagggtgtgggtggtgtcatgttgccagcggttggctggttggcttcgctggaggttctctcagcgtcggtgatgtgccaaagagtggcgggctggcttcgctaaggagcgttaccgtcggtggagaaccagtgcgtgacctgctgccgacgctaagcgttcattaagcgtcgttagcggccaaaacttggacgtgtaacgatgctgggcggttttagcgtcgttgctgtgccaagttgtggtcctctgccgacgctgccagtgcagtagcgtcggcgttgggacaggtgttgggcctttgccgactctataagcgagggaaaatcattcgccggtgcctaagtgggtctattgccatgctgaatacatctgctgagtgtagctatgcgttcgaaggcgatttcgggacctttctcagtagcaaatatgcctaatgcgcggagttatacacttcaccgtgcacttatacacgccaaacgaagcagaaatcgactgctgacagtggacgacacgccagagacgatgtggataacccagagacggtggataacagctgcgcgatcagtggataacctgcaagaaagtgcggttatccaccgacggtagccactgttatgcacattccataccccttggaatcattgggttttccacttatccaccatctcgccatgcgggcttgcgggccaccgcacgaacgtcatacagtgtgcctcacggcgggcaacgtagcccgccgtccacatcacatgaaggggaaacaccatgagcaccgcaaccactactactgccgaaaatgccggtttgccagcaatgctggacaccaaagacgtagccgagatgttcaaacgctgcaatctcgccgtctatgccgaagcgagacgcatatattatcgcgaagtgaatctgaacccatgcaaaaagtatccgaagcaggtgctgcaaaggatcgaatggtggttctgggattggtttgcctatgactgcgccgtcagcggtattggactgaccggcaatgaatccgaagatttacgtatcgaattgcagcacggtccgggcgcaggtatctcgccattcctagccttggccgaattcatgtatgacaaggacgaacgtatcggcacacgcgagatacgtgattttcgcgaacttgatgacaccaatttcgcttcgatgttctggattcgcgatgccagcgcggtcaaaggtcgtctgacagttgaggacatcattcatggtggtgtctacgaggtggcggacgtacatgccgcctcgcaatacgatggtgcgcacggcggcatgatcgtcaatcgcatcgcacatgtgagaggcgtgtggcgatcctgttccatcccgatctatgaggcacgaaggcctgatgacccgcaaatcggtgattcgctggcccgttcattccgggaaaccggatataaaccggactttgccggtctggtgcggtttttctacgggagggccaaagacaccggtctcgactgggaagatgtggaagccgcgcgccaagccggtactttggacgcgctgatcaagaaggccagcaatcggtgaaggattcgcctaacgctgctgtccaagtcggcggccgcgatcacgaatgaagagtgacgcaaccaaacagaccgcgcacacaatggcgaccgtgcggaacgaagcccgcacgccaatggccgatgccgccgcttccggcactccggtgcgcatggccgccgcggtgtgcgtgttcatgatggtgaccagcagcacagccgcagacgtcatgatcgcgaagcccagtaaggcgagcggccggccaccgatacggtcatacatcttgcttgccaccgggttcaggatgcccatggcgatgccgctcggcatcatcaccagaccggacaccagtgcattaacgccaagatcattctgcaaatatgcccattgcgtacaggaacagctggcgggtggtgaaggtctcgatgaggaacgcggtgatcgggatcatgatgccgttggtaagcatgaatccggtggtcagccattgcacggtgctgctgggcacgtcgaactcgtgcatcaacgtgggcagggcggagatcatcagcgtttggttgaggatggccacaaacgagccgatcatcagggtgatgaccatggcggtggtgttggcgggggtggtgctgttggagttggcggggtggtggagccggcctcagcggtggccggcgaggaattgcgtgacgtcaattatcaagtctcgttttcttggctgagttgtctttcttggcttgcccatactatctgtgccttgactgcattcgaaaaccattgcaatgactagcaacacgctgagacgcggcgtattaattcaatcatttgacaaacttagttcgttcgttttattattggtcctgcaatccgtaatatcgcctactgcaaaggagcgcccaaatgggtctgtgggatgttgacaagatcgagtacgtcggccgcgccaaaggaccgaaggaagacttcgccttccattactacgatgccgacaaggtcgttgccggcaagaagatgaaggattggctgcgcttcggcgttgcttggtggcacaccttcaaccaggaactggttgatccgttcggcaccggcaccgcgcaccgcccgtactacaagtacaccgatccgatggaccaggctctggccaaggtcgactacgccttcgagctgttccagaagctgggcgtcgagtacttctgcttccacgatcgtgacatcgcccccgaaggcgacaccctgcgcgagaccaacgccaacctcgacaaggtcgttgacaagatcgacgagaatatgaagtccaccggtgtcaagctgctgtggaacacctcctccctgttcaccaacccgcgcttcgtgtccggcgccgccacttctccgttcgccgacatctacgcctacgccggtggccagctcaagaagagcttggagatcggcaagcgcctgggcgccgagaactacgtgttctggggtggccgcgaaggctacgagaacctgtggaacaccgagatgaagcgcgagaccgaccacatcgccaagttcttccacatgtgcgcagattacgccaaggaaatcggctttgaggcccagttcctgatcgagccgaagccgaaggagccgacgctgcaccagtacgacttcgatgccgccaccgccatcgagttcctgcgcaaccacgacctgaccgacgtcttcaagctgaacttggaaggcaaccacgccaacctggccggccacacctaccagcacgagatccgcgtggcccgcgagtccggcttcctcggttccctcgacgccaaccagggcgacaagctcatcggctgggatatggacgagttcccgaccgatctgtacgagaccgtcgccgtcatgtgggaagtcctgcaggccggctccatcggacctcacggtggtctgaacttcgacgccaagccgcgccgtacctccttctacgaggaggacctgttccgctcccacatcgccggcatggatgcctacgccgccggcctgctggttgccgacaagatgaaccaggacggcttcatccagaatcttcaggccgagcgctacagctcctacgactccggcatcggcaaggacatcgacgagggcaacgtcaccttggccgacctcgaagcctacagcctcgacaagccgcagtccgagctcatcgccgccaccaagtccgatcacctcgagtccgtcaaggccaccatcaacaactacatcattgatgccctggctgaggtcgagtgaccatcggtctgaccgattgaattcgctccatcgggcgtgtacacatcaattatgatgccagtgcgcccgatgggctgattcgatagtttcgccatgtgcggtgttgtgttatgcccgcatggcacctttccattccttctttctcctttctctccttccgctggaaaaccgcctgaggcaacgtcgccaagggcggttttctggttgtggcggggctgggggtggattggggtgggggcgaacatgttcgcggaggggtgcgttgacggtgacgtattggcgacggtgaacatatcggcggcaggagaagataagctgttctcaggggaacatcagcacaacaaaggagttacgcatgcgagatttcattttccataacccggtgaagatctacttcggcaaagggcaggcgcgccatatcgcacaggaggtggagcgtgtcgagggcgccgttctggtggtgtatggcggcggatcgattaaacgcaacggtgcctatgacgatgtgatggctgcgctggcaggaaccgggcgcaaaatcatcgagctgcccggcgttacgccgaacccgcgattggacaaagcgctggaaggcgtacgactggtcaaggagcatggcgtcggcctgattctggccgttggcggtggctcggtaatcgactgcgcgaaatttatttcgttgggttccggcatcggtgacgatgaggatttgtgggatgactacatcgaaaccggcaaaccggcacctgaagggctgattccggttggcgtggtgctcaccaccgcggcaacgggctcggaaatgggagatgcggccgtgctcaccaattgggaacgtaaccgcaagctcggctatacgtcgttcccgctgatgcccaggttctccgtgctggatccaagctacctgatgacattgcccgccgaacagacggtgtatggcttcgaggacatgttctgccacacgtgtgagcagtatttctcctatccggtggacgacaacctttccgacgaaatcgccgagggaatccaacgtcatattctgcgttcgtggcgagcgtgcttgtccgatccgaaagattatgaggctcgctccaatgcaatgtgggattccacgttggctctgaaccgcattatctcgcgcggcaaggaagaggattgggtgacgcacggcatcgagcacgcgctgtccgcatacaccgatatcgctcacggtgctggtctggctgtggtccacccgcattggatggcatacgtgtatttggtcaacgatgaggtgacggctcgctttgcccgctgggcggtcgacgtgtggggtgtgacgcccaccggcaaaaccgatcgcacggtggccgaggaaggcattgatcgctatgtcgatttcctgcgtcgcgtaggtgcgccgctgactctttctgaggccggcgtgcccgacgatcccgcctctctcgacaagtacgccgatcatgccggtgaggccggcggctcattcgtgcagattcaccgtgacgatgcccgagcgattctcgaggcatgcaaggaaccggtgtcgttctgacggttggactaatcccgtgatttgagccgccgcgtgctgtcccgcaccaccaaagacgtagaaagaaccacgcgcttctgaatcttgcgtccttcattggtatcgatgaccatgcgggctgcagtggcggccatgtcttgcaatggctggcggaccgtggtcaacgccgggcccatgtacgcggcggtctgtatatcgtcgaatccgataacggacagatcttcggggatacggattttcagttgacgggccgcctcgtaaacgcccatggcctgtaggtcattgcctgcaaagatggcggtcgggcgactttgttcgtcttcaagtaacgccatggctccttcgtaaccgcctggcgtggtgaaatcgccttcggtgatgagttcgggagaggtggggatattgcgttcggcgagggccgccgaatagccgtcaagccgggcacgtgagcagagcatttcatccggtccggtgatgatgccgatgcgcttgtggccgagttccagcagatgacgggtggcgatgacgccgcccatccagttgtccgcctgtacggagagatcatctaatgccggattgccggaagggtcgaagacgacgaaaggaatgccgtgtgattggaacatgctgcgttccttgtccgtcaagttggagaacaccagaatagcgccaatgggctggcggtcgatgatgccttcaacccaggaagagtcggggtgctgccggtcgccactttccgcaaccatgacattgatgttgtgcggcttggcctccgtgatgatgcccctgagcacctccagcgcccaaatggtctcaaaatcccgaaataccacctcgatggtgcgttgtttacgggagggggagacgcggcgaatgtagccgttgtctttcagggctttgtcaatggcctgccgggccgcctccgaaatatccgccttgccgttcagggctttggacacggtggccagtgagtagccagtctgtttggcgatgtctgcaagtttgaccttgttctcgccgttgcttttgcgctgttctgccgacgccatcattgaccgccttcatcagagaatgttggtatcagtatattcgaaactttcgtaaagtcaatttgacgataaagaatggtatgtatagataaaaaaggttggaatttcaacgattttgatagtaaaaaagccgatataaatttcgtttgaccgtcaaactaaggctctttatgataaaggtatcgaaaacataaagcgagttttcggtaaagttgaagaaggctgatggggtaggtgaaacggcgaagtttcactgaaaacatcattaattaccagctgttagatatgtaactggctgatatacctttcgaaactttcgtaaatcgcggatcggtttcatgctggtcaagaacaataaggagacgacaatgaagttcaagtccgtggccgccgcacttctggcggcggtaacctgtgtcagcatggccgcttgcgggagcggcagcgacacgaacgccgatggcaaggtggaaatcaccatgtggcacaactccaccactggcgacggcaaggcatactgggaatccgccgccaaggcgttcgagaaggaaaacccgaacgttaccatcaagatcgaagccattcagaacgaggatatggacggcaagctgcagaccgctctgcaggacccgaattccgcccccgatatctttatggcgcgtggtggccagaagctacgtgatgtggtcgaagctgggcaagccatggacctgaccgacaagatctccgacaccgtcaagaaccagatggccactgctgaagccaccggcaccatcgatggcaagatctacagcgtgcagcagtcagtgcttcccggcggcatctggtattccaaggatctgttcgagaaggccggtattactgaaactccgaagacctgggatgagttcaagaccgtggtgcagaagctgaaggacgccggcatcacgccgattgccgtaggcggtaaggacgcctggccggccgcccactggtggtactggttcgcactgcgcgaatgctctgctgacaccttcgacaaggcccagtccgataaggacttcagcgataagtgctggacccgtaccggtgatgatgtgcaggcgctgctcgacctcgatgccttcaacgatggcttcctgaccactccggcccagcagggcgcaagctcctccgccggcctgctcgccaaccacatggcagctatggaactcatgggcggctgggagcccggcgtgatcaaggacctgactccggacaagaaggacatggccgacctcggctacttcgcattcccgaccatggacggtggcgaaggcgatccaactgccatcatgggtggttccgatggcatggccgtgggcgagtgggcgcctgaagaggctgtggacttcctcaacttcgtctccgagaaggaatggcaggagaagtacgctgaggcgttctccaccatcccggccaacaaggaagcccaggatgtggtgaccaacgaggctctgaagcaggtgctgaccgtctacaacgacgcatcctccgtgtccatgtggctcgacaccgtgttcggtcagaacatcggcaacgcactcaacgaaggcgtggtcaacatgatggccggtcaaggttccgcccaagacatcgtcaagggtgttgaaaccgctgcggccaagggctgattcgctctgacccgaccgtaattcccgggctgcgcgaatgcttgcacagcaacaaccgcggcccaatttgttttcttaggaaggcctcaacaatgtcagtttcagcaggcgcgagggtacagcgccgcacgtcgggcttaagcgacaaggctcgcaaacgtatcgaaatcaccatcctttcgcttcctgccctgatcatgttcctcggattcgtcatcctgccggtgttcatggccggctactacggattcttcaagtggaagggctatggcaagcccaccgtcaacggccagttcatcggttttgaaaactacaagatcattctgaccgacccgaacttccagcaggcattggggcacacgctattcgtggtcgtcgcttcgctcgtcatccaggggccgctggccatcctcttcgccctgctgctcaaccagagattcaagggccgcgcactgattcgtaccctgattttcgtgccgtacgtcgtttccgaagtcatcgttggcaccggctggggcctcatcctccagaccacaggcgcattgaatgcgctactcaagaaaataggacttggcggggcggactggatctccgatccgaaaatcgccatctggacattgatgttcatcatttcgtggaagtacatcggcttcgccgtcatcctgatgattgccggcatgcagtcgattcccgaagacctctatgaagccgcgaaagtggatggtgctggattctggcgtcagcagtggagcatcaccctgccactgctcggccccaccattcgtatctgggcattcatgtcgattatcggttctctccagctgttcgacttggtctacatcatctggggtcagtacgtgtcgtctaccgcaggaacgtccaccatggcaacctacatggtgcgcgaaggtcgactcgccaacaactatggttacggttccgccgtggccgtggtgattttcatcatctcgctggtcattgccttgacctaccagcggttcgtgcttaaccgagatctcgaaggtgcgctcactgacgagagggatgccaagcgtcgtgccaagcgtgcggcgaaggaagcggccaagcttgccaaggtcaatggcaatgccgcagcagttgcaaatgaggtggtttcacaatgacgaccgcagtctccccgtccgtaggcaagggcaagaacaagacctatgatccgtatacactgagaaaatccgcaaagaccccgtggggcaacccggtcgtctacttcttctcactgctgcttgtggcgctgtgcgttggcccggtgctgtacatcattatcggcggcttccgcaccaattcgcagattacgagggacccggccggctggcccgatccatggaactttgagaattacaagacggtgttcacttcgaacatcttctggtcggaactcgtcaactccctgatcgtctccattggcacaatggtgggcgttgtggtgctggccttgatggtgagcttcgtcattgcccgatacgagttcaaattcaacaaactgctgtactcgctgtttgccgccggcatgatgttccccatcaccgtggccatcaccccgttgtatctgctgctgcgcaatctgcacctgatcaactcgcatctgggcattatcctgccccagatagcattcggcctgccacaggccatcatcatcctggtgccattcctcaagtccattcctaaggaactggaagaagcggcagagctggacggctgttctcgcatcggcttcttcggccgtatggtgctgccgttgagctggcccggcgtggccaccgtcggcatcctgagcttcgtgagcagctggaacgcctacatgctgccgctgttcctgctcaacgattccagcaagtacaccttgccgctcggcgtgcagatgttcagctcccagcattcagtcgataccgctcaggtactggccttcacctcgctgtcgatgatccccgcgctgatctgcttcaccattttccagaagaagatcgttggcggcctgaccggtgctgtcaagggctagtcgcagcaaccataaccgtgccgtggaaaggtacatggctctttgggccgattcctttcaacctcttcctttcctcctttccacggcccctttcttttcaatgaggagaagaccatgaagatctccaatcccgtactccccgggttcgatgcggacccctcgatgattcgcgtcggcgacacctactacatcgcaaattccacatttgactggtggccgggagtccgtttgcatgaatcccgcgacatggttcactggaatctgctgcccgggcccttaaaccgcgtttcccagctggatatgaagggcaatccctccggtggcggcatctgggcaccggacctgtcttatgcggacggcaaattctggcttatctataccgacgtgaaaatcgtcaacggcgcgttcaaggattgcgcgaactatctggttaccgccgacgacattcgtggtccgtggagcgatccgattcgggtcaatggcgtcggattcgacgccagcctattccatgataccgatggacgcaagtatctggtgcagcaaacctgggacttccgtgaatatcatcatccgttcgacggcatcaccttgactgaattcgatgtcaaaaccatgcaattgaagccggaaacagcgcgcaccatctggcgcggcaccgatgtgaaattggtcgaaggaccgcacctctacgccatcaatggctggtactacctgttttgtgcggaaggcggcacccaatacgagcaccaggagtccgtggcccgttcgcgtaccttgggtgagctttcattcgaaagcatgccgagcaatccgttcctctccaacttcgatacccccggcacctacctgcaaaaacaggggcatggggcgctcgtggatacgcctagcggcgaatggtattacgcttcgctgtgcggcaggccctggcggcacgagaacgagccggctcatggtgtgcgcggctggtgcacgctcggccgagagacttcgatccagaaggtcgagtgggatggcgacggttggccgtacgtggtcggcggccatgggggagagcgttacgtcgaagccccagccgacgccatcgcaaccgaggcccctacgaatcatagtcagcatgacgagttcgaatcaaacaaactcgacctcaactggaacaccctgcgcgtaccattcaccgagaccatgggccgcgtgggcggcggctcgctgaccttgcgtggtcaagggtcgctggcaaacctgtttgaactgtcgctggtaggacgccgttggcaggcgttcgatttcaacgccgaaaccaaggtgacattcgatccaagcaactacatgcagatggccggcctgaccaacttctacaaccacctgtgctggtcatgggcattcatcacctgggacgagaagcgaggacagcgcgtaatcgaagtcgcccagaacgatttcgatacgtacacgtcgttcctcaaagacacagccatcgccattcctgatgacatcgaatccgtatggttgcgaaccaaagtgcgtacgcgtacctacacctacgagtattcgttcgatggcaagacatggcatgagattccggtgacgctggacgccgccgtgctctccgatgatcgtgtggcccaacgttatggcggattctttaccggcgcgttcgtcgggttggtggccgtggacctttccggatacggcaaagaagccattttcagccatttcgattacatggaaatatgatgacgccaggcggctttcctgataatcagggaaagtcgcctgactattcggtactggggaatgaaaggcgacacttgtggcaagcgacaatgaacattgcggcgaccgtggccgcgaatgtaccataaccgtctccaacccggtgttgcgtggcatgtacccggacccgtcctggatatgggatacgacgcgcgaggaaatcgtgctggtcaactcctcgtttgaattggtgccggggttgcccattcatacgacccgtgatcttgtgacgtggacgcgcacggcgaatgcggtggatgaggcgatgtctcatcggctgctcattgatggcgtcgaggattccggcggcctgtacgcgccgaccattcgccgtatcggcgggcgatatgtgatcgtatgcaccgtggcccgcgtggatgaggtgaaggcgctcgctgcgggatgctcgcagaaggatattgataactgccgtgacgcccaaggcaatttcgtcatcgaggccgatgagttgaccggaccatggcgcggcccgtactgggtggccggggccgaaggcattgatccggacatctttgaagacggcgatggcacagtgtggtggacgcaaacgcgcccggcattacacccgcagtgggatggtcaaaccgagatctggacgcagcccatcgccccaggcgcgtggacgttgcaagaccataaaaccgtgatttggcgcggctatggcatggatgcggtatgggctgaagggccgcatttgtaccgggtgggcgattacctctacctgatgaccgccgagggcggcaccagcttcgagcacagtgagatgataatgcgcacgcacgcaccgcgcggattcgcggcggcgctcgccggttttgagaagaaccttgctgcgcaagatatctggattgagctggcgcgtgacggtgaacgaagcgtggtgggccgcgatgaccggctgtttgaggcttgcaaacgcaatccgatcctcacacaccgtcatttgggagcgggggagctagtccaatgcgttgggcacgccgatctgctgctgcatccgaccgtcggctggctgctcgtgtgtcttggcgtacgcgagactccgggcgaggaacccggagaaacgttcagctactgtggccgggaaacgttcgtggcaccggtcgtatggcagcacaatccggtctcgtggaagctggacggtggggagccgaataagcgtatcgatatcgacgatcccggttggccggtcgtggctccggggcttggccggcttcccgagaagttggtcgtggacgttgacgaggatggattgccatgtgcagtgaggggtgtggattctgcggggtgtgattgcgctgctggtaataatgccgcatgccctgctgagctcatccagctcgacgatacccgcctagtcggcgttcgaggccgtgacgattaccggttcctgcgtgtcgacgggcaggaatatgccgcgttcacccggcccgaatacacgatgatgatacatcaggattccacccatgctgtcatggtcatggcggaagcggaatccggccaattgacggccgaaatcaccgataggggagataagcggtgcattgcgcttggagcgcttggagccaacgaatggttcggattgcgcttgcatggcaatcgtttggaattccttgccgggcagcctgcatctgacagcattgatgagggaacaatgcctgatattgcactaattgcgcacgcggacgttacttatgctcgtatcatggcagattgtgatgcgcgattcctcagtaccgaatgggccggcggattcgtgggttgcctgatcggcgtaaaacggcggtaatggtctcagcccgctctacaatattgtgcaatcatattgtttaatcgttaaacaaatgcaagggggcaatcgatggcgcacgatctcgaacaactcaagcaagatcacccggatgtggcgaaactgttcgccgatgactggttgcagtaccgtaagtcggagattttgccggaacttacgcgcgaggcgcagtccacgtgcgatcgcatcaatcgcatctactttgaagacaccgccgaagctgagcgactgttccgcgaactcgtgcccgaggccggcgagggcgtggacttccgcccgccaatccggcttgattacgggctgggcctgaaaatcggagaccgtacgttcatcaacatggacctgctgattgtgggcggcggcccgatctccatcggctccgattgcctgatcggcccgcgcgtgagcatctatacgccaaaccacgccatcgcccgcaagcctcgactggaaggctggcagcacaacgccgacgtgaccatcggcaacaatgtgtggctgggcggcaatgtggtgatctgccccggcgtcaccatcggagacaactcgattatcggtgcgggcgcagtcgtcacccacgatattcccgccgattccatcgccgtgggcaatccctgccatgtgattgccgaagtcccggatgactggactcctgaagagcgggccgctgccgagggtcggtaggtttgctgctctgaccaactgttacggcgaaaccgggatacaggagagaaaggaacaatgcaatgacgcaatatcatgtttccgcgcaggcggcgaagacgaacggcgccggcagcgcggccgacccgtttctgaccatcggccaagcggcggccatcgcccgagccggcgatgaggtggttgtgcatgccggcacctatcgggaatctgtcgacccccgattcggcggcgagagcgccacgaaccgcatcgtctatcgtgcggccgcgggcgaaccgcgcccggtaatcaccggctccgaacgtatcgacacatggcagcccgaaggtgatggcgtgtggaaagccgtaatcctgaacgcattcttcaacggatacaacccgtacgtggaaaccgtattcggcgattggaccgtatacccggacccaaaggtcgaggtacgccacctgggcgatgtgtatctgaatggcaaatccttctacgaagtcgcctcgctggacaaggtgcgcaacccacagcgttgggataccggccgtgacgccgccaccgattccatcgtgccgctgattgatccggataccaccgtgaacgtgtggtgctgtgcggtcgatgatgaggccacaaccatttgggccaatttccatgaagccgacccgaatgcggaacttaccgaaatcaacgtgcgcgagacctgtttctacccgagccgcccgttcgtcaattacattacggtctccggctttgaaatggcgcaggcggcctgcccctacacgccgccgactgccgatcaggtcgggctggtgggcccgcattggtcccgcgggtggattatcgagaacaatcgcattcatgacgcaaaatgttcggcgatctcgctgggcaaggagatctccaccggcgacaacgaatcgacgcgcactcatcgcaagtccgggtaccaataccaaaaagaggccgtctacaaggcgctgcatgccggttgggagaaaggcgtagtcggcgggcacgtggtgcgcggcaacgtaatctacgactgcggccagaatggtgtggttggtcatatgggctgcgccttctctctgattgaaggcaaccacatataccacatcggcaccaaacgcgagttcttcggctgggaagtggccgccattaaaatgcacgcagccgtcgacgcggtggtgcgcggcaaccgggtgcatgattcggtgctgggcatgtggcttgattggcaggcgcagggcaccgtggtggattcgaacgtgttctaccgcaacacgcgagatgtgatgaccgaggtgacccacgggccgattacgtttatgaacaacgtgtttgcctctgagttcagtttcgacgactatgcgcaaggcgcggcgttcgtcaacaatctgttcgccggtcgcattcgtcacaccgccgtcttggaccgatccacgccataccatttcccgcacgtcaccgatgtggccggcgaggcattcgtctacggtggcgatgatcggtacatcaacaacctgttcttggctgtgggcgattccgccaaaccgttgcgtaccgcggatgccgccggtgcggccggtatggcggaagccggaaccgcgttctttgacggctatccgtgctcgcttgcggagtatgaacagctgattgaagaggccggccttggcgatgaggagttgtatcgcagcgtgaagcagccggtattgctggcttcgaacgcctatgtttcgggcgcgaaggccgcttccagcgaagccgaggctgtggtgagtgatgacggctcttcgttggcattgcgcgaaaccgatgatgagctatggatgaccatctcgttgcccgaatcgattcggtcggcgactggaccggtgatctccactgctgatcttggccagccgcgcatcgttgaggagtatttcgaaaatcctgatggttcgccgattatcgtggaccgggatgtcaccggtgccgtgcgcggcgagcgttcggcccgaggcccgttggcggaatatgacgatagggaagtacttatctggtcgaaatgacggaatctgcggtttacggtttgcagcgcgacatcatgatctggttgctggcctgttgaatggccttggcggggtcaatctgccagtgtttggcaggttggcttcgctgaggggtgttgtgtggggtcgttttgccagtgtttggcaggtcggccccgctgagaggtgctgttggagccgggccgccaatgtttggcaaatcagcccttttcggtttgcattggtaacaaattcgatatatggttaaatcaacgaactaaatattgtaagtccatgcgtacctacgcaacgtcaatggagatactgctatgcgcgcacatcgtattttgctgctctcgctctgcctgttggccgtggcctatgccgtcctgctgtttgttgcgccggccgccgcgccaatcggcatcgcactgaccgccgccggtctggtgctggtttcgacacgctatgcgtggcgtgccaagttcctcgcgttattcaacgaagcgtgattgatgcatcacggtgattgactggttcggttcgtcctaggactcccatgcaattcccggccaattcgcctgtcgcattatgtatcgtgcggttatatggagtcatggccgcaaggcctgacaattgaatcttcatcctctcttctcctttgaagcccggcccgccgctgggctttttctttggtcggcatgtcggggcagtgactggtatttttgtgaccgatctcatggcttcagtttcggcgtgtcgttatttccgacgaatcgtatcgataaaattcatgtttcgtagggtctataaaaatgccggaaaatcagcgttgttaccgctcacatttagttaatcgaatgaatcaagtatgccataatccgctcagttgtggggaaaataggcgatatcaaattgttaaatcaaaaaactaatggtatatttttatgcaggttcggcaatggttgcctgaccaaaaggaagaggaaacaagttcctatcaatgtcgaaaggaatccccatgaataagtggaccaaggtgcttggtgtggttgccgcgaccgccatgttcatcccgctggccgcctgtggcggtagccgtggcacgaccactgccggtggcaacggcggtagctccgacaccgtcaaggtcggtatttcgatgcctgagcagatgctcgagcgttggaagatcgatggcgagaacctgaagaagcagcttgaaggctacggctacgacgtcaccctgcagtatgcagatggcaagaccgatctgcagacctcccagattcagaacatggccaacaacggcatgaactacgtagtcatcgcatccatcgacggcactgcgaccggagctgctgccgagcaggtcgcctccaacggcggcaaggtcattgcctacgaccgtctgatcatgaacaccgacgccgttgactactacgccaccttctccttggaggatgtcggcaagatgcagggcgagtacatcgagcagaagctcggtctgaaggatggcaagaagggcccgttcaacgtcgaactcatggccggttccccgaccgataacaatgcaggctactacttcaagggcgcttgggacgtgctcggaccgtacttcaagtccggcgtgctgcagtccaagtccggcaaggttccttcctctgctgatgattggcagtccatcggtatcgataactgggatcgtcagaaggcccagaacgagatggagaaccgcatcaactccttctacaacgatggcaccaagcttgacgccgtgctcgcccagaacgacgccgaggcaaccggtacctacaacaccgtagaggccgctggctgggactactacccgatcatcaccggtcaggacgccgagaaggccaacgtgcaggccatcgtgcagggcaagcagtccatgaccgtctacaaggacacccgcgagctggccaaggccaccgccgaaatgatcaaggacatggtcgatggcaaggatccgaaggctcctgacaccttcaacaacggcactaaggatgttccgtcccagctgctgaccccggtcaccgtggacaaggacaacctcaaggaaatcctcgtcgacggcggctacatctccgccaaggatgctggcctgtgatccgcaggatcgctgattcgattcatccaacggcctaacggctaacagataagggggcgccgcgctgcgtggttgcggtacggtgccttcatcatgcacaggggcattactatcggaggaggtaactgtggctacgaacggtgacgtgattttggagatgcgtcatatcgtgaagcgtttcggcccggtcaccgcgttgaacgatgtgaatatcatggtcaagaggggccagatgttctcgatctgcggtgagaacggtgcgggcaagtcgaccttgatgaacgtgttgtcgggcgtgtacccgtacggcacgtacgagggcgacatcgtgtacaacggcgagacgtgcaagttcaggacgattcgcgattccgaggagaagggcatcgtgatcatccaccaggagcttgcgctggtgccgtacatgtcgatccag

SEQ ID NO: 928 - DNA, 10362 bp, Unknown
  R117_24m  MAG No. k141_8815
atggaccagtcgtgagtcggagaacatcggatccatcggacgattgacaagatcatcgatgagctgaagcgaatcgtcgttggttttacggcgacgtctggtgcggatggcggcggcgtcatccggggaaagcgcatgatgtgattccgcgcctcggactgagtgggagaacacggcgcggcgtcgtaccggctcagtctccttgggtacggggaatgagaccggggccgtggcctcaagcgccatacttctcccccagttccttgcgtagcaatccgacgccctgcttggtatagatatatccggcgagccaatacatggcgatgccccagatgccggcggccagcgcggcgatgtagagcaagtggaagaacgtactggtgcccaaatcggcgaaaataagactgacgatggaaatcatcagcagcgcggtaccagccttgcccacgaaatgcacgggcagcggaccataaccgtactgggcaagccatagcacctgaatcgccatccacagatccctcagtcccacgataatcagcatccaccatgggatgatgccggcgacgctgagagccagaatcgagcagaaaatgagcagtcggtcggcgatcggatcaagaatctgaccgatcttgctcacttggttgaatctgcgcgcgatgatgccgtcgagtccgtccgaagccgaggaaatggcgatcagggctagcgccgcaatcatctcgtgcttggagatcagcacgctgatgaaaggaatcgagatgattcgcagcgcgctgatcaaattgggcacggtgaaatagatgtcacgtgcttccggactgtatctggcgttgactttctggttggtcatatcgactaacagtctacatgcgggaggcttgcagagcggtaacgatgatgccgcgtgcgccgacttcgtacaaatcatccatcagctggttgaccttggccttgggaaccatgactcgcacggcgttccactgtttgtcatgcagcggggagatcgtcgggctttcaaagccgggggtcacggccacggcggcggcgaccttgctgatcggaatgtcatagtccatcagcacatactgatgcgcagtgagcacgccttgcagacggcgggtcagcacggccagacgcggatcctgctcgttcagacgcggcgagcgaatcaggcaggcttcggagtgcatgagcggttcggcaaacacgcgcaggccggcgttgcgcagggtggtaccggtggagaccacgtcggcgatgaggtcggccacgcccagctgcacggaggattcgaccgcaccgtccagatggatggtctcggcctggatgccgtgctcgaccagatagtcgtgtacgagcttatcgaatgtggtggccacgcgcttgccctgaacatcctccagagtggtgatcggggattcgttcggtgcggcgaaacggaaggtcgaggtaccaaagccgagcggcatgtgctcgagcgcggcggtaccggagttcttgagcagatcctggccggtgatgccgacgtcgatggcgccgcggcccacgtatacggcgatatcgagcggacgcaggtagaacagctcgatgccattgtcgggatcttgcacgaccagctggcgagggttggtgcgcagacggtagccggcctcggccagcatgttccacgcgggttcggatagcatgcccttgttgggcactgcgattctcagcatttgcgttcctctcacaggtgcttgtagacgtcctcaagcgtcaggccgtgcttgatcatcatgacctggacgtggtagagcagctggctcatttcctcggcggtgcggtccgcaccctcgtattcggcggccatccaggtctcgccggcctcttcgatgatcttcttgccgatgaagtgggtgcccttgtcgagctcgtcgacggtcagggagccttcggggcgggtctgggccttttcggacagttcggcgaacagggattcaaacgtcttcatgtgattcagattcttttcttgcggttatggatgaaaggtggattgcggttcaggcttggagctcaggccttgaacgcggcctcggccttggtgcggatgtcgtcgatggcctgggcgggattctcggcgccgtacacggcggaaccggcaacgagcacgtcggcgccggcctcggccacgatgtgcgcggtcttggggctcacgccgccatcgacctggatgcgggtcttcaagccacggcgggtgatctcatcgcgcaggcggcggaccttggccatctggttgtcgaggaacttctggccgccgaagccgggctcaacggtcatgatgaggaccatgtcgaactcgtcgaggatatcgaagatcggctcgaccggttcggccggacgcacggcgaagcaggccttgcagcccatctcgcgcagctgtcgggccagacgcacgggggcgtgggtggcacccatgtggaaggagatggaggcggcgccgagcttggcgtattcgggagcccaacggtccgggtcctcgatcatgaggtgcacgtcgaccggcagatcggtgacctgacagatgcggccgacgatcggctcgcccagggtcaggttcggcacgaaatgatgatccatgacatcgacgtggaccaggtcggcgttggcgatggccttgagatcacgttcgaggttgcagaagtcagcggacaggatgctgggtgcgattgcgatattgctcatggtttcctaccttatctgtgcaatgggacttggggtcccgtgtttcgcgctgtttcggcgctgtttattgtggtgtcacttagtgcgcttggcctgcttcttctggcgaagctgttcctcttcgatgctctggcgttcgagctcgtcggcggtgaccgccgcaagcccgcgcgcctgcgccttggggtccggaccgtactggtagagcacgacgaacaggatacagccgagaacgaagacgatgatcgcggtccacacgttggtcctcaggcccaggatcaccgtggagtagttgatgcgcacgttctcgatccaggtgcggcccaagccgtaccacatcaggtacatggcgaactgctggccggccttgagccggtcggcgagcttgtggccgaggtagatgatgagcgcggcgccgatgaggttccagatcatctcgtagaggaacgtcgggtggaacagcgtggttctgtagtccgggcattgcgcgccggaatagcagatttcggatttgccgatggcgtccgcgtcgttgagcttcaggccccacggcaacgtggtgggccagccgtagagttcctggttgaaccagttgccgagtcggccgatggcctgggccacgggcagcgcgggggcgatggcatcggcgaagatcgcgaacggatagtgcttgtggcggcaccacaggaacgccaccaaggtgccgacggagatgccgccgaagatggccatgccgccttcccacaccttgaggatgttgaccaagttgccggtgggcgggaagtagtcggccggcgtggtgatgcagtggtagaggcgcgcgcccaccagcgcgcagggcacggtgacgagcgtggtgtcgagaatctggtcgaaggtgccgccgtaccgcttccaacgtgtggtgaggatccatacggccacgcagatgccgatcaggatgcagatcgcgtacatgtggatggtgaatgggccgatctcgaacttggagaaggtcggcgagggaatataagccagattcatcgtgcctctacttgctggtgctcatggtgtgtccacgcgcgggttgtgcttgatgctctgtgactaccctaccgtgtcacggcacaacccgcgtgaggcgcaccgggtgttcaccgggcgttgtggatgccttcggccagttcctcgctcttggcggcgagcagcttcaagccttccttcgggtcgcgtgcggtcttgttgtcgtccgcgagcagggtgtgcacgagcacggagccgacgatgacgccgtccgcgtaggagccgaccttggcgccctgttcggcggtggacacgccgatgcccacgcacacgttctcggcaccggcctgacgggtgcgctccacgagcagttcgggcgaggcgtcgatggtggcgcgttcgccggtgacgcccatgcgggcggccgcatacacgaagccgcgcgcgttgcgggccacggtttcgaggcgctcggtggacgagtccggggagaccaggaagatgcggtcgagtccgtgacggtcggaggcttcgatccactcccccgcctcgtccgggatgaggtccggggtgatgaggccggcgccgccggcgttctcgaagtcgcgggcgaaacgctcgacgccgtagtggtacacgaggttccagtagctcatgatgagcggcacgccgccggcgttggccacggtctcgacggcctcgaacacgcgcttgatggtctcgccgttgttcagggctatggaggcggcagcctggatgaccgggccgtccatgaccgggtcggagtacggcaggccgatttccacggcgtcgacgccgtgctcgaccatcgtcttgaaggcgtcaagcgagacgtccgggttggggaagccgtagggcaggtagccgatgaaggcgggcttgttctcggccttgaacttggtgaacatagcgcctgacttgctgggcttgtggctgatgcccagcggctggccggacggcgtggttgcttcgttggtcataatcaacaatctcctcttcttgttcaggcgacagtattgccgtgggcgccggtcacatcaagcgcggcggcctgatcgtcggtcaggtagccgaaccacttgccggcggtggccatgtccttgtcgcctcggccggagatgttcacgatcatcacggctttgtcatagcccttggctttcagatcggcggcggccttgtacgcgccggccacggcgtgcgagctttcgatggcggggatgatgccctcggtctggctcaggtcgcggaaagcgttcatggcctcctcgtcggtggcccagctgtagttcacgcggccgatgtccttgagccatgcgtgctcggggcccacggaagcgtagtcgaggcctgcggagatcgagtaggtgtcgagcgtctggccttcgtcggtttccagcaggtagctcttggcgccctggaacatgccgagctggccggtgccgggggcgaagcggatggcgtgcttgccggattcggggccgttgccgccggcttcgtagccgtagaggttcacgcgctcgtcgtccaggaaagcgttcatcacgccgatggcgttggagccgccgcccacgcaggcgcagatcgcgtccggatggtcgatgccgtaccagtcctggagctgctgcttggcttcctcgccgatgatcttctggaagtcgcgcaccatggccgggaacgggtgcgggcccgcgacggtgccgagcaggtagtgcgtgtccttgacgttggtgacccagtcgcgcagggcttcgttgatggcgtccttcaggatcttgtcgccgagggtcacctcgaccacttcggcgccgagcatacgcatgcgggccacgttcagggcctgacggcgggcgtcgatctggcccatgtagatgcggcacttgaggccgagcatggcgcacacggtggcggtggccacgccgtgctgaccggcgccggtctccgcgatcacgcgggtcttgcccatccgcttgacgagcagggcctggccgagcgcgttgttgatcttgtgcgcgccggtgtggttcaagtcctcgcgcttgaggaagatacgggcgtcgagaccggtcttctgcttgaccagtgcggcgaagcgcggggcttcggtcagcggactcggacggcccacgtaacgctgctggagcgtcatgaactccttgtggaattcggggtcggccttggcttgcgtgtacacgcgctccagctcgtcgagggcggtgatgagggcctcgggcacatagcggccgccgaactgtccccagtacggtccctgatgttcgctgagcggggtggtttcggatgctttcacttgtgctcctgcctttactagtcgttccactgcaagttcatgatcatcagcggtggccacgccttcaccgaccagtaccgcatccgctcccgcgcgggcgtagtcttcgacctcgaccgcgccgaatacgccggattccgccaccttgatgacgtcatcgggcagatcggccgcgagttcgttgtatttgttcacgtccaccttgaggttcttcaggttgcgcgcgttgatgccgatcaccttggctccggcctggcgtgcgcgttcgatctcctcgcgggtgtgcgtctccaccagcacggtcatgccgagctcgtgcgccaggtcgagcagatgcttgagctgggcgtcgtccaatgcggcgacgatgagcagtaccaggtcggcgccgtgggcgcgggcctcgaagatctggtagtcggtgacgatgaagtccttgcgcagcactggaatgtgcacggcggcgcggaccttgtcgaaatcgtcaaggctgccgaggaatctgcggccttcggtgagcacggagatggcgcttgcgccgcccctctcgtactcgcgggccagcgcggccgggtccgggatgtcggacaggtggcccttggacggagacgcgcgcttgatctcggcgatcacggggatgccgtcggcgcgcttaagccatcgtgtcgcgtcaatcggagccggggccgccagcgcggccttcttcacgtcctcaagcgatacggtgagctcacgggcgcgctgatcctccagcgctcccgccaccagttcgtccaaaaccgacatggtcctccctttgttggtgttcggtcatgcgccactctaggtcacgccccgtcccgattgccgaacccgtcctacattctgggctattcctcgttggttcgtatcgctacggaaccagagcggccaacaaaaaggaaaatcgccatgaatatcggtcatacggcctgggattgattccattgatggcatagactgggcgcatgtgcaggagattcgcgcttgatttggattgggatgccgtggcctcacagttcgcggtagacgaggatgacgtgcgcgttgacactctgccacagccttcctacaacatcgcacccatgcagaacattggcgtggtggcacagggcaaggatggccgccgtcatctgaccggtgcctattggtcgctggtgccgcgatggagcgccaacaaagtgctgagctaccccacatataatgcgcgtgtggagtctgcgcatgtcaagccggcgttcgccgaatccacaaaatccatgcgagccatcatccccgcttccggctactacgaatggaaaggtcgcaggccgttctattttcacgcaccacatgatgaactattgtctttggccggcctgtactcatggtggaggccgtctcccgcatcgccatggcagctgaccgcaaccatcatcacctgccctgccgcggacgagttcgtcaaggtgcatgatcgcatgcccctgctggcgcctcggaatatggttgcctcatggctggaccgctccgttgacggagccgcactgttagattccatgcgggaagcgggtaccatgctttcccggcatctgcaatttcacgaggtcgcgccactgaacagcgacggcaaacgtcttattcagccattggattccgccgaacccatgcgtctgttttgagctcttgcagctggaaccggctatgcagctgtatatgaagacgggtcaatcaacgccccgctgatagctaacctcgtatagccatcagtcaaaaacaggtctcttctgctcgacattggtcgactacgactacttttgcaccaatccgcgcaacaactcgatctcgtcgcgatgcgtggcgggcgtctgctccttggtttcgagaatcatcgggagcttggccatggttgggtcgttgaccagtcgcgtgaagaacgggatgccgagctggccctcgccgatattggcgtgacggtccttgtgcgagccgaggccgaactgcgaaccgttcacatgaatcgccttgaccttggccaagccgatcgcctcatccaactggcgcatcacgccgtcgtagtcgtgcaccaaatcgtagccggcatccaacacatggcaggtgtcgaacgtgacgccgacgttcgccttgttctccacgccgttcatgatcgtggcgagctcctcgaagttgcgcccgcattccgtgcctttgccggccatggtctccagaagcaccatgacgccggccgcgcgctcgaacacctgattcagtccctcgctaatcagccggcagccggtctcggcgccttggcccacatgcgcgccgggatgaatattgatatacacctcctgtccggcctcgcggatggcggtcagcagctcgatgtcctcggccaacgcctcgatcgcgaatgtgcgcttggcctcatccttgccggctagattgtagacgtacggcgcatggacgaccaacggcccatagctctcagccttcagacgcgcaccgaacgccgccgcgccggccgggtcgagcgccttcgaacgcttgccgtacggggaacgcgggaagaacgcgaacgcggtaccgccctcctcatgggaacgttccagcagcgcattccatccgccggccgtcgacagatgcgatccgatatacagttccatcattccaaactcctcgtgttccactcgctgttcgtgttaccgctatcatatggtaggcggcatcgagcgccgcccgcacaaccgacacgagacacaactgttcacccgaccaaaggagacccgagcatggcggcagccggcacacccaaggacgataccggccttgaacggaagatggagtcgcgtcacctgacgatgatctccctgggcggcgtgatcggcaccggtctgttcgtcagctccggctacgcgattcatcaggcgggaccgttgggcgcgatcctcgcttacgcggccggctctctgctcgtatactgcgtgatggtgtcgttgggcgagctgtccgtggccatgccgtacgccggaagcttccatatgtacgcgaaacggttcatcggccccggcgccgcgttcaccatcgccatcctgtattggctgaactgggcggtggcgctcgcctccgaattcacggccgcagggctgttgatgcagcgatggttcccgcattcgccgtcctgggtgtggtcggccgtgttcattgtggtggtgttcgcgctcaacatcatgtccgtgcggctgtacggcgaggcggaattctggttcgcgtcgatcaaggtgttcgccatcatcgcgttcattgtgatcggcctgctggcgatcttcggcgccataccgattgccggtcatgattccgcgccgttgctgggcaacttcgtggccgacggctggttcccaagcggtatcgcgccgattttctcgactctgctgaccgtggtgttcgcgttctccggcaccgaagtggtgggcgtggcggccggcgaaaccaaggatccctcgcgtgcgattcccaaggccgtgcacaccacggtgctgcgcctggcgattttcttcatcggctcgattctggtgatggcggccttgatcccctggcatcaggccggcgtggatacgagcccgttcgtgctggtgttccagtcaatcggtatgccgttcgccggcgacatcatgaacttcgtggtgttgacggccgtgctttccgccgcgaactccggcctgtacgtgtgttcgcgcatggtgtggtcgctggccaaggagcggctgattcccgaacgttttgctaggacgaatttccgtggtgtgccggtgtgggccgtgctgttcagcatggcgggctcactgctggcgttgctgtcttccgtgatcgccgcctcgaccgtgtatctggtgttggtcgccgtgtcaggtttggcgacgctggtggtgtggttctccgtatgcgtgtgccatatccgtttccggcgcgaatgggcgcgggatgggcacagcgccgatgagctcggctatcgtgcgcccggtttcccggtgctgccgtggctggccatcgtgatgtgcatcggcgcgctggtgctcgtggtgctcgatgatacgcagcgttcgaccctgtattgcatgatcccgttcgtcgcctgctgctacgcggcttattacgcactcgaacggcagcgcaaacgcgaaaacaacgcctaactcgatttcgaggggctgatttggcacttgccggagatctatctccgtttcaaggggctgatgcccgagtagacaaggctccacaatggcgtaatggcgttgccgcaaagccgtttatactcg

SEQ ID NO: 929 - DNA, 23019 bp, Unknown
  R117_24m  MAG No. k141_8834
atgactcttctgcagcatgaactgaccgatttcaaggtgaacgcattccagaacaacgagttccacgaagtgaccaaggacgatgtgctcggccactggtccctgttcttcttctacccggccgacttcaccttcgtgtgccccaccgagcttgaagacctggccaagaactacgccaagttcaaggaaatcggctgcgagatctactccgtctcctgcgacacccacttcgtgcacaaggcttggcacgacgccaacgagaagatcgccaagatcgagtacccgatgcttgccgacccgaccgccctgctggccaaggatctcgacacctacaacgaggccgatggcgtggccgagcgcggcgacttcatcgtgagccccgagggcaaggtcgtggcctacgaggtcatctcctccaacgtgggccgcaacgccgaggagctgctgcgccgcgtgcaggcctcccagttcgtccacgagcacggcgaccaggtctgccccgccaactggacccctggcgaggaaaccatcgagcccagcctcgacctcgtcggccagctgtgatcgacactgaataggcggtaaccttggctcccctctctgaggggagctgtcgctgaaagcgactagggggagtgctcgcgagagctagcctgatccgatatgcttccctcagtctcactacgacagctcccctcagagaggggagccagtgtatgtaagggagttttcatgactcagaccaacaatctctatgacgtcgtcgtcattggtggcgggccggctggcctgacggccggcctgtacctggcccgcgctcgctaccgcgtgctgattctcgaaaaggacgatttcggcggccagatcactatcaccaacgaagtcgtcaactatccgggcgtgggccgcaccacgggccgcgcactcacccagaccatgcgccagcaggctcaggacttcggtgccgaattcctctccgccgaagccaccggtctcgacgtggatggtgacatcaaaaccgtgcacacctcacgcggcgacctcaagaccttcggcatcctcatcgccaccggcgccagcccgcgcaagctgggcttcgagggcgaggccgagtacgccggccgcggcgtggcctactgcgccacctgcgacggcgagttcttcaccggcaaggaagtactggtggtcggcggcggattcgccgcagccgaggaatccgtgttcctgaccaaatacgcctccaaagtcaccgtgctcgtgcgcgaaccggacttcacctgcgatgccgcagtggccgccgaagccaagaacaacccgaagatcgacgtgcgttatcaggtcgagctgaagggcgtcaccgccggccaaggaggcctgcgagaagcctcgatcctgaaccttgccaccggccagaccgaaacgtggaagcccgccgacgccggcaccttcggcgtcttcgtgttcgccggctatgtgcccgccaccgatttggtgcgcggcgtggtggagctcgacgaccacggttacgtggtcacgcacgactacctcagaacctcggtgccgggcgtgtacgcggccggcgatctgcgcgtcaagaacctgcgccaagtggtcaccgccaccgccgacggtgcgattgccgccgtggaactggagcgttacgccaagcagatgagcgagaaaaccggcttggtgccgccgcgtcccactgcttccgcttatgaggagtccgaggccaaggccgcctccgccgcctcggccgctggcacgacgcccgccccggctcccgccaaacgcagcgccgatgccgcagtcgcagccagcgccgccaagaagcccggcgaactgttctccgccgccatcaagcagcagcttggcgtggtcttcggccgcatgacccgcccggtcacccttgcccttgagctggacagcaccccgctttcggcggaattgcagggcttcatcggcgagatagtcgcgttgtcgaatggcaagctgaactcggtcgccgtcgatgccgcagggctgatcacggcggtggatggtgcttctgtgcctacttctttggtggtcggcgaaccgctgtccgtcaccttgccggacggtgccgaactgcccacttatggttcgttggacgattccggccgtgccacgttcgacgtcgccggcgtcctgccgctcgcccgtccgaccgtgcgcatctgcgtgccggctgagggcgacggcaaggccggcaaggacggcaatggttcactggtcttcaccggtctggccttccacggcgtaccttccggccacgagttcaactcgttcgtgcttggcctgtacaatgcggccggtcccggccagccgctgggcgacgacctgatcgaacgcgcgaagtccatcacggacccgctgaacatcatgatcctcgtctcgctcacctgcacgatgtgtccggaaaccgtgcttgcttcccagcgcattgcctccctgagcccggccgtgcgcgccgaagcctacgacgtctcgcacttccccgaactcaaggaccagtacggcgcgatgagcgtgccctgcatcgtcatcacccacgccgacggcacccagcaagtcgaattcggcaaaaagagcatcccccaaatgctcgaactggtcggcgcgtaagccgcacgacctcaggtactcaacagcaacaacaacgattctgctaaaatcgtgacgtacatcgattgatgcgatcgatgcgcccgactccggcagaatcgttgttttgcggcagctcagcctcggtcttcgacggccttcgtggcgtttctgtcgccgaggtacttgaccaggctgatgctgatcagggccacaacgaacaggccggtgattaccgggatgagtgcggcgtagcggtgggcctgatcaggcgcgtgggcaactacgaacgaggccaactggttgccggacagaccggcgaacgcccaggcgctcagcgtcagaccgtgcgtggtggagacggttttggtgccgaagtgctgatcaagcagcacgggcagcgtcgagaaaccgccaccatagcccgcgttgacgaggaacagcatggccagcacggcccacagcagagcgttgtcgatgctgttggtgaagatctgcagcaagcacacggcaatcgacatgatgaagattacctgatagacggtctcgcggcgcttcaggtggtcggagagtgtggagaagcccacgcggccagccgtgttgaacacggagtccacggcgagcaccagtccgatgatgccggagatggcggcggcaaacttggcggggctcaggttggcatactgcgggaaggccctgagcacatcgtgcaggatgtccttctcttggctgatgagggccaggccgcaggtgatgttgatatagaaggctatccagatgccccagaacacgggcttcttgaggattgtcttgcggctgacgtgtgaggtcgcgggatcgtacacccagccggccggacgcttgatgagcaggaagccgacgaacatcatcaccgcgtagaccgcggcgaggatgaagaacatgctgaccaggccaaccgtgccgatgagatattccatcagtgggctggcaatggccttggccaggccgaagccggcgacggcgatgccggtggcgaggcccttgttgtcggcgaaccaaagcatcaggttcttgaccggagtcagataaccgacgcccaggccgatgcccatgatcgcgccatagcagatgaacacgcccggcaggaagttcagggcgatgctcacgcccgtgccggcgaagccgaccacgaagcagaccatggagacgagtgcggatttcttgatgtttttctccaccattggcccggcaaacgcggcggacatgccgaggaagaagatggcgagtgagaagccccattccacggaggcggggctggcgtggagacggtcagcgataagctgcttgaacacgctccagcaatagacggtaccgattgggatatgaatcagcagtgcgggaataatcgcgctggtccaacgattctcggtaaaccttgccatatatggacggatcctttcgtaactggtgtacgatgacctgccgacccgaacgagagtcgtatcgcccatatccacgcacatcacgacggcatgcccccgtgaaccatccgggctgcacgaatcgaatcaaatcgaatcgtgcgaactgcgaacaattcgctaaacatccttggtgtgcatttcatcggcgctgctggctcttgtcgacgccgacaaacagaactataacgctgttatggggttgctgtggctgatttctgtggtcggaagctatgagctttctcacatcgaaaacagttatatgacggtatcggcgtgattgatacgtgacgtctgcccgtggacgcggcatatccctctcggaaaacaatgactccgtcatgtccatttcttggtttgacatgttttcgtttgcagcgtcggtgctcaccacggtgaccgcggcgttcgagtcgccgggcagggcctcgaccgagggtctcatcctcggctgagatgtgggcggtactatggattcttatcgataaggttcgtgatatgcggagatggtaacgatggtgaccttaaaggatgtcggcgaactggccggagtgaccgccaccaccgcctccgcggccctgcgaggcaaggattacgtcaagcccgaaaccacgcaacgcgtgtgtgacgccgcccgcaaactcggctacaaaatcaacctgtctggccggtccctgcgttctgggcggtccgataccatcaccttccttacctcgggcctcgagggcgactatttctcccatctggccatgtgtgtggctgaggaagtgcacaagcgcgactcgcacatgctcatcgaactgtcccggtatcttaccgacgataacgatctgtcgtacacgttttcggacggcatcatcgccatcaatgcgccacgtgcggtcgatatcctgaagcggcacccggccgtcatgctggaaaactacgacaccagcctgcccatcgacaccgtgaacgcgccgagcgacgccggctcacgggcggcaatcgaacaccttatcgcgcgtggctgtgcgcgcatcggcatcgtcggcgacaatcacgatcccaacaatcccaacatcattcccggctcgcgtgatattcgtatgcgggccgccaaggagacgattctcgcggccggactgccgtttgacgagcgccgcgattacatcaaatcctcgtggtcgattgacggcggtatcgaggccgggcgcggcttggctaagaaaggcaagtgcaagtacgacggtctgtactgcctgaacgacggtattgcgctcggtattctgcgtggtctggcggatgatggcgtgagcgtgccgggcgatgtgcgcgttatcggcttcgacggcctgagccagggtgcgtacagcgtgccaatgctgaccaccgtggccacggatttcaagggcatggcggataccgcgctgaccttgcttatgcggcgtatcgagaacccggacgatgaattcttcccgcagaccgtgaacgtgggctataagctcatcgagcgcgaatccactgcggcgtagagtctttggccgtgttgagcttcaattgggtaattggactggcaccagcggctgatatcagatatgccgaaagcagcgatgatcggatttaagttgctggagatgacaggatggattgctctttacccctttcaccatcttgcaataattcttacatgtaagaactctctgttaacatgtaagaattattgcaagatggtgaaaggggatgctcatgttgccggccaaagaaagtttgacggttgagttcaagagcgagcagaagcgccctcaatcgcatgatgaaattgttgacaccgtagtggctctagccaataccgaaggcggcacactgtatctcggtattgaagacgatggcactgtgaccggcgtatgtgacgagcatcgcaatatcaatggacttgcggtactaattttcaataagactgttccgcagcttcccgctcgcgtggcgctcttgtatgagaacgaggtgccgatagtcagtattgaggtggataacagtcagcaaatcgtatctaccagtcaggggaagacattgcagcgccggctgaaagcagacggctcgcctgaggtcgttccgctgtttgtttcccaattcattagccgtttatctcagcaacggttctacgatttcagcgcgcaacctgcaccagaggctcggttggacgatttgaatccagactcacggaacaagttgagaagccgtattcgcagtgccaatgcgcaaaactcgttgttgtcttttactgatgaggatttcgatcgggcacttgagctggttgttgatggcccgtatggattgcagccatctgttgctggtctgctcaccattggttcggttgatgctattcatcgatcggttccagccgcatcggctgtttttcaagtgatgaaaggcatgtctccaaaggtcaatatggatccgttcgtgttgcctttggtggatatgtttgatcgtgtaggcgagctgatggagccatggaatcccagccacgaagtcatgagcggcttgattcgtgtcgatctgccagacttcgatcgaggggcattccgtgaggcaatgattaacgctttttgccatcgcgattatgcacgaatgggttcggtgagattcctggttgatgatgatgggttgaccatagctaatcccggaggattcatagagggtgtttccgaagataacctgcttactgcacaaccgcgttcccgcaatccgcagcttgccctgattctgaaagctgccggatatgttgaacgcaccggacgaggcgtggataccatctatgccgggtcggttgcggcgggcggttctttcccggattattcacagtccagtgctgaggaagttatcttgttcttgcgccgtgtggtacctgacgaggcattcgtgaccatgattggcgacgaggaacgtcgacgtggggctccattgccggtctggtcactgattgtgctctcgctgctgcgtgagcatcgtaggcttaccgtggtccaattgtgcgatttttctcatttggagcatcgacgcatcgtgtccgctgttgagaatctggtggaagctggtttggtagagggggtcggtagcgggagctctcgttcgtatatgctgagtgcccgagtgtataaacgttcagaggggctggcgtcttacgtgcgccagcgtgacatcgatgccacccggcgcagtggccttgttctggagttcgccgaaaaaaatgatggtgtcgtcactacggcggatgtcatggatttgtttggcctgagctatatcagtgcataccggttgttgaagaagctagaggatgcgggcaagttgcgccgcgaggggaatgggccgtcatcccgatacgtgttgggatgattggcgcgcgtgaaagtaagttctttcatcacctttcaataattctttcatgtaagaactctctgtttacatgtaagaattattgcaagatggtgaaagatgtacacaaaacggggaagccccgctcacatcgagcggggcttccccatatgcgctggtgtgtagatcagcctgtgttctgcaggccggcagcaacgccggagacggtgcacaggatgaggtagatgaatcctgcctgctggctttgcgtgttttgcttcaatttttcttaagcagagtgagacccatcgtatcgttcgattctacgacgaacgttttgcatcaagcgcagataatgtggtgagtgcatattcaacaatggcggacggtcttgatgcacttggtttgacaaatattggaatgagcgaaagcatcctaaaaaaggctgccggtacagacaagcttcctgataagcaggaagctgaagtgagtgctcgggcgttcgctgcattcattgatcagccaagacggtagctcgcataatgcattatgtgtgggcagatgtgtcgtctgcccacacattcgctgttgtgctttcgatttggaattcctctgccagatacggggaaacttctaaaaggccgctatgccgaggaagagtcctgtaataccggtggccatcaatacgatgatggtgatgattccggcgaagatgcgtacaggaagggtttcttttccatggtttgatgggctgtccgcaactaatctcattactccagctgtaacccagcaaactgcgcccaggactagtgccaggaattctcgacaccattccgtttcaagtgcgggaatgccgacgattgatgacgggtcgcttgccagtcttggcggaatagcgcataggatacgctccaatatcaggtaaggggtatcaaaatggatcagagtcaaagcgaatgggagctgtagcgccagtcctatccaccacagcgtgcgtcggatggtcgcgagtctgtcgcccggcctagtgtccggcttgccgccttcgccctccgtcccggcaccgtccgcgggcgtgtggtccccctcgtgcgcgtccgtcgttccgtccgtgtccttctcctcattcatatgtcccctttcgatcatccgagtctgtcactcggccagcgcgcccgttctatgcgcgccgtcgccggccagtctagggccgtgcgacgcgaacggggaggcccgcgtcgcttatcggcacggaacctccccgctcgcttttgtcgatcggtcggccgggaatcagcccgtgttctgcaggccggcggcgacacccgagcaggagtgtcacaaagcccctgccgctctgggtacccaggtggcggtttatgaggacagcatcggtcaactcatcctgcagtggcttcgcaaacctgagtactggtcggaaggtagttccggcacgcaggcactatggcacgcgtacaccccggagccggttactcccagtgaattggccttgtcgcgtcaggcatgcggtgtcgcatgtgatgcacagcctgtcatcaaaggcacgctgcccaatcgggacatcgcccatatggccgccacatccttgggatacttgacatggggcgttacgaacgatccaatggactatggtctcggtgatctgggcggatgggccctggatttgttgcagatttggggaagctacctggcgaatgccccggaagaggacctggcgtcatggctgcacgctcatctcggcgagcaagacgcccgtatgggattcagttacagcgatgttctcgcggactgtgatgcatggttgctggcgcggtccatgcagagcgattcctccgaaaggtctttgtccaccgctatgcgggacatgttcgcgcaaagcgagacgaatcgaattaaacggttctatcagtctcggttcaagggaagtgcggacaacctggtcatcgcatttcgaaagctcgttgatggaatcgatcttggaatattcgataacgtatccggaagtaaaaaagcactgctcattgcgtcacatgcagaccgactcccgagtcaagcggaggctggtatattagcattatcctatgctgaatctcttgaaaaatccgaaccgttaatcaatcatgattgtgatcgcattgcgtggaatgattcagccattccacgcaatgcgcctctggtaaaacgtcatagagtcattagagcggaaagtagtgttatcacaagaacgggaaagaccatgaccagcacgagaaacgatatgattcccacaaggacatgcgaggcggaagaggaatgatcacgaagttccggatatacagatcgcatatatgaacgcacgccaaagatgacaagcgccgcaatccagcagactacccccataatcaatactaaggtaagtctacgtacatactcagttgccgtagttaaattcatgcacgaagaggaagagaacgttaagactctgcagattatagtatcatcatcgccattggcgccccattccgcccacaaaataagtgctggtgaaagcagcagtaatcccagccaccatagcgcacgcctggccttgcccaaagccacatagcatctactcgccttagggaatttggtagctgctttcggtgccaaagcacatctctcgccggaaaaattttctgacgtatcttctgtgccgtgtttcttcccaatgccatcggttgtagccggattcgctttgcaagtgtggcgttcgttcccggcgtcgccccccgccttgatgccgtccgtggacccggtgttcccgcgcccgtccgctggcttgtccatgtcccctccgatctgtcgaggtgcccgttccgcgcgtccgttctctgcgcgcccgcccggcgtgcgccgtcgccggccagtctagggccggatgacgcgagcggggaggcccgcgccgtttatcggcacggaacctccccgctcgcttttgtcgatcggtcggccgggaatcagcccgtgttctgcaggccggcagcaacacctgaaacggtgcagaggatcagatagatgaatccggcctgctggctttgcgagagctcttccttgtccaccttcttgcgcagcgacttgagcgccagcacctgggtgacggacagcgcgtccacgtacggggagcggatgcggatggcctggccgagcacgtggcggtgttgcagcggccacttgtcgcccacgatgcgctcaagttagtccggtcaatggctttggaaaatcatggggagtgcggctgcacgggttcgctcctcgacaaggtgacttgattggggaccgctgctaactttcgtcagacacatcgtaaaccccgtccaaatatccgtatcgtccactgcgcttgtcttttgagaattcgacgatattggcgttttcatcaagaggaataccggccatgtgattggtgttctcgataatgatgatctgctgtgaaaccgcttgtttcgctaggtatgaaaacaagccagctttcatggaagagccttccgtagaccgtgttccctcatcgaacccatgcagaggcgtatcaataagcaaccagcctggagcgtgctctgactgtttattgagataatcatggaatgcgagcataacaacgctgttaagaaacgcgcagtaccctttgccttgttcatcagctttggaataccctgctatttcgacatcgaaagaggtttcgctgaaatctgcaatatcggcaccagggaaatgacattgtcgcagaatgttgcgtatggtgttactcatggaataccggaaatcgccttggaagtattcacgcggcttgtattttccattgttcgacgttgcctgatcagcgttatcgagtgccttgttgaaacgggcatgcaacgccaggagttccgcatattccgcgtgtaactgctctgcatgggcgatttgttcaatatcttgttgcatatgctgcgctattggttgaatgtcggattcgagcgtatgcatgttttgccgatgctgctgttgcttcagctgcaattcccgttgtaccttatcggctttgccgacgaggatggctagatcggtttcgacgtctgcttggatgccgtggatgtgttcgatctctgttgagacgattagaatgtcctgttcagtcggcacagacatgtggatggggctgtggcaaaactggcatgtggtgggataggcatgcgtacgggcatgtttcatcgcttgtagttgcagatcaagacgtgcagcgtctgattcgtattgactgataagtaccttgcgctggcgaataagtacctcaaggtgctcatattgttgattaagctgagagataagtgagatggcgcgggcatcttggtcgagaagagtttgcctttgccgctccacatgcaatgcttcttttcgtagggattccagataagtgtgaacggtctttccctcattcgttgcgatatggcgcatttcttcaaggcgtttgatgcggggttctatgtcgtccaattgctggtggatgaactgttccacggcttttctgcgggtacgacgttcgctggcgctttctgtctgcatggagctgtcgattttttcatcttgaactagcacgagcaacgaggacaaactttgtgtgagagttgttaacgtaatgcttttgggaaagagaatggaaggctgcggacgtcctacttggtcttcgggaacaagcataagatgtctgacggcattccatgtaaaagcaactgtatggtaagtttcgttcgtcgctatcctacgggttggctcaatgcctaacaaggcaagaagaaccgtattgattgatttgccagaacgtgatgagacagagtaagagccggaagcaactgcggggttgctggattccacgtgaatagtgttctgaacgtgaatcgaacgactaagcgaaacctcactgtcattggttatgaacgtgacctgtgcgacttcgtaggcagttttgtcggtaaagggggtctcttttcctccacagacgaattctacggtttttgcaatccgggttttcccggtgttcgaagcgccgataacacagttcagcccgcatgtgagattaatggcggattccactccgtcctttctgattgccgaaattcgacgtatccatgtgtttctcataactggttgttctctttcgttattcggttcatgatggtttcataatcgttttttatcaacagctgaacagcccggcgataggaggtagcataatcgccatgcaatgcttctgaatattgaagacattccggagtggcgcggtagaacaggcaagtggaatctacggttgctgctccaatgattacaagttgcgccaaccctgcttgcactcgtttgcgacgggcgtcatattcggctaaagcgtgtgggccatcaccgtgaagattatgttgcccgaatccgaatgccttcatataggtggcggtaaggtcgatggctgcgatctcgtcgattgtggaaggcctagagagcaatgggaggcataatgtcaatcgcgttgctgtttcctgtgtcgtattaaatagcgaattattcatccccctgcacccactccagcttatggtcattgaccagcatgtgacacagccccttcttttctgctgccttaatcattgatgggaattgggctatagccgagccagacaatgggaagccggctgcttgagatagcgttgctcgcatacgcagcagtccatcggcataatcagatgcgcatatatcgcatattccgtcataaagatccacctttagcgcgtcaaattcctgctctccattttctatgacatcccgcagattcctgcgcattccttccgcatcgtaaaaatattcccgctgcttggcatattcgggacggcatgtctgaggaagatcgtcggaacagttgattggcttgtgcaagtgatcggcataggcggcttgtatctgcgtgaggtatgtcttttcaagatgatcatctggtttatccggtggaatcggataagtctcccaagggactgaagaccgaccaaggtgcaatctgccattgctgatgtgtccggatgccaaaggcaagttttcgaacatatcgaattccggctgaaaacctatgccatcgacgagaatatcacgtccatcggcattggctttgaggactgatagaagccatttccctgtggcggaaggaagttcactgatatctgaaactttaatattcgccttgatcagttccttttggaaatcagcgagggcgtcaacactaatatcgccacaaagacgttccacctctgagacgtccagatgctgatagaactcggtggctttccatgaagggattttcttgctcccgttatagaagcgagtcaggtcagtttcgttgattccagcccagaccccagcggtaatcgtggttttcccaggtttgcgggttcgatgatgccgggaaggtggatcacttaaaatgtcgccctctaatacagcgtcgaagaagtccttcatgaatccctttttgtggtggtccacgccggatatataagggtttacgagctggcagaagactcccagagcatacgtaacagcagtttcggccaagtgagtctccttctcgtctccattcgtcttcatccgtcgccatctcacgaggtcaccgtccctacgatgggaggcagattcagatgaataagccggcaaaacactggaataccgccagtatacgccgttctgcagctgagtcagaaaagtgcaacattcgtttatcgaaaggaatttttgagaccagatacatcgtaatttccctcagatcgatgccacgcgtttaaccggttatagaagtatggcatcggcctgtccgtccattgcgccgcagcgaagctggctggggttttaactgatcacatacatgagacttgcctgtcgatttatgacgaagcgtcggtttctctagaccgacgcttcacgcttatcaggcaggttggatgctcatatgatgacctatcgcaggcaggtctcgaaggcccaacaactgggaggaatcgagactgtaatgagagttttattgaagcatgaggcgatgtgcgccggcaatgtgtccgtaaccgatgtatacgactgttcggaagtggaattacggacgatggttgaacgcgatagatgtttgcgcgcaatccgtatgggttgttcgccacgtgatattgcactacgtacccctcaaacgatacttcaggaattgtggaatgctgaggaacgttccgctcattcttttcatcggtcagaccgtgccagtggagctgcctactcctatgaggaactggctgatatagggcaggagcctcaaggatattctgcctctcctgaggatatcctcttcagtgcggaggaaacgagagaagaagccaactgtctgcaaaccatctttagagaggtggagaagctgccggcaggtcagcgcaacatcgtcaaaggcgtgtttgtaaaagggacatctcaatcagacatggcacgagagctgggtgtgtcccgagcggcggtgtccaaacagctttcaacggctgtgcgcaaaattcgtgttgccattcgcgacgaaagcaaagaaacgaagaacacgacaacatcagcagtttgcgaaagaaaggagcattaatggttcatttcagtgttatcagagtgaaaggaagcccgtcatatgacttcgatgcatgcggagacattttggctatggccaaagctgtaggtgtcatgacggaaaacatgcgcactgattgctgcgacaatacacagtgtgatggaagtcgttgtaagggaaacactatgtttcggttggagttagacaccgaaaatcgcagagttcatcgcagacgccatgccagatgaaacgcccgaggttaacacctcgtggcgaaacggcagtgcaggtgagggcagacagcgggtcagccccggcaacagatcccgaaggaggacatcatgactgatcagatggtgctgcagacgcagcagtggctgaacaagacatacgggaacgatccccgattcaagaaaatcaacccggacggcagaaccggttggccgacaatctatgcgcttactcgcgcattgcagattgaattgggcatccagtccactgccgataacttcggtccttccacccagcggttattcaagcagcggtatccgaatggggtgcggcagcaggcagttgcggacaagagcacttccaacgtgtattccatcattcagggggcgctttggtgcaagggctactccactggcggcaacatctcacagcatttctatgacggaacaggctccgccatcagaaagcttaaggctgatatgggcatagaaggagattccagcgtagacgttgagatcatgggggcgttgctctcaatgaagcagttcgtgctgctggcctcttatggcggtatcgactccgtccgtagagcacagcagttcatcaacaaagcatatcgtccatacacgggcatcattccgactgacgggctgtacggcagggagatgaacacggctcttatccaggtgcttcagtcgctcgaaggtttttcgcccagtgaggcaacggggaatttcggcaacggaaccaaagctcgattgaaaacgataacgtccaataacgcatcctccaatgagtcgtgggtctggctcgcaagtacggctttggcgtgtaatgggatcgggggcgggccgaccttcgtatggacgagcacgctcgccaatatcgtgaaagcgttccaggagcgttatgccattgctgtgacgggctctattgattcgaccacgtggatgagcctgttgacatccaaaggcgatcctgatcgcccgtgtgtggcatgcgacaccagattcgaaattaccgacgccaggttggcgacgttgaaggcaaacgggtatgaaatcgtgggacgttacctgaccgagcctggccagtcgtcgttggcgcccaaggattactttaaggccatccgtccgggtgagctcgagcgcatcactaagggcggcatgcggttcttcccgatttttcaggagtactccacgaagctggaacatttcaccccggcaaacggcgctgctcatgccaagaccgctcgtgaggcggcgcagcgtcttggcatccctcccacccatatctacttcgctgtagacttcgatgcgaccgatgaccaggtgaccagcaatatcctgccatacttccgtgcggtttgttcgtctcttggtggtggatacggagtagggatttacgcgtcccgcaatatttgttcccgcgtcatcggtgcgggatgcgcgagtaacgcgtttgtgtccgacatgtcgacgggattctcgggaaatctcggcttccctattccggacggctggggctatgaccagttcaccgagattgacgattacaagggccagggctgggatttggaccgtgttgcctattccgggaaggtatcagcatgcgtttcactgttgcctgccgtgccagtgcctgcgcctgatcccgatcccgtctcgccagaaacggatccgctgctaagatgggtcgccgtcacggagcaggagtgtcgcaaagcccttgccgctctgggtacccaggtagcggtttacgaggacagcatcggtcaattcatcctggaatggctccgcaaacctgaatactggtcggaaggcggtagcgggacacaagcaatgtggcacgcatatactcctgaagtttcgactccgcccgacttggacgcggcgcgtgtggtatgtgccaatgtatgcgaagcacagccttcaattaaagagaaactgccatcgactcgagatgttgcacacatggctgcaactgctctcggatacctgacatggggtatcgaaaacaatccagccaaatatggtctaggcgatttaggtggctggcctctcgacttgttgcagatctggggtgcctatcgccgtgacggcaagcataccgacttggcagcatggctctataagcaccttgggaaggacgaaggattcgggtacgatgacgttcttgcggatgcagatgcatggctaattgctcagtatatgattactcacccatccgatacttcgttgtctacatcgatgcgtgatgtatttaaacaaagtgaggcgaacaggattaaacgattctatgacaagcgattcgagaacaattctgacaaccttgctgcggcgttccagaaactggtcgatggcattgacttcgggatctttgacaatatttggtattcagctaaagcattgaaagatgcttctcatgccgataggcttcctgatgtggcagaagcagacacccttgcgcggatgtatgctgcttatctggagagtccgcgtcgatagaggctagctaatgaatcggtgaggaagattccagagactgcctcaccgattcattaactgcatacagacgcggctgcttggcgaagagacacgacgtctaccagccttcctccattgcggttgcccagagatagaacatgaagagcagcagactgaagagcgagatgatgaatgttgcgatttttgcaaagatgtgcttattgggaagcggctgagaaacaccggggaactgatcatcaacgaacagctgcgcaatatggaggattgcgactgcaagccagcagacgagtccagcacctaatgtcgccagaagccgatgagaatagacgatttgttcagccggcgttttcccacaaggaggggaaaacgttgttaatatccggcaagcgacatcgtagttgccatcatgaggaccaaaccagccaataacagaaggggatagcaataccagtcctatccaccacagcgtgcgtcggatggtcgcgagtctgtcgcccggcctagtgtccggcttgccgccttcgccctccgtcccggcaccgtccgcgggcgtgtggtccccctcgtgcgcgtccgtcgtcccgtccgtgtttctttccgcgtccatatgtccccctccgatcatccgagtctgccgctcggcccgcgcgcccgttctatgtgcgccgtcgccggccagtctagggccgtatgacgcgagcggggaggcccgcgccgtttatcggcacggaacctccccgctcgcttttgtcggtcggtcggccgggaatcagcccgtgttctgcaggcccgcggcgacgccggagacggtgcacaggatgaggtagatgaatcctgcctgttggctttgcgagagctcttccttgtccaccttcttgcgcagcgacttgagcgccagcacctgggtgacggacagcgcgtccacgtatggggagcggatgcggatggcctggccgagcacgtggcggtgctgcaacggccacttgtcgcccacgatggccagaacccacttgcgggtgagctccatctcgttgagcaccttctcattgaggtcctcgcggtcgccgagggcgaggtacatcctggcgatgcgctcatccgtcttggcgatggacatctcgatgttgtcgatgaaggtggagaacagcggccattcctcgtaagcctgacgcatggtctccagatcgccgaacttctcgcatgcagtgccgagaccgtaccaagcggccaggttgatgcgggcctgggcccaggagaagatccacggaatcgtgcgcaggtcgtcgagcgacttggcgccgaggccacgcttggccgggcgggagccgatcggcagcaggccgatttcggtcagcggcgtaacgatcgagaaccacggggcaaagccgtcggtgttcaacaggtcgaggaagcggttgtgcgcggcctcgtcgagctgagcggccatgtcggcatacttctcggtcatctcggtgttgcgcttctccacactcggcgcggactgcagcaaggtcgccgcagccacggattcgacgtggcggatggccagcaccgggttgccgtaacgggcgaagatgacctcgccctgctcggtgagcttgaagcggcacttgacggaaccgaccggctgggcgagcaccgcgcggttggcggggccgccaccacgaccgacggcaccgccgcggccatggaacagggtcaggtcgatgtcgtgcgactcagcccatttggcgatgcgctcctgagcggagtgcagggccagcgtggcggaggtcgggccggcgtccttcgaggagtcggagtaaccgagcatgacctcgagcttgttgccggtggccttcagacgagcctgaacctcggggatcttgatcatttcctcgagcacgtccaccgagttctgcagatcctcaagctgctcgaacagcgggatcacgtcgatggtgggcacgtcctccgggtgggagaaggccaagcggttgagctcgtagacatccttgatgttctgggcgctcttggtgaaggagatgatgtagcggcgggcggccttgaggccgttgcgcttctggatggcaccgagggcgcggaaggtgtcgagcacctcgtgcgtcatcggctgcagttcgccgcgctcgccgtgcaggccgtgctcgcggatatccgcaagggcgcgggcgtgcaccacggagtgctgacggaactccatctccaccatgtggaagccgaaggtctcggtctgccagatcagatcctgcagcgggccgtaagcggaacgcttggcgccggcggcggccagcgaacgctggaccaccttgaggtcggcgaggaagtcgtcgcaggagtggtacatgaggtcggcgtcgcgctcgatggtgtagtgcagacggtcggccatcaccagcatgaccgcgcggtgcatctccttggtggagatcagggcggccttgtcggtcagacgctcgctcatttccttctggtggctccagaggctcttgagctcggcgctcggcggcgtggtctcggcttccatcgtgaggttgcggcccacggtgcgggtggcttcctcaagggcggcgattacgtgatcggagaacttgcgggccacggcgcggctcaccttggcggtgacgttcgggttaccgtcgcggtcggagccgatccagctgcccgggtggaagaacgcggggcaagcgggctcgacgagaccggccttatcgcccaggacccagtcatcgaagcgacggtagaccttggggatggtgttgaacagcgtgttgtcgaagatgtcgagaatcgtgtccgcttcctcaaccggggtcggcttcttcagcgcgatcggagaggtgcggaacagggcgtcgatctcgttgtagagacggcgcaggcattccttcttatccgagccgccgaggcgcttgtactcctcaagcaattcggaaacgcggcggatcttgccttccacggccttacgacgggcctcagtggggtgcgccgtgaagacggggtggaattcgagctggttgagcagttccttggccttggccgggccagtctcattgatgagctggtggtaggcgacggtgagctcgttgatcgggtcgaccgcctggtcaacggacacgttgttctcgcgctcgtggagcacggaaacgcggtagttctcctcggacaggtttgccagatggaaatacgtggcgaatgcgcgggccagcagctgggcgtcgtgcaacgtcatgttgtcgatgacgttcacggcctccttcaggccatcctggtcggggttcggatccttcagctcggcgaaatgctcggcgctggcctccaccgcgtaatgacgcacggtgtcgaacgtagacagcagttcggggttgtattcgcccagtacgttacgcaggatctcaagacacagatccatgtcgtacttcaggctttcgggaagatcatgctcctccgggccctttcggccggtcccggtagtgacgatggcggcgtcagcgggagtgatctgttcttcaggtgttgccatataacctcctttgccgaataacaggttgctcggtctaccggtcgtctgcggctcctccgcagttgttgaggccagtcgttgcgagcccacagcccatattcaacgtggttgttgtgtgggcaatagtgtatccccgcgaaatcgctatttgcgttacggagtccatatagtgcgccaagttgtccacctatagagaccgaatatcggacagcatatgagacactgtccgattcgcggaagatttgagcgccttacgattgccggcgggggaggcagggagtagtaatgagggatgtgagcgaacagaagaaaaaaagtgcgcccgaagcgaaaggcgcaacggctgtacgtaaattccacacccactccattccgctggacatggaagatattgcacgcgattgggaaaaaccggtggtggacgccggtatcgccgccaaagccagcgtgattgtacgagtcggcatgttggacctgggagccggcaccggctccttccgcgtgcgtgaaatgatgcaccgcatcgcctacccgctgggcgtgcacgtacgcgccgacgtgaacctgacggatatcgaggccacctgcacggatggtcgtaaccgcatcaccgaagtcgtggatttgccgagtaccggcgtgaacaccgaacgtatctggctgctggaacatttcgccgactggttctccgtgaatctcggcaaggggtcgatgtatcacgtcgattcgcaactgtccgatggcgtggtcaagcatttggacgaacgtgacgcttcgcagtattcggccgatctggccaagcgcctgcgcgaacgtgccaaggtcgaggctgaggcggccaacggcagcgtggacgaggcgctggatcttgcgtcgaaaaccaaggtactcgtgacctccgtggccaagtccttggacgatgacaatgaagaagcccaccgacttttggcggacagcgcggaagtcactccggtcgaagacaaagcggccgaagagaaggcctacgacgatgccgaagtgtttaccggtgactccaatgagtcggttgaatcggcgaacgcggcgaatgccgaggcgggcgctgagggcgcggcggcgaacggcgcaaccgccgaaagccctgctgcaagcagtacgaagcgcaagaatcgcgtgcccaaggaatacgccgaacacttcaacgagcgctccgacgaagagaaggccaagggcggtatcaccgtgcggcaggcgcacgagcgactcgatctgattgagcgccgcaagccgctgtacaagccgtggttctccggtctggcctccgccctggcctgcgcggccttcgtgttcctgctcggcggcggcccatacgacatgatcggtgcgttcgtgggcgcgggccttggccagtggatgcgtcgccggctgtttgcataccatctgaaccagttcttcgtcacctttgtgtgcgtggccgcggcggcgctcgcctgcaccggcaccctgcgactcatcggcattttcgacccagtcgcgctctcgcacgatacggcctacattggcgccatgctgttcgtgatccccggtttcccgctcatcaccggcggactcgacatggcgaaaatcgacttcccctcgggcatccagcgcgtggcgtacgtgctgtgcatcatcctgatggccacgctggcaggctgggcc

SEQ ID NO: 930 - DNA, 3486 bp, Unknown
  R117_24m  MAG No. k141_8895
cccgccacccatcgtagaatcggacacagggcctcccggtcacatcgtccagcttggtcgcagacgattatccggcaggccccctccacaccccacagcgcacaagaaaccgccgagagccagagaaaggttcgatgatgaatcgtacagtcaagtcagcagtcgcgatggcggctatcgctgcgatgcccctcggcactttggcggcctgcggaagctcgacctccggcgatgacgccaagggcaaggtctactacctgaacttcaagccggaagcggctgatcagtggactgctctggccaaggaatacaccaaggaaaagggcgttgaggtcaaggtgcagaccgcggcctccggtacctacgagcagaccctgaagtccgaaatcgccaaaaccgacgccccgaccttgttccaggtcaacggcccggtcggctaccagaactggaagaagtacaccgccgacatgtccaatacggatgtgtacaaggagcttgccaaccaggatgtggccctgaaggatggcgacaaggtggtcggcgtgccgtatgtgatggaaacctacggcctgatctacaacaaggacatcctcaacaagtacttcgcgctggatggcgccaaggccacgtccatggacgaaatcgacaacttcgacaccctgaaggccgtggccgacgacatgcaggcccgcaaggacgagctcggcatcaagggcgcgttcacctccgccggcttcgactccagctccgactggcgcttcaagacccacctggccaatctgccgctttactacgagttcaaggacgacaacgtcaccgagcagccggccaagatcaagggcacctacctgccgaactacaagaagatcttcgacctgtacatcaccgactccaccaccgaacccacccagctgagcgccaagaccggagatgatgcgaactccgagttcgcgctcggcgaggccgccttctaccagaacggcacctgggcctggaccgacctgcagaaggccggcatgaccgacgatcaggtaggcatgatgccgatctacatcggcgtcaagggcgaggagaagcagggtctgaccaccgggttccgagaactactggtgtatcaatgacaaggcctccgacgccgacaagaaggccaccgaggacttcctcaagtgggtgatcacctctgataccggcaagaaggccctctctcaggacatgggcttcaccaccccgttcaagaccttcgatgacgtcaaaagcgacaacccgctgaccgaggccgccgtggaagaccaggagtccggcaagacccaggtttcttggaacttcaccatgatgccgtccgaggaatggaagaacaaggtcggccaggcgctgctcgagtacgcgcagggcaccggcaagtgggatgccgtcaagaccgccttcgtggacggttgggcttccgaatacgaggcctcgcactgagtctcatagagtcccatagccgataagcaacaatccgcggcgcccctgcctttccttctccaggggcgccgctttgtattgctgagtctcgcacaaaatcggccgccgcagaaaaagtgtgaggcacacacccggccaatcgcacactgtgggtccatggattggcgatttttcgccatttcccacaatgtgcgattgagcgttattgtgcggttgcctcacgctttttctatggtgggctttgttgtgtgagcctacttaacgcgggaggtggaggagcggaccttcagctgggccgggaacacgatatagggttgctcaatcggcttctcgtcaatgaggtcgagcgtcatgcgggctgccacgcgggccatctccgccggatcctggcggatggtggtcaggccgatatcgccggtgtagaaactatcgtcgtagccgaccagcgagacgtcgccgggcacggagaatccattgcgctccagctggaacataagcggcaaagcgatgccgtcctcctggcatgcgatggcggtgggcatctcgtcttggctcatgagttggtcgaccacgtcgctgatttcataacgtccatcgtcatcgaccttgcagacgatgacctgcggctcgatgccttccctgcggcagcaggcggtgaatgagtcgaatcggctttgcacggagaagctcagcgacacctcgcgattggtgctgatataggtgatgcggcgatgtccgagattgataagatggcgggcggccagcgtggagccctgcacgtcgtcgatattgacggcggcggtaaagccgcgggcttcgggctcgactgaattgatgccgacgatcggcacgccgaccgaagccagttgcgcgatttcgttgttgtcgatatcgaaagacgccacaatcacggcatcggcgttacggcgtaccggcaacatctcgaagaattccttgcgctcctcgatgctggaaatctggaataccgaaatatcgtagccctgcgtgtgcagcacctcgttgagcccctcgatgaccgaggcggtgaaccacaggcggatatggccgctcatcagtactgcgatgcgcagggcgcggccggatttcagggccgcagccgagcgggagagtgagaaattgagtttgtcggcgatggcgagcacgcgctcgcgggtcttggccgacaccagatccggcctggtgaaggaacgtgagacggtggagatggagacgccggcctcgcgggcgacatcctgaatgttcgtagccattgcagcccccttgcgttgaatggaaaatcgcaatacacatgcacaactgactccagtgtacatgctgattgattgatctgcggcgatgacaacgattgtattacaaacgtttgcaaagtgtctatgacggcgttagattggctttatatagccattatcttaggtgaaagaagattgctagagccggagtgtgctcgaacttgaaacgcctaaaatgacaacgtttgacatataatgattcgacgtttactatgaacataggcttgaacgagaacaggccgtgcatgcggttctcgatcggcaggctcgcattgagttgaactccgcagccggcgcacgatgcagtgtcgcaacgcagcggactcaaggaggaggaaaagtcatgatcagcatggctggcaaggcgatacgcagatggtgggcgctgttcgcgctccccacattcgccgcattcatcatcgggttcctggtgcccttcatcatgggcgtctacttaagcttttgcgaattcaccaccgttaccgacggtgaatgggtggggcttaagaactatggcaaagcgttgaaagacaaggaattcctgcacgcgctcggcttctccaccgcgttcaccatcgtgaccaccatcgtgatcaacgtgatcgccttcgccatcgcctacatgctgaccaaggcgatcaagggctccacgctgttccgctcggtattcttcatgccgaaccttatcggcggcatcatcctgggctacatc

SEQ ID NO: 931 - DNA, 3477 bp, Unknown
  R117_24m  MAG No. k141_8931
gcatcaccttgccggccttgttcttggccgcgtccagcaccggcgcgaggcctgcggcccattcgcgcaccgaacggccggcgagcatgtcgttgccgcccacgcacacgatcagcacatccggccggtcattgatatcgccgatcatccggtagcgcacacgtcgagcggtcgcgccgagcttgccgaccgtacgccaggccaccggccgaccggtacgcttgcgacgcgcgcggcaagcagcggcataatgcctttcgactggtcgtccacgccacatccggccaccaatgaatcgccgaccatgacggcacgaatcggcttcacgccgttcgcgcctttccaatcggggccgatcggcgcctcgatatccaccacgcgacccttggcatcgaacaaaccgaaccgcttgcccttcggctcggacgccaacttcacccggcccttggcccacataccctcaatcggagcaacggcagcatcaaatcacacgcaagattcccacgccacccaacatagtccgccctcctcgacctcgttagcggccagtagcaacccatattcgaaaactcgataaccatcatcaattcgcatagtttgaacgttttaggcgttttggtcgctttggacgttttatactgtgatagataaaaaggaggtcaccatggcagaatccgacaaactcaccattccacgaacaatccttccatccatcaacattgacgacatgacgacattggaggcattcaccgcacgatttcttgatgagcggatcttcatcaaagatgccagcggcgtggagactcccctaccttcgcagctttgcgacgccgtcaggcagacggccatccttctcgccgaaggcaaaagtgtaacgatcagtgccaccgaacaagatctgactaccgaacaggcggcggcaatgctcggcatttcgcggcaaacactgataagactgcttgataaaggacttattcctttttcacgtccgtccaatcaccgtcgcatccggctggaagacctgcttgaatacaagcgagcctcgaaacacaccaaggattgcgccctgagccaaatgatcggcgtcggggaaaacgccgaattgtacgacctgcccgagccgaccccgcaggaagccatgcatgcggtatcggaggtaaggagagtacgggccgatgctgtcggtgtttcttgatgccaatgtcatctgttccatcaccttgaccgatgttctgctcaccttggccgagcatgacctttttcttcccctgtggtcgcctaacgtattacaagaagcacaggaagccgtctcccgaacactgcctgacgccgcacaacaagccttccgaaaaagactgataatgatggaccaggcattccccgaatcctccatacatgttgaggaatcggaatggagccaattcgatctgcctgacccggatgatcgtcacgtacttgcggctgcggcacagggacaagcagacgcactggccacgcgcaatatcaaggattttccccagaaactgcttgactctttctccattcaggtcatcacgccagatgatttgctctgtgtattacttagacgaaatccggaagccacagctagcgccatacgtgagcttatcgattctcgacatcggccaccgataaacattcccgactttgctaaaagacttgaacgctctggcgcaacacagtttgcagccgctattgcgcatatacgacagcctctcggcaatcattcgtactttgaccagtaacccatgaattctggatgaattggagtgaaccggcgggtctggaggcgagcgggcggcggattatggggcacaatggtgtcaaggaggccgccatggtcgatgactatactgccaaaatgactgagctgatcgaactcatgcgtctgatcggcaacgatacgcagcagtgcgaggtcaaggaatgcaagcgcaagatctcctcgaccatcaccgatacgctgtccgcgttctccaacggctccggcggctggatcatccttggcctgtccgaaaagaacgggttcacgccggtcgagggattcgacgcgcgcgccatgcaggaggcgctgagccaggcgtgcgagaagatgacgccggtggtgcggcccgtgatcgtcacctgcccgttcgaaggcgcgaatctggtgttcgcgcgcatcgacgaaatgctgccgcgcgacaagccctgcttcaccaccgcgctcggaccgcacggcggctcgttcatccgcaccggcgacggcgaccggcgcatgacctcctatgaggtcgaccggctcatcgaggagcatctgcagcccacctacgatctggatatcgtgcccggcgccacgaccgatgacctcgacccgcagctcgtttccggattgttggcgcgcgtgcgcgaacagcatccgcgcgtgttcgccgaccgggacggcatcgatgtgctgctggatctgcaggtgttgcgccatgatgattccgacgagtcggaggtcggcggaatactgcgccccaccttggccggactgctggcgttgggccgctatccgcagaagttctatccgcggctcggcatttcgatagccgtgtttccggggacgagccgggacgatgtgttccggggcgacgaacgattggtcgcctcaaagtcggtggtcggttcgattccggtgatgatcgacgatgcggtcgactcgttgatgcgttggattggcgcgaagaagcccgattatccgccactcgtgttgcgcgaggcgattgcgaacgcgctcacccaccgtgattattcgcccgatgcgcgcggcacgcaggtgcatatcagcgtgttcaccgatcgcatcgagatcaccaatccgggcggtctgtatggcatggtgacacatgatgtgctggcgagtccgcatccggtgacgggtgcaccgttcgtctccacccgaaaccagttcctgttcacgctgctggagtccacgccgtatccgggcggcgggtttgtgaacccagaaggcggcgacggctaccagcgtatcgccgccgcgttgcgcgaggccggcatcgagccggcgaccacgcgcaacgacatcaacacgttcacgatgaccatcaccaagcaacgcacgatggcgaacagttcgccgggcgacgtggtcaaggcgattatgaccgtactggagcggcattcggcgatgagcgtcaaggagatcatgcgcgaactgcagttgacgccgctggccgccacatccggtatgcgcgagctgatgaaggaagggcgggtcgcccgagtcaagttcgccgacgacccggtgcagcggtatcggttgaaaggctgattttctcactcggccagctgcgtggtggcgggcgcggccagggtgggacgggatcggcggaagcggccggcggccaggccaatgcagatgaacatcacgccgaacagtgcgaccaatcccagcgagccggcccagccggcgac

SEQ ID NO: 932 - DNA, 23996 bp, Unknown
  R117_24m  MAG No. k141_9153
ccctcaccttcgcggatcaggccgagcagcaggtgttcggtgccgatgtagttgtgctgaagggccctcgcctcttcctgcgccaacacgatcacgcgccgtgcacggtcggtaaaccgttcgaacatgcttgtccttcctcaattgacattccgtcctactctaccgattcacgatgacgtttattcatgagattccacgaattgcgccgtgagaggagaagaaaacgatatgctggttctagattcacccgtagtcgattacaaggaggctcgaaatgagtgaagctgcaaccaagcccgacatcgttgtcggcgtggatggttccgatgaatcctttgccgcgctgaagtgggcgcttgaggaggcctcgttaaccggtcagagcgtcaacgccgtgtttggctggacgcattcctgggatatggggtccgaaccggacagcgacgaggcctgggccaaggtccgccacgatattgccaacgagctgcgtatgtgggtcgacaaggccgctgcaggcatcgacttcgatccggcgaatctgaagctcacctcggtgaaggcctccggtacttcggccctgctgcagatcggccatgattcgcagcagatcgtggtcggccgccgctcgctgagccgtatggcccgctggttcatggggtccctgtccgcttcgctggccgaggccgccgaagtgccggtgaccgtggtgcgcatcgccggcagcgaggatgagaccgtgaccgaggccattgccaacgccctgactccgggagacaagcccgttcactacacgcagcctcagccggtggtcgaggaggctcgccgcccggtggtggttggtgtggatggttccgagacttcccgccgtgcgttcgatttcgcactggaagaagcacgactgcacgacgcgccgctgcatgtgatgttctgctggcagctcaaggatttgggcgttattccgggctatgagaacgccgtggcaccggtgaaggtcggtcagcgccgcgccgaggagattctctctgagctgatggccaaggcccggattcccgatggcgtcaaggtcagcacaaacgccttccatattcccgcatccaaaggtctgatcgcggcctcgcggtacgccagccatctggtggtcggttcgcgcggcctgtccggtctggacgcgcacttcctgggatcggtgtcccgtcagatcgtgaacttcgccgaatgcacggtgactgtggtgcactgattcaccgaaatcggcatggagtgctaacgcacgtctcggtgatgggcttgcagggaggaattctttattcctgcaaccgttgtagatgactttgttttagcttgtcgctagagcgaagtcatctgcatggcctcgttgccgaggccagctccaagactcacacggcttacgccgtcgcttggttcgcgtttcacaggatgccgcgttgcccgacgcgatgcgtcggtccgtcttccgcttcctccacgcgcgtttaacgtctccggggcactcccggcgacttggatgttgatggccgcgttcagatcgcggtcgatgacaagcccgcactcctcgcaatggtagacacgttcggacagggacagtttggctttcaccgtcccgcagttcgaacatgtcttgctgcttggatgccagcggtcgatgacgtggagcctcgcgccggtgcgtgcggtcttgtattcgagctgtcggcggaactccgcgaacgcggcgtcctctaccgagcgggcgagcctatggtttctcaccatgcccgccacgttcaagtcctcgatgccgatgtccgcgtaggcgcgggcgagcatggtggtggtcttgtccagtaggtcgcggcgtaggtccgccacgcgggcgtgcagacgcgcgaccctcgttctcgccttgcgtcggcggttggagcctttccgtttgcggctcagattccgttgggctttcttcaaccgtccgaggttcgatttgagtgcgtgcgggttgtgtatcacggtgccgtccgacaatgtggcgagttccttcacgcccaagtcgatgccgacgctcccgcctttcggcggcgatggaaccggcaggtcggcgcgttcgacggtcaggctggcctgccagcgtcccgcatgccgggatacgctcatgcgcagcaccttcgcgccgttcactcgcttggatacgttctccatgcagtgcacgcggcctatcttcgggagccgcagcgcataagggtcacagtcaatgagaccaaacgagcccgtcgtgtacgcgaatccgggaaccgccctgtccttggatttgaagcgcgggaagcccatcctgcggcctttccgctgccccttgcgggacttggagaagttcctcagcgcgtcggccaatgattcgaggccgctgttgtacgactccttgctgttctccggccaccacggcttgccggtctccatgctgacggcgagggcgtccttgttggcgttccaccacctgcgcagcgcgtagtacgaccattccggcttctcctgccgtccaagcatgtccttgacgtgcgccagtcccgcgttgtacgcgaaccgcgccgcaccggcatgggactccaagagtcgttcctgccgtggcgtcgggtcgagcgccaccctgaccgcctcaagcatcacgcgccgccctcaacgccgcgtccgtcttatgcttggcggcacgacgcccgtacagtcgtgcgcagaacgaggtcaacacctcggtcatgtcgcgcaccaagtcgtcgtccagctccgtgtcgtccaccacgatgatccggcgtccctgcgccttcaacgcgctctccaccagtcccgcgttcatgcgggcgagcctgtccctgtgctccacgatcagcgtgcccacggtcgggtcggacaatagccggttgagcttgcgccgcttgtcgttcatgcccgagccggtctccgtgaccacctcggggctcttgacgcccatgttgatggcgaacgccttcaaccggtcggcctgacgttgcaaatcgtccttttggtcggacgagctgacacgcgcgtaacacaccgtcctgccgttcgccgtgggggcggcgggctggttctcgtatttcgggtcgtggatgataatcgtgcccgtgttcatgcgctcgaacgggacgggcatacggttctcgcgacaccactgccacaccgtctgctcgttgaagccctcacgcctcgcccattccctgacacgcatgacttaattatatcacacgaaaacaaactaaagcaaataatcaatctagcaggttataaccccatcaccatctactttttaggaaacatcttcgctgagacctataagttgatccgagagtacattctgctgttggggagcaggattggcgtttattttattcctcgtccgccctgttctggcgcagctgctcaatgagatcgatgacagtttcgagttcaggagtcacatcgtctgaaggacgaacgttatcctcttcgtcgtccatctcatcatcctcatcatcatcggcaacggtgttgttgaggatgtcctcttcggtggcctcgtcgtcagcatcagacttggactcgtcgctggaatcagctgcatcaacatccacaacggaatcggatgcgttctgtgcaacggactcatcaccggcagactgggattgcgaggtcccgtcgcctgccgcctcctcagcgggctcagtatcgacggcgttcccgtcaacagtcttctgtgcttcgatatcatcaccggcaggctcgcctgtcttgtcggtttcgccttcggcctcgtcctgggcaacctgctcctgcttgcacggacggttggcaaccacgtcgatatgcagatcgtcaaaggctggcttggactgcacccacagctggcttggctcgggaggttcgatttcggaatgctcaccgcagccgtggtccagggagaccacgcggccgtcatccggactccacttgttggcgcacacgccgaacatacggtcgagttcgcccgcgagcggcacgaagaaaccacaggtggagcacaggttgccttcggcggttttggtgctcaacgctttggggcctcgcggaccttcataccagcgcttggcagcctgcgcacgacccaacgaggtcagcacgtgacggcgggtcagtcggaaggtctcgacggcatcgttgacatcctgcagcgaggattcctcgacttcgccttcctcgatgcgctcgtcatccggatcggtaccgatcgaatcggtgggagccagatccgtgggctcgaggcgatccttccaaggaatccacttgggcggcatcaacgcgccctcagtggggatcaaggaggattcgttgacggtccaggagtcgatctcctcgtcgtgatacagcgtcaccgaccattgccatccttcgtagccacggatattcgcggcgaagcggaagtcagtgacgtgatcctcaagatcatatgaggtaacgaaatcccccacctgatcgctctcgtcggccacttcgagcagcacggcgcgcgcgatggcgtgagggtccggtgtcacgatggtttcggtggtatcagtcatagatcagatcagtcctgtacatcgaattgatccgccaccgcacgcagcaacgtggccagctttttgctgtcggcagcagatgggtaacggtgacggcgcaacgtattgccggccgcatcaagcatcttgataaggtcctcgcagatggcggccatgtcatccgccttcgggcgggtggccttgaccaagctgggagtggaggcgatcaggcgaacatccatggcctgcggcccacgacggccgtccaccacggaatactccaccttggcccccttgcgcaacgtggtggcgccagtgggtagggcctgagccggcaggaacacgtccttgccttcctcactggtgatgaagccataacccttggctgcgtcaaaccaacgaactcgaccggtgggcattgcgaaccttccttaatcctcaatggaaatagtaaaccgaaggtacagtttacctcacagggcttgacctcacgctttgggctgagtcgcctgagtcttacgctcagagctgaaccaagaagtcttctgtttggcgtccttggttttgccggtgggccgcttgggctcaggagcgacgatctgctcaatcggcagcaccacggtgaaggtcaggcctcccccatcggtgccggtggcgcagataaagccgtgatgtgctttgaccacggattgcgcgatggccatgcccaaaccggtaccacccttttcgcgggcacgggatgggtccgcggtgtagaagcgttcgaaaatcttcgagcgcgattcaggcggcacgccggggccatggtccacaaaacgcaatacggcgtatcgatagccggtctgcatcgaggcacctacttcagcggcgtcgatgaaccgccgcattgacgcgtcgctggcgggcatgcgagcgagctgtcttggatcgatggcggccggcatcacaccgagcgcggcctcggcaggcgaatcggcaggcgtgtagcggtggatgttgcccacgatgttggtcaccacctggcgcagtcgagaggcgtcgccgggcagcacgacctcgggccaatcgccttcggcaaggttgaattcggcgggatggttcaaatcgcgcgccggttcgagggaaatctgcatgcggcgaacggcacggtccgggtcgagcgcatgcaagtcgtcgacggcgtcggtgaccagcgacgagagtttcaccgtgccggtcacatcgatgccgcgcccctcatcgagacgggccaaagacagcagatcctcaacaagaacagtcatgcgctggctggaccgttcgatatgttcgatggactcgtccgcacgctccaaggcaccaggcatatcgcgctgcatcttatacagctccgcatagccatggatggcggccaacggggtgcgcagctcatggctggcgtcggagacgaaccgtttcatcttgtcggtggtctcctcctgttcatggaaactggattctattcgggtgagcatggagttcagcgaggcggccagggagccgacctcggtgttttccggcgcggaaggaatacgttggctcaggtcgccggcggcaatctttgcagcggttttctcgatgcgcttcagcggcgtcatcgtgtgctggatgatcagcgtggacagggagccgccgagcagcaccacggcgatgccgaccacaatgcagtatcgggtgagtgtgttgacggtgtcgatctggtcggccagtgacaagccgatgtacaccacggcacggtccttgccgttttgctggaaggtcaccggcagaatacgccatggtgccctcgccgtgacgatggcggcatggttggcattgacagtggggttggccagtaccttggtgatggtgtcagaggaattggagtttccgttggccggatcgttctggctgtccgcactgtcggactgcaccgtgatgatctgcttggccactgcctgcgtagtgaatgcctggccgagcgtgatgccactggtatcaccataggtaggaagaatcggcaccgatacgataccgtcctgcatctgcggcatcagcggggtcacgaccagaggattgccctctttgtctttggtgccgtcggtatattgaatctgcagaaagtacgagttcggccccgatgagtcattttttgacagcagatcgatattgttgaccaccagctggctttgcgagcttaactgggtgtcggttttctgcagcatgtagttgttcaccaacgcgcggatggagaaggaaatcaccgacacgccgataagcagcacggcgatggtgcaggccaccagcttgctgctcaacgagatacggtcgatatgccgcatcagcatgtttttcttacgttcgtgccgctcttggaaatgggcggcgaacggcggcattgcaggcatgggattcgtgttcggggcggcgttcggcgtgctgctcggcggtacgccgcctgactgcttatcggggatactcatgagattgcgatgcgttatggatggggcgactagttcttcggttcgcgaatcatatatccgatgccgcgcttggtttcgatcagcggagtcaccttgcgcttgccgccttcgccgtcgtcgacctcgatgccgtcgactttcttgcgcaggtaggagatgtacgattcgacgatggctgcgtcgccgccccagtcgtattgccagacatggtcgagaatctgtgccttggacagtactcggccctcattgtccatcaggtagcgaagcagcttgtattcggtggggctcaggtcaaccggctgccctgcacgggtcacatcgtgggagtcctcgttgatttccaagtcggcgacgcgaataatcgggtcgtcttccacctgttcgcgggtacggcgcagaatggcgcggatgcgagccacgacttcctcgaggctgaacggcttggtgacgtaatcgtcaccgccgacggtcaggcccatgatcttgtcttgggtgtcgtcacgagcggtgaggaacagcacaggggcgttaatgccttcctggcggatgcggcgggtgacggtaaatccatcgatgtcaggcagcatgacgtccaacacgatgagatcaggctgcactttttcgataacctcaatggcttcggaaccggaagcggcggtgtttacctcgaatccggcgaagtgtagggaagcgaccagcagttctcggatggacggctcgtcgtcgacaacaacaatcgatgcttcaataggcttactcatgcttcctagagtgtcgcgctcttctgggcgtttcctgaatgtcatcttggagttcggccttggaatccttcttgatctccttgcgccgacgaatcaccaccatgaccacgatgatgatgaccagcgccaccaacaccacacccatgatgattatgcctacggtcaccgtggatgatgaggtggaggcttttttggatttcacgatttgatccatcattgccgttgccgcgccagaccagctcggcgggttttccagtaacggctgctgtgcggcttcggatagcttatcgacggttttgttatcgagaagccacttatcggagttcttggacacgacgaccaccaggttgccgtcattcgaggccacggcaagcatcactgtgttcggcttgggattcatggactccatcacggttgccgcccagtcttccggtttctgttgactattgaaactggaaagatacagcagatgcacgtgtacaccggtttccttctcggttttggcgatggcatccgcgacttcggccgcatgggagcccaggagattttccgtatccgtgatgttctcggtgatggtcacgccgctgtcggtgctgctgctggagctgtcagagctgtcgcccgagttatccccataggcatttgcggttatccacattgcgttcatcgctactgcagcaagggcgcaaatggcacaaacaagccattttcggaccatattcccgaaggccgaacaggacggctccgaagataggaccacaatagttgtttttccgtcttcccgattcgttgttgacatatcctccaccttagcggccggtattggcaagcggccgccatacataccattaaccctctagaaaaggagcaacgatgccccaatatcaggtagattccgagcgaatccaatcatcctcggccgcagtggccacttcgatctcgcagatcaggcaggccgtgggcggcatgtacaccaatctcaatgccttgcaggacgcatggcgaggttcggcggccacccagttcaccgcggtagccgaacagtggcgtgcggcccaacagcagatggaggcctcactcgagtccatccaacgctcgctgacgcaagcctccaccgtgtatgctgacgccgaaatccaagcttcgcgcctgttcgccagctagtttcttggctctcctccctgaggggagctcgatcgcgaagcgaaactgagggagtatccctacaccgcagctccccttagtctcactgcgttcgacagctcccccccccccaaagaggggagccagaatacaaaaaaggggactcccgaaggagtcccctttcagctcaatcagctagcgatcgcttgcggatcagtagcccatgtcggcaccggcggccggggcagcaggcttcggctccggcttgttggcaacgacggcctcggtggtcaggaacagaccagcgatggaggcggcgttctgcagagcggagcgggtcaccttgaccgggtcggtcacaccggcggccagcaggtcttcgtaggtgtcggtggcggcgttgaagccttcgccatcaggcagggagcggacggtgttgatgaccacgtcaccggacacgccggcgttctcggcgatctgcttgatcggggcctcgatggcgcggaacacgatggcggcaccggtagcctcttcgccggtcagggaggcgacggcctcggccttctcggccttggcagcagcctgaacgagggccacgccaccgccgggcagcaggccttcctcgatggcggccttggcgttacgcacggcatcttcgatgcggtgcttgcgctccttggcctcaacctcggtggcagcgccgaccttgatgacagccacgccgccggccagcttggccagacgctcctgcagcttctcacggtcgtaatcggagtcggtgttctcgatctcagcgcggatctgggccacgcgagcgtcgatgtcttccttggagccagcgccctgaacgatggtggtctcgtccttggagacgatgaccttcttggcgtggccgagcacggaggtgtcgacggactcgagcttcaggcccagttcgtcggagacaacctgagcaccggtcaggatggccatatcctgcagcatggccttgcgacggtcgccaaagcccggggccttgacggcgcaggacttgaaggtgccacggatgttgttcaggatcagggtcggcagtgcttcgccgtcgacgtcctcagcgatgatcagcagcggcttgccggtcttcatgaccagctcggccacgtgcacgatgtcctgctgggaggagaccttgccggaggtcagcagaatgtacggatcttcgagcactgcggtctggtcgtcagcgttggtgacgaagtacggggcgatgtagcccttgtcgaaacgcatgccctcggtgaagtcgaggtccaggccgaagcggttgttgtcttcaacggtcacaacgccgtcctggccgaccttgtccagagcctcagcgatcttctcgccgacctcagggtcggcggcggagatggtggcggtagcagcgatctggtccttggtctcgacgtccttggcggcggcgacgagttccttgacgatgacctcggtggccttctcgatgccgcgacgcagggcgatcgggttggagccggcgaccacgttcttcagaccctcgtgaaccagggactgagcaagcacggtcgcagtggtggtgccgtcaccggcgacgtcgtcggtcttcttggcgacttccttgaccagctcggcgccgatgcgctcgtacgggtcttcaaggtcgatttccttggcgatggacacaccatcgttggtgatggtcggagcgccgtaggtcttgtcgagcacgacgttgcggcccttcgggcccaaggtgaccttgacggtgttggcgagcttgtcaaggccctccagcatgccctgacgggcttcctcatcataagagatgatctttgccatggttgcgtattcctccaaatggctaggtataccggttatcactcgcaagcgtcgagtcgtgacgaccagccgtcagctgccgattatcactctcgacctccgagtgctaacccagacattagcactcgcgaccgccgagtgccaacatcatcggcggcgattgcgctttgggcatgaaaaggccccaaccgtcgaaacggtcagggccttcaatgcacatccttgcgtgcgtgttgctcactcggagcgggcttcacccgaagacagcttgacaacatcctttgcctgcgtgcctttgccggacgaagcgggcgtatactccacgcgatcgccctcgtacagcatcttgaacttattggtgctgccgtcgtccttgatttccgcgtagtgcacgaaaacgtcctcgctgccgtcgtccggctggatgaacccgaaccccttcttggcaaggaagaacttcacggtaccttgtgccatatctgatctttcctttgttcccttaggcgtcgcgacacaaaacctatagggaacgtagaaagaaccgcatcgcgctcccctacctcgcgactagatgacgattgtacagtgacgagggaacaatcccaaccgcagtggcacattttcggtacgaattatttcatagacgtgagaacgcccacagttttcgatgtattccacgccgatatcagggacgcatcaacaacgctagttgagcagcaccaccgtaatgggaacggcgagtccttgcacctgctccacagccgaaatgccaagcgtggtcgccacatcttcggcggtggctttatcggcttcattctgataccataccacggaagaagccggcaatgtgccgcgcggattggtcgcctcgacgctggtgtaaccggcggtctgcagcacatcggcctgctgacctgcatatccttggattcctgtggcgttgaccacacgcacctgcgtggccttattcacagtcgcggtggctccggactgctgagactgctgatcggagtcttgattctcattcgaggatgtcgtatcactgttggtatcggattttgccgaatccgaagtcgagtccttcgacggatcggtcgaagtggacgaggaatcatccttggtgctgtttttggtctcagccttgctggacgaatcggacttggaagcagtcccggacgtggtcgcagtctgggacgatcctcctattgcattcctgtattccccggaaatccatgcccagaccccgacaccgcacagtgcggccaccagaataacgacgatgaacgggcagaagcgggccactgccgaacgagcgccacggtgaactcccaccggtcccttcggaggattgtcgaaggaatccggttcataggattcgtaggtcatcatgtcgcgtgccataatcgccctttcttcctgtcaaaactacccatgagtgtaatcggcaaacaactcatcagtccaccacaccacgcctcgtgcaccggatatgcacgtttgactacagtggtgagtcatgatcaaaccattgagcgaactggtagagccggggtgggcccatgccttggccgacgtggagcccgccatccaccatatgggcgattttcttcgtgcggaaaacgccgccgggcgcccgtggctgccggcaagccacaatattctgcgcgcgttcaccatcccgttcgattccatcaaggtgctgattgtcggccaggacccctacccgaccccgggtcacccggtgggtttgagcttctgcgtggcgccgaatgttcacccgctgccgaaaagcctggtcaatatttataaggaattggttgacgaccttggggtgcccatgcccaccaacggcgatctgacaccgtggacggaacgtgaggtgatgttgctcaacagatgtctgaccgtcggcgtcgggcggccgaattcgcatcagggcaaaggctgggaggaagtcaccgaggccgcgattcgtgcgttgaacgcgcgcacggacgccgacggcaagcccaagccgctggtggcgattctctgggggcgtaatgcgcaaagcctcgagccattgctgaccaatgccttcattatcaaatcgcctcatccgagtccgctgtccgcttcccgcggattcttcggctccaaaccattctccagagccaatcaagccctagtcaccatgggtgccgacccggtggattggactctttagacagaccaacagtcattgtgagtagttacagtgagggcatgactttgttccccacgcaaccgaacataccttcgccgaccaccgccgcacgaccggtcaccgttcccacgcccggcgtgtcggctccgctgggtgccgatgacgccaaacgcgcacgtatcctggccgacgccattcgggcgaggttcgcccagacactggtgggtcaggataatctacgcgaatcgcttatcgtgaccttggtggccggcgggcatattcttatcgaatccgtgccgggcttggccaagaccacggccgcccagacgctcgccacctgcgtatccggctcgttcaaacgcgtgcagtgcactcctgatctcatgccatccgatctggtgggcacgcaggtcttcgattttgcgtcgcagaagttcaccacgcagatcggcccgattcacgccaatttcgtactgctggacgagatcaaccgttcgaatgccaaaacccagtccgccatgcttgaggccatggccgagggtgccacgaccatcggcgggcagcgtatcgccttgcccaagccgttcatggtgatcgccaccgagaatccgattgaggaggagggcacgttcaacctgcccgaagcccagatggatcgtttcatgatgaaggccgtcatgacctatccttcgcccgacgaagaggctcgcatgctggccatgctcacccaccgtggctccgatatgatcggtcccgacaccatcaccggcgaacgcatttccgtgtctgacgttgattttctgcgcaaggcggcacgccgcgtgcatgtttccgacgcgatcatgcgttatgcggtcgatatcaccgccacgtcacgaggtgccggctcccgccccatcaagggactgtcgtccttggtgcgtttgggtgcctcgccgcgcgccaccatcgccttgacccgtatcggccaggcgaaggcgttgctgtccgggcgcgactatgtggtgcccgaggacctcaaggcgttcgctcatgaggtgctgcgccaccgtattatgctgacgttcgaggcactggccgatggcgtggtcagcgatcagatcgtcgacaagatcgtcgaaacggttcctgttccgtgagttccgattccgttcgcaagaaaatcgaggcccttggcactcagctgagcctgcctaccgtaaggaaggctttggacgtgctggagggcgaacacgcatccgggcgtcgtggcggcagcggcgatgcgatggatgtgcatgcctatgagccaggcgacgaatcccgtcttatcgattggaagaccagcgcccgccaaggccgccccatggtggtcgagcgcgagcgcctgtcgacgtcacgggtctggttgctgatggacgttggcctggagatgactggcgtatgcccttccggagaacgcgcatggcaggttgccgccaatgcgctgcgtatgttcgccgcactgtcgttgcgccggtcggacgatatttcgctggtgttcggcgatgagtccagcatcacccgcgtgccgttcaacggtgggttcgcgcagttcgaacgcacgctggacaaggcgcttgatcgtgattgggatcatcaccgtaatatcgacgcgctgctggaatatgcgcgccgtatcaaggatcgtgaggcattgatcgtattggccaccgatgagcatgcgatggaggagcggcatatcaccacgatccgtcgtattacccgcacccatccgatggtgctgatcgatgtggcgacgatgaatccgttcaaggccgtctcatcccgccacgctcccgccgacggcttgagtgcacggcgtgtgccggcattcctgcgcaacgccaaggcagcggccgaggtcgatactcatcgcgcgtatatggccgcggctttggaacaggagctcacccgtgccggttcccatatcattcgagccgcatccagcgaatccatgttcgatcgtttcgtcgccctggtgtcccgggcattggcccgcaccacacgcaatagactgggcactgcacccgaactggtcggactgactttggcgggtgatctatgatgcacagcatgttccccatcatcccgctcgccactgatcccggcgatctcaggcccgtggagtcgttggccttgaccactcccctggtgatggccatcatcgcatgcctgttgctggcggtaggtctgatcgcgttgatcatcatgctggctcgccccgcacgcaaacctcggaacagcgaccgtgcgcgtggcactcatagcaatgccagctccaaggccgagtggcgtgcccgcatcgacgatgtggtggcccgtcatgaatccggagcactgccccggcatgaggctttcgtcgaattggccgtcatcgcccgtgatttcgccggtgccgcatcaggcaaggagcttagttccagtacgctgaccgatttggcgtacctgaatcgcacgcccgcgaatcgccaaggattggacgcattgaagcagaccattagcgcgttgtatccaccggaatttgccgatgatgcccgcaaccgaatcgcccagacgaccagcgtgcagcaggccgccgaatgggtggcgaatctggtggaaaggtggcgttcatgatgctggcatggcattggccttgggccgctctggccggcgtcttggcagcgctggcgattatcgtgctgattgtcgtgttcgcccgccgtaacgccgccgacgacacccctgtattctcgatggacgacgatctcaataccgagcacgcttcccgtctgttccgtcaatggcgcgctttgggccgtctcgccatcagcgtgctggtgcttgcgctggcgctggccattgtgctggtggctcgccccagccaagtggatgccggtgacgaacgcgcttccagccgagatatcgtcctgtgtctggatgtgtcgggatccacgctcccctatgatcgcgaggtcatcgatacctatttggaactggtcaagcatttcgagggggaacgtatcggtttgagtatcttcaactcgacctcacgcacggtgttcccgctgaccgacgactacgaactggtcaccaaacagttgacctccgccagcaaggcgctgaaaggcgtcgagtcgcaggatgacatcgataagatgtccgatgccgaatatcaggacatcgccaattggctcgaaggcacgcagaaccgcaaggacgccacctccttgattggcgacggcgtggtgtcttgcgcggcgatgctccccggtttcgcttatggcgaagccaatcatgcgaatgccgaccgtcagcgtgcggcatccatcgtgctggccaccgacaacgtcgtgtcaggcaaacccacctattcgctgaccgaagcgttggacttgacccagcagaccaaaatcaccgtggacggcctgtattccgggccgaaagccagtgaatcggaccaaaccacaacggatatgaagtccgcgatcgagtcgcatggaggcatcttcctcacccaatcgaatggcgcgtcgatagatgagctggtacgggatattcagtcgcgtagagatacggatgtggagaacaaggcgaaatcctcaatggtggacgctcccggtctgtggacgcttgctctggccgtgatactcattatctggatcgtatgtgcatggaggttgaggcgatgaacggattcaccttctcccccgccttgggctgggtcgccgacggactgctggcggccgggctcgccgtactggccattctcgaaatcgtattgtttgttcgccgccgtgcttccagtgacgagaccgtgtgggcttgcatacgacgtacgcttatgctgctcattgtcgcggtgatggtactgactcccagcgtggtatcgtctaccacctcacaggtcatcaatgccaccgacgtcatcgtggcggtggataccaccgggtcgatggcggtggctgatgccacatacgggtccgagaagaccattacccgcatcgatgccgcgcgtcaggccgtgcatgatgtgaccgctgcttacccggacgccagtttcgcggcgttacggttcggtgcttcgggaacacttgatgtgccgctgaccccggatgcgccggccatcgataattgggccaacacgttggcggtggaagccacatccgtgtcggcgggatccagtctggatgctccgatcgatcaattgctgctgaccgcgaagtcgattcgtgaagcgcacccggatgatgcgattgtgctgtacctcatcactgacggcgaacagacctcgaatgtgacgcgtcgtacgttctcgtcactgcgacagtatctcaatgatgggtttaccgtgggcgtcggctcgaccgagggcggcaagattcccgtcatcgccgatggcgtcagtgccggcgattccaacaccacggaccactgggtggtcgacccggataccggcgaacccggcatctccaagatggatgagaagaaccttaaagacattgccgacgagatcagcggcacatatgtggccgtggacgcttcacagactttggcggattcggtttcggccaggtcgtcgaagcagtggcgcatgaccaccacggtcaaggaacgcacacgcaccacgccggtggtatggccgttggccattgcgttggcgatattgcttgccatggaagtcggtgcatggatcgcaacctcaaggaggctgctgtgagaaacagtaacgaaatccacaagaacgatggctcggcgaatattcggatgcgggcgaaatgcccgctttgggcacgtatcgtcctggcttgtggcaccgtattgctgctgctggttgccggcgtggcggcagtaaacctgtccgcttcgattacgttcaatcaggccaccgcatcattgaatgccaatatcaaagcggctcaggatgagtcgactgatatcaccacgctcaaggcgcaacagcagcagaccgatgcgcaattcgccgaggccgggcgaatgcgtacgcttctgttgccgcaagtcaaggacgccatcgacaccaatgcttcgatttcttccgagctgacgaagatcaccctgaaacaggccgaggcgcagaacagcggttccgattccgggcaagcccagtcggcgcagcaatccgagagttcctcagccaatgccaaaaagggcggcgcgttgaccgacgagcagaagaagcaggtcgaggagctgatgaaggccaatcagcaatccaccgatacccagtcgaacaccacccaatccaagcagaaagcgacgcagaacaagggtaccggggccactaagccgtggtaagcagtcgttcacggttgctctttttctcacatcctcacgggtcatggccttatcgcggctgtttcccggtttcggctgtcggctttggcgtttgtctgatcccgatagcccatggctgatccaaggtgtgcccaaacgggctatttgtggataatcgttacggctatacacaacacttgtgaataacttcgcccaaaatcggcaagctagaaccacattggtcgttccggctggacaagcatgagtcctgtccttttagctggatatatgaatacctacaccagcaccccagcacccatcgatcccgccggcggctttgccggcaatacggtgacgccgttcgattacggcacttgcccttgccatgcggcggtacagcgtagtcgcgacctcgtgtccgtccaacgtgcggccacactggcgcaatcggaccagatggcggtggccgtgaaccgctctcgcaacatcgtgtggaccggtaaagccgccgacctattccgatcgcggctcagtcgcaccgcacagtattcggccagtctcgcgcaagacatggagaccacccaccgattggcttgggggtcatcatgagcgagcacgattactggcaggtggaatcgtccgtttacggcggagtgggatatgcgccagccactcttgaagaatatgccgccatagccaaggctctcgatgacgaggcggcaggatttgcggccatagccacggcttgggaatcggccgcattacagttgcagtcacatcggcatagtgcgccgatgtgcgtcaccttgcagtcgggcgatccgagcgccgttgttcccggccatgtcactgcaccatatgccgcgctgggcaatcggtgttatgaccatgcaacggcatgtcagcggttgagcgatgatctgcgtggcgcggccgatctgctgattcgcgcacactctctgtattctcaggcggagatgacggctcggcgcatgtttaccgaattattgcaggccggtacacaggccaaaccgggatatgccgcggtgggtgttgccgctgtggcggcgggcggctttctggccggctgggctattgacggcaaaccgaacccagcatggatgtccacgttcacctatccgttccaggaaggagtgctcagcggcgcgggcggaatcattggcggcgtacctatcggcaagagcattgcgcacaccgatgaggtcaacaaggctgcggggaaaatcgccaatttctccggcccggcgaaagacgtcgtccaaggcaatcatctgaacgtgcgcgaggtgcaggcgaatgccgacgtcgtccgtgcaagcggatcggtggccgagtcaatggagaatctgcgcaggctcgccgaagaacggctcggcaaaatcgagctgaacagcggactcgaatatgggaccatcgccattcaacgctatgaacgggctgatggaaccaactcctggctggtcaccatcccgggtaccgatggacaacctgactcaccattcggctgggcgcagaacgtggaactgatgagcgccgatcaggagcgccgcaggaaagcggacagcgctcgcacggttgccgaggcgatgcgtcaggctggtatcggcaaggacgagcccgtggcactgatcggccactcccaaggtggcatcgttgccgccacgcttgcctcggattgggcagaggaatataccatcgagcatgtggtgacagccggatcgccggtggccaatcatccgattccgcaacgcacgtgggtcaccagcgtggaaatcgatgatgaactggtcgccgcgctggatggtgccgccaacccggtcaccgataattggctcaccgtgcaagggcatgtatcgcccgcgcccgcggcaacaccatccacagtgcattcggacgtctcatgcactcccggcgcaacgcccatcaacggtctgaccccatatgacgccgcatccgtggctggttcgaccaacggcagggagttgtcgcattggctcaaataccatcaggccgcttatcagaacgccaccgacctcggctcccccgccgtgcagcgccacgaagcgcattttcaggaagtcatcaacggagaactcaaggaaacccgctattaccaaggccgcatgacccagtccacaaccattgctcccggcgagcgcaccaccgagttcagcacgttcggcggttaaaagtaaataccacacttgacagagttgtcaagaaaggagttaacaatataatgacgagtaggagatggctcatcaaactgatgaagcaagcggcgaaacgcaagaatattacgtttgagagtatcaggcaaagagggagtcatgagatattccaactcgatggactcatgattcccatcccacgccataacgaaatcgacaacgacctcgcgaacatcatttgtaaggaagcagaagccaaactcgggaaaggctggtatcagcagtgaaaacatatcaggtcatcgttcgtcctggcgaaaaatactggattcttgagattcccggtatcggtttcacgcaggcaagaacaacagcagagattgaaagtatggcacgcgaccttatcaccgtcatgacgcaagatgctgatttcgcactcaccatagagacaaaactgccgcaatccgtacaagagcaccttgatgaagctcggcgactgcgcaaggaagaagcggaatgcagatcgaacgcagcgcgggaaactcgcgccgcggcacaagaactacatggcatgggtctcgccctacagcaaataggcgatatactcggggtctcacggcaacgggcacatcaacttgtcaatgctgtcaatgcttagcatcaatcggctacccccacaatgcaatcaccgcagagacgcggctagcgccactttcccgggattgttgcgctaatgcacccacatggccctctattggcgttactttccaaggaatgttgcgctagcatgcccgtattcccctctattagcgctactttcccgggaatgttgcgccgctttttttatcaagagacgggtattggcgcatcggctacggactctctagcgatatacatggtatcgatatgattaagattatcgtcagaagacccgttttcaatcatctctagaatctttcgcgcgctgttcactcccatttgttctacctgctgagaaatcgaagatatccgaggagtaatcaattcgaatacttccacatcgtcgaatgagacgatggaaatatctataccaacattcagatgcagagtatgcatcgcccccatgcctgctaaggtcaaaggagaattagcgaaaaataacgcactcaccccttgtgaatacaacctactaatttcttcacacaccacatctctcgacccgtatggatcataattggcaaaatataaattgctctctccgaacaatgctgaggcaaaacgtcgaaagacacgctcacgctcaataaataccggggaaatggcagacggtccgctaacaaatccgacttttctatgtccatgatcacgaatatcaattaacgcttccagcaatccttgctccggattcgaagcaatgagagggaccccctgcactccggccgcaggacgatcaacaaaaatcactggcagcccatgatgtagaagagattccagtgcctcactatcaggaccttgcggcacgataatagctccatcgatatgctcagccaacaatcgacgcagtaacatgtcttgctgttgcaaatcatttgaaaatgatccaattaatgtcgaatatccagatgcaaataatgtgctctgcactgcatgagccaaattcgcaaaaaactcattacgaatatccgaaaccagaaaacctaccgtatacgaacgcgatgaacgcattgtacgggccatcgaactaggaatataatcaagctctttaatggccgcttcaatcttcttccgcgtgggctcagagatacgtcccttaccgttaatcacctgagaaacggtggagacagagactcccgcgcattttgccacgtcgctgattgttatgtaggacctctccatagcacccgactatacgtgaagacaccgattcttgcacattcagtaattggcccttcgctgtttggtgtgggtggggaccggtcaggtggtgacggttcgcaggtcgagtttgccgcaggtcaggtagatcatcgtggagaagtactccatgttgcgggagccccgggcccgggtcttgacgtgctggatgatgctgttgaggccttcggggatcgcgttggtgtgccggtggtcgaagtaggcgagaatgtcgtcccagtggcggtggaactggcgggcgagggttttcatgggttccaggcgtgacctcatcatccatgagcacaggtgtttgagaccgtcctcggcctcgacccggttggcgctggtgtcgtagatgtcctggagggtctcgcgcatccggtaggcgcgcgcggtcttgagccgttgccgttgcaggccgcgcttggtctgaagctggagttcggtcaggttcgcctcgtttttgagccacaggtacttcgtccttttcaacaggccgttctcccggcccccggccttcccggccttgtcgacggcctcgttggcgtgctcgatcacatggaacttgtcgatgaccttggcggcgtcgggaagccattggcggatgccctggcgaatcccaggctcatgtcgcacgtcaccgggcgcacgcggttggggtcgccgttgtggtccatgaaatcccttgcgaaccgttcgatggtatgcgcgtccttatccggcgtcacgttgatcacgttgcgttccaccaaatcggcgaccacggtgatgcagttgtgtccccgtcggctggtctcgtcgatgccgatcgcctccacgcccgcgtggtcctcgtacaggcgcgccttccgcacgtagtgcgtgatgaaccgccacaggcgggtgtcgtgctcgccgacctgttcggcgacgtccgcgaccgactggcatttcgccagttccacgaccatggcctcgaacaggagcgcggacgccgctgcccggcctcgcccacggcaccggcactgccctgacgccatgcgcggggcacgccacgcgcggcactcccacgtggatgaacgccttgtactggaagaagttcaggtgacgccacacgcgctcccgcacgtcatgcaccggacatgcctcctcacggcacccggcctcggggcagtggaagcgcgagccagactcgaagctgatcgcgacatgcagttcgcgtttgccgtcctccccgtcgcggaactccacgcccgacacactccacgggccgggcaactacaaggcggcggtgaacaacgaagtggtatccataccaccaaactagccgaccggtatcaccacacgaccggcctcacccacaccaaacagcgaaagaccatttaatatttagtaatggggtatcgtgactgcaatcatgacacccctggaagaggaagtgaatcccatgagatccccctcatttgatgaccatgtctagccgaaattacaagcagtaggcatgatcacgattgatgcaccacgctcagcctttctttttcttggagagcaggtcgtaggcgacggcggcgatgacgacgaggcccttgatggtcttgacccaggcggcgtccacgcccatgatggacaggccctggttgagcacgcccatgatcagggcgccg

SEQ ID NO: 933 - DNA, 13807 bp, Unknown
  R117_24m  MAG No. k141_9168
accgcgcgtcagattgcgggcgctgtgggcgcacccgtgttggtgattctgatggaaacgtttgccgctttgcataagcagggcggcgcctccgccgtcgccgcttcgatttttggcattcaatgggcgctgcgcatctccgcaatgatctgtctggcaatggtgttgatggtgttcttcggcgtcaagggcgacggtgccggtcgtacgcgagacattatttccttgcgcgcgttgcgcgaacggcgtgcgcggcgtatggctgcgaactgacggcagattcaaccattcttaacataataagaagccccggtttccaacaccggggcttcttattatgttgtgctatcgcaggatttcagctggagtctattacgccctgcccattagcgtcaggacaatcagcagcacgttgagcgccacaatcagcgccacgacgatcataaagatcacgtgcttgacggttccatcagcccacttgcccatgagttccttgttatgcgtgtaccgcatcagcggaatcacggcgaacgggatgccgatggaaagcaccacctggccgatgaccagcgcctgagtcgggtccttggcgaaccacagcacaatcagtgccggcaccagcgtgaccacgcggcaggcccacatcggggcgttgacgtgcagcagaccgtgcatgatttccgagccggcgtacgtgccgaccgatgtggagctcagcgacgaagccagcaggccgatggaaaagatcgtgccgatcaccgggccgagcacctgcgtgatcgcccgctgtgcgccgtcgatggagtccgtgccagacatgccatgcagcgagttggcggcgagcaccaacatcgccagattcacggtgccggccagcaacagcgcccaggccacatcgattttcgagcctctcagctgcgttttgatcgacggcttttcgccgcctgcgtaatggtcgttcaccagcgtggagtgcaggtagatggcgtgcggcatcacggtggcgcccagaatcgaggcggccatcaacaccgagtcggcaccttggaagcgtggaatcatgcctttgaccacttcgccggggttcggcggggctacgaacagacccgcgatgaagccgaatgtgataatcagcagcatcacgatgatgatgcgctcgaatgtggtctgtgtcttgccgccttggaaccacagcatcaccgtggagattacgccaatcgccaaaccgccgatgaacagtggaaatccgaacagcaggttcagggcgatggcgccgccgatcacctcggccagatcggtggcgatggcgatgacctcggcctgcatgaagaacatgaaacggccggcatcgctcatacgctcgcccagcagttccggcagggatttgttggtcacgatgccgagtttggcggactgatactggatgagcacgctcatggcgttggcgagcaccagcacccataccaacaggtagccgtacctcgcaccggaggtgatgttggccgccacattaccaggatcgacgtaggccacggccgccacgaacgcggggccaaggatgctggccagcgcatggtcatgcggcttcttattgttgttcgtccctgctccggccccggttccgactccggcaagctggcgttccttcccgatttccggtgtttcctgttcgatgtctgccacagcgttcgtcatagcggttgccgcagtggcatctgcttcggtgtgtgttactgccatatcgtttgtacctgttcccttcataccgcgcacagttatagcgcaggcatgtttcccgagtcaacagacggacaatctgcggacgattgatggatgaccggcggactggcagctggcatttcccgccatctcgctcatgaaatgtgaaaaaccgccgaaaactcgctcatgaaatgtgccagacggtagaaaactcgctcatgaaagtgtaaaatcattgatatagcagtaattcggaaaggggctcctcatgtatctcaaacgcaaagccgatgcctatctcaatgcatggaaatccgacccgaatcgctccccgctaatcatcaagggccctcgtcaagtaggcaagacagagactatcgattactttgccgcacacaactaccgttcggtagtggaaatcaacttcgttgaggaaccgaaatatcgtgcaatcactgcggacggttatggcgcgaataccatcgtccgcaatatttccctgatcgacccagccaaaaagttcattccgggcgatacgctcatctttttcgacgaaatccaggcccatcctgatatcgccactgcactgaagttctttaaaatcgacggcaaatatgatgtgatttgcagcggttcaatgttgggcatcagctataagcaaatcgaaagcaatagcgtgggatataagaccgactacgaaatgcgatcgttggacttcgaagaatttctgtgggctcgcggatacgatgaggccgtcatcgaaagcatgttcacccacctgtgtgatgctacgccattctctgaagtggaaatgaacgtcttctccacggcatttatggattactgcgtgcttggcggcatgcctgcggttgtcgcctcccatatacgcactggcacgttcgagggaacactgcaattgcagcgccagcttattttggactaccaggaggatatccgcaaatacacgcaaggacccgatcaggcacgaattctcaacgtgttcaaccatattcccgtgcaactcgccaaggaaaacaagaagttccaaatcagcaaggttgccagcggagcgcgtttcaaagactatcgaggatgcgtggaatggcttgaaacctcgggaatggtgaatatctgccgatgtatgtcctatcctgaactgccgttgaaaggcaattatgacgaaaacaagttcaagatatatttcggcgataccggtctgttcgtagcgatgcttgacgacgaggccagtgatgatctgcgggccaatcgtaatcttggtgtctataagggtgctatgtacgagagcatcgtctctgaagcgctacgaaaatccggctatgacctgtactactacaaaaaagaggattccacactggaacaggatttcttcgtccgcacgcgcgaatggctggtgccggtggaggtgaaatcgaaaaaaggcaccgccaaatccatgcggacgctaatcgcttcggattcttatccggaaattcagttcggcgtgaaactatccgccggcaatatcggtagcagcaaacacgtgttcaccgcaccatacttcaccacatttttgctccgacggctcctgcgcgcttatgacgaggggcaggcacctatgctcaacaatcctgagcggtagcccctattcgtctgcgggcacggcctggcccgggcaggtatggaggacggcgagcatggcatccttttcttgggaggtgacggtgagctggtacttgtctttgacgccaatctggcgggccacgtagtcgcaacggtagtcggcgttggtgggtagccagtaggcggcggaagccgaacccttctcctgattggccggaccgtcgacggccagcaggttataggggtcattgccgaattcatggcgtttggcagtggaccagtcgtgcgcaccggattgccaagcgttttcaagggccaccacatggtcgatctgcactttggcgctggtggcgcggccacgtacgaaatggatggtctgggcggtgtacggatcggccagtgtgccggactcgaccacacaggaaccggcgtatttgtaggtgatgtccgtgagatcgcgggcgagcacgtcgtcgcgtacgtcgcagccattgccgtcgacgtcggtggtgcggaaaccgaaggaatcgcggtcgtagccggaggagctttggttgtcgtctacggcgagcgcgttcaaagtgtcggcggctgaaccggtggcagtgtagccaccggtgattttggccacgtcggagctgacctgcggcagtaacaggccgatggtcacgccgattgctacggcgagaacgatgagaatcagcacgcgctccagcggtccagaggcgttgaaacgacggcgaaagtgggcgttacgacgtgccatcaatcacgcataggtgaaggtgagggggtcgtggccggcgcgggtggggccgtcgagggcgtcgatggcagcgtgttcatcggcggtcagggcgaagccgaacaggtcgagattctccctctgacggtcggcatgcacggacttggggatgatgatcgtgccgttttcgatgtgccagcgcagaatcacctgggccgggctgacctcatgggcggcggcgatcttctcgatggtgccgtcgccggcgttgaggtcggcgccacgcgccatcggcgagtaggcctccacggcgatgccgtgcttcttgcagaacgccaccacttcgcgctgctgccacgtggggtgcagctcaatctgattgacggccggccatgcgccggtctccccgtgcagacgcttcagatcggcgggcatgaagttgcatacgccgagcgtgcgtgccatgccttcgtcgcgcagcttgacgaacgccttccaggtgtcggtgctgcgccagtcgaacggcgtgggccaatggatcatgtacatgtccacgtaatcgagctggaggagtttcagggagttgtcgaatgccttgagcgcggagtcgtagccctgctcggagtcgcgcagcttggtggtgacccacagggtctcgcgcttggcgccggtgttgtatccggaagcggcgagcgcacgacccacgccggcctcgttgttgtatccggcggcgccatcgatgtggcggtatccggcttccagcgcagattcgacgacaggggccacgccctcgtcatcgatacgtagcatgccaaggccgacctgcggaatggaatggccgtctttcaaggcgatgtccggcacgttggcgggattgatgtgtccgttggtcatggcttgtgatgctccttcatgtactgcaactacacgccactgtacacggttatgcaggcgatgtgcgggtgctgcaaccaaacggcatgattgcgcccggccttccgtgtgggagagccgggcgcaatcatgacaacatcacgctctactcctgcgaccggccctcgccctattgttcccgggcgcgaatttgccccggtacaggcgtcaatcgattgacgtttgcaccggggcagaaatcgttgtcccggtacgcaatttcgggccattttcgagaaccaggacaagacaatccccaaagtccacataccccgacaaacagaatcggcggaatacagccaatcccgaaatcaacatactgtcccggttctcacgtagaacgattgacgtgcaaaccggggcaacgggaattgtcccggtacgcgaaaaacacccgttttcgcaaaccaggacagtgatttctgtcctggtacccacatcaaacgattgatgcacgaaccgggacagaatcgcatcgctgcgccgagacagacgcatctgacagccgacaaccgataaacgacagccgacagatggcatctggcagccggttgccggctgccggcaaccgcatcataatgccgcatcagtctctatcaggagcgcttacgacgcaaagcaagcgagaccccgccggccacgccgagaacgacaaccgcaagacccacggcagtcaccgcgctaccggtattgctcagcacaccagtgatcttgtcgccattcgcaccgttggtcttatcgccctcgcccgtatcgggattgatagtagccccgccattacccgcaccgtccgagccgttgccggaaccatcttcggcccgagcggtaaccgcaaccgtataggtttcggtgacattcggattcgacttgagcgttacggtaaccttcgccgcatcagcgggagcggagaaatcgtaatcgagcgtgaactggtcggcggcaagcgtcacgttgcccatgcctgcggaatagttgcccacgaccttgagatcatggtcggcatcgatggcatcgcccacctgataggtggttttgcttggcgtgacggtcaggctggagacctccttttgggcgaggccggcaatggtctgcgtggcggagaaactgtaggcatcggatgcccaaaacttcagcgcgcgcttgccgtcggcggcgttgccactgtcttcggtgatggacgcaccggtgccggcaatggtccagttcttatcgttctcagcgttctcgaagctgccgtccgttacgtaatccttggcgggagtggcggtgacggtgacggtgacggtcacgtcgtggccagcgttggtggtgccggtgatggtgtatgtgcctgcgccacgaatccagtcaagcgcagcggattgccaggtcacggtttcggtctcgtccaccccatcctgatagtgtacggccacctcactcggcaattgcgctttgatcgcgtcgatggaatccgagtcagtcgcggtaatctccactggatctatcttggtgaacacatgatcggtgacggcaccggtgtgaatgtacttgaacgtctgcagagaggcgagcgccttgccgccggtgcccacgggcacccatgcgggctcccagtagaacacacccaggccgtcgttttcgccatcgccatcattgtcgccgatattgttcacggcctcggcgaccgcgcgaatctcatcggcctggccttgcgggctgatgtcgtatttcttgaggttatcggcggttactttactgggcactgtgttggaatcgtcgtcgccatcatccaaggtgtatgcccacgacgtttccgccatggaacaccggcaacaacgtgctcgcgtggcatggcgtgtactggcgacagtcaccacggcgaccccgccatggaacgtggcacaaccatgcgggggacgctctatgtgcattcagtcatgctgccgatgctctttaacttgcatatccacgggggcagcacgaggcaattcggccgcctttacccgtacatccatggggcggcgaaaatcccatggggcggtaacttgcccatggggcggtcggtaaaattttaccttccgcagaatagagccattttcagctaccgccccatgagggattcaccgccccatgaggaaatcaccgcctcatgggacatctatataacaacgacttcgtgcagcagcaccagcattacagcaatgtcgttcagcgtgtggaggcgcgggcgatgacctgggattcggtggtgagcagttcggacttggtgatgctgccgtcgatgcgtccgaggatgcgatccactgccgtgggagccgtccagtcaaggcgggaatccatggtggtcagcggaatctgcaggtagggggcttcctcgttgttatcgaagccgatgacctgcacctgcacgggcacctcataaccagcggtgcgcagagcggtcaatgcgccgatggccaactgatcgttcaaggcaatcacaccgtcgaatggcacgccggaatcaatgagccgctgggtcacacgggcaccggctccgatggtccaatcctgatcggtgttgccaatcagctgcggatccaaggagagcccacgcctacgggtctcttcgatgatgccgcgcagacgcagctgcgcgttgccttctacggcattcagcaatgcatcttcgtcgtaaacgtcacgggcaccgatcactgcaagtctggtggaaccgcggtcatacaggtagcctgcggccatggcggctgcggatacatcgtctgggatcacgtgatccacaatgccccacgtggtacgcgcgccaacgatgaccagcggaaaatcaaccttcagatcatcgggcgaaatgttttccacctcgctcatggaaaggatcatgccatcggacaccgtggagttgaacttcttcagcagatcgcgcgcgccttccgcggagccttccgcatacgtggtgacgtatacggaatagtcgcgctgacgggcggcctcgatggtgcggttggcgagctcggccagatatggcggaatcagcgaaggcacggcgagggtgatgaagccggtgtgatcgcggttgaggttgcgggcggccacgttgactcggtagtcgaggtccttaatgaccgactcgaccttggcacgggtctcatctgtcatacgcccggagccattgatcacgttcgacgcggttttgagcgatacaccggcggcctgagcgacatcgcgtagcgtcactcgacgcttggctgttttctcgtcgctcatgccgcactcctctatccggacaacattgccattctagcgcggtctagcagaacgttttagcgataagaatggcgttgcggttcagcgtatatccaacggcgtcagtctcgcaacggtgggcgatgatgggatcaccttccacaccgttgatggcgacgggctggtttgagcggttgaggtagaaatcgaagcgggtggagccgtctgcggatcggcggatggtgtgcaggatgcggggatctgtggtgggataggttggagtttgaccactctcagtcggctgcgccgacaactcctgccatcgggagccaagtgctttgagcaactgggcaatgtcgtgacggttgaggtcgcagcccacgtagatggcggtaccgttgccataggggcggctggtgatggcgggggtgcgctccagctcccagtcggcggcggactcacctgcgtaagaggcaagcactgtggtgtccgcggctacggaagtcacgtcgttctgccacaggcgggtcgtcagaccattggacaggctgatttcgctgggctcgccttcggcttcttcaccgaggatgttgaattcttcggagcggatgccgagcatgtcgcgtaggagcccgttgccggcgccggggtagccgccgaggccgatgtggaagtgctcgtcgatcaggccggcggcatagccgacgatgacggttccgccggccttcgcgaagtcggcgatacggagaacgtcttcgtcggacaggctgagcacggtgggcagcacgatggttttgtagccggtccagtcgtaggcgagcggcaccacgtccgcgcgcagcccggcatccaggaagccgcggtaccagtcgcgcacgtcgtgccagtggttgagtttcatgctgggcagggtttcggagcgtgtggcccattcggattccgcgctgaacaggatcgccgtgccggcacgctcgagctcagtgccctgcagcccggcgtcggagagggtcttcagcgccttaccgagctcgcatacgccgcggaagaccttggaatcggcacccgcgtggggcagcatggcggagtggaacgcctcggcgcccgacttggattgccgccattggaaaaagcagatggcgtcggcgcccatggccacgtgggccagggagtcgcgcatgagttcgccggcccgtttgcgtgtgttcagcggcttccactgcacggctgaggtggagtgctccatcacgtaccacggcttgcccagcgcgagggagtccatgagcgcgtccgagcaggcgagttcgtccaggtgggattcgccctcatggaagtagtgatcgttggacacgaagtccacctcatccgcccatttggcgtagttcatgacgcactggtcggtggagaccatgaagttcgtggtgaacggcttgtcggggcagatctgctcgatggcgtcgcgttcggctttgtagaagtcgagcagcatgtcgttgccgaaccgctcgtaatccaactgctgcgacgggttgaccatggcgtcgccgcccatgtgacgtggcagcagcacctcgtcgaaactgttcacgtgctgcgaccagaaggccgtgccccacgcctcgttcaacgcgtcgatggtaccgtacttggcctcgcaccacgtgcggaacgcggccaaggcgttgtcggagtagtcgtagcggttgttccagccgtattcgttgcccatgtgccaggcggtcacatacgggttgtccttgtagtgttcggcaagtttgcggcacaggcgcagcgcgtattccttgaacaccgggcttgtgggctgccacgactggcgtgagcccgcgttgacggtatgaccataccggtctaccggcagcacctctggatgggattcgtacagccacagcggcgcggcggctgtggcggaggccaagtccacggcgatgccggctctgccgagcctgtcgatcacatggtcgagccactcgaacgtgaacgcgccctcgaccggctcgatcttgtcccagctgaaaattgccagcgatacgacgttcacgccggcctcacccatgagacggatatcctcgtccagcgtctcctcgggccactggtccgggttgtagtcgccgccgaacgcgatgccgcggccggattccgtcagcagggacggccacctaaatgctctatgagtagtcatattaatcaaatcctttattgtatcggctcatggccggtgctgtgtttgccggttttgggctttggctcccctcagtctcactgcgttcgacagcgtcatcggcgctttgatcaaggcgtgaatgctgcgttgcgttactgcattgccatgttgccatgttaccgcgttattgcatcgctacgttgccacgttgccacatcacattgcattgccgcattgctgcgttgccgcatcacatatcgcaacacaaacgcagcaacgcaatgacgaccggagatggcatcgccgccacccgcgaggaaccgcaatgcaacgcggtaacgtaacgcaatgcgatgcgattcccgcgtagttacaggcagttacagattgagtaccgcatcagcaatgcgcatggcggattcgcggtgggagaccagcaccacagccgcgccgcgctccttgtctgcatgctgctcacccacggccatagcgtgaatggaacgtagaataatagcctcgttcaaagcatccaaacggctggtcggctcgtcgaaaagcaccagatcagcattgcgcaggaacacacgagccaaaccgatacgctggcgttcaccttcggatagacggtcgcccaactcgcctacctgagtatcaaggccatcgggcagggaatcaatgagatcaagcacggaggccttggcgagagcctgacgcaaacgagcatcgagaccgtcagctgctgccacctgaacggcatcgccctctgccgattgcgccgccaactgctgctgtcgggaatcaacggtcttggcacccacttccccattgcctgcaacatttgcagcttcaacctcggactcaggcaaagcaatcagcagattgtctcggatagagccatcaaacaggtgggtttcctggctcatcatggcctgaatacgtcggcgagcatgcacatcgacctcgggcaacggcgtgccggacaacgtcacctgaccgcgctgcggatcccagtagcgcagcagcagcttgagcatggtggacttgccccggccggacggcccctggatacccagcacgccatgctgcggcacgtcaagcgagaagtcggacaggacttcatgctcccccgcatatgcaaaggtgacgtcatcaagacgcatgcccatatactcctgcggcacaacagtgccgttctcggtcacagcgggcacctcgtccatcagtccgaacagtcggctagcggacgcgaaggtctgagtcaggttagcgggcaaggcggcgagcgccaaagtcggttcgaacgagctggcgaacagcacgaaggcggcaatcagagccggaatgctctgcgggttcgcgccggcacaggcaatagccacggcgaccgaagccgctgtgagcacagccaccaagagcccgctgattccggtgaaacggccgttgaccttgctgagtttggcgtgatccttccacaacgcatgggtacggtcctcgatggcctgcgcacgttcctcgccgcggccaaatcggatgatttcgtccaggccgcgcatgtcatcgagtatcacatcgtcgagttctccggcagcgccacggatggcagggccaaggttacgtacgccggtggcaaagaatcgcggcacaaggatgccgataaccaggtgggcggcaatcaacgccagcgccatccatgggcttagggtggcagccacaatcgtgtagatgatggtggaggttaccgcgatggccaccggactgatggtgtgggcaaagaagatctcaagcagttccacatcggtggtcagcatggcgataaggttgcccttacctttgcccgcgagcttggccggcgccagtctgcgcaacgcggcgaacgccttggaacggaagagtgcgagcagatggaatgccacattgtggttcagatattgttcaatgtatcgggtgatgccacgcagaagagcacagataatcatcatgatgacggcgggcgcaacacccatgccccacaccggattaccggtaagtgcaaatgccgcgataatgccgaacacgggcaggaaagtggccgaaagatggccgatggtgccggcggtggaggccgctgccatcagtcctgccagaggtcgggcttccttaagcagtcgcctgatcacttggaatgtgctcattttggaagacgaatcgctatttgcaacaccagccggagtctcagccgaggcctgctcactcccgccaacggaagccgtcggcaaagctgactgcaggcggtcaaccgtcatacccgcctctgcgcttacgcgcgctgcgccaccctcagtccgactgtcgtcggacagctcctgcttgcgggaaccaacctgcagcacacgccgagcatggccttctccgaagttctcaatatctgcctgcgtggtaaacagcttggcgtagacgccgtccgccgtcatcagctcggtatgggtgcccctctcaaccgacttgccgtgttcgagcaccaccacttgatcagcgtattcggcgttggccatgcgatgggtgatcataataaccgtcttgccgcgggattgcgccaattcgcgaattgtatccaggatcagctcttcggattccatgtcaacgctgctggtcgcctcatcgaacacaaataccggcgaatcatgcaggagtgcgcgggcgatggcgatgcgctggcgttggccgccggacaggttggcggcatcggactcaatcggcatgcccagtccgttcggctgtgcgtgcacgaagtcggcaatgcgcgcctgctcgagcgcggaccacagacgggagtccacggaatccggcgaatcaggaatctcgtcatcgggcaaggccatcagaagattctcgcgcaatgcgcccgcaaacagatggctgctggcaccaatcacagtgacggctccggccagtgtttcgcctgacaaatcggatacctcgacgccgttcagtgtgagcgaacctcggtaaccggccagtgtaccggcgagcagcgaggcggccgtggacttgccggaaccggagatgccaacaatggcggtgaactgaccgggccgtgcggcgaaggtgatgttggtgagcgcaggagcgacggcggaattggggctggtttcaccttgcttatcggtctttgcggatgcggacttggagtcgccgtgcccggcatcatcataggaatagccgacgtggtcgaagcggaccgtcagaccgtcgtcagcggaatcggaatcgttggccggcagggtcgccgtgccatgctcgggctccggggtgtccagcagagcgaagatgcgcttggtggaggtcatgccgttcatcgccacgtggaagaacgagccaagctgacgcatgggaataaagaattc

SEQ ID NO: 934 - DNA, 9237 bp, Unknown
  R117_24m  MAG No. k141_9527
aaaagatcgcccgccgtgccaccatgcgcggcatcacggtcggcgtgttgctggaggtgaacgaatccggcgaggaatcgaagtccggctgcgcacccagccacgccatcgacttggctcagcgcatcggtgcgatgggcggactgcacttgcagggattgatgactattggtgcccatgtggatgatgagcgcacgattcgtgcgggcttcgcgcatctgcgccgcactcgtgaccagattcttgcctccggtgccgaaggcacggccgactgcaccgaactgtcaatgggcatgacccacgacatggcctacgccatcgaagaaggctccaccatcgtgcgcgtcggcaccgccatcttcggcgagcgcgccttcatctgattggagctatacgaaaaaacgccgcttgatcaatagccaagcggcgttttttcgtaaggattttcggcgtatcaatcacgcatagatattgcgtggacgcatgtcctcgggcaggccgtcgagcagaatcgccacggaaccttcctcgaacacggagcgaatacccgcggccagcagcggtgcgcaagacagtacggtcatattcggcaggcgcttctcttcgggaatcggcacggtgtccataaacacgatttcatgcgcgccgcagtgagacaggcgctccacggccgggccggagagcaggccatgggtggcgaccagcgtcaccgacttggcgccggattcgttcagggtgcgcacggcttcgcagatagtaccggcggtatcgaccatgtcgtcgatgaccacgcagtcgcggccgtcgacatcgccgataatgccatgtgcctcggcatggttcggacgagtaatatcacgctgtttgtggatgaatgccagcggcagattgcctagcttggcggcccactgttcggacaccttgatacggccggcatccggggacacgatggtggtgttgcccagatcaagggtggaacgcacgtaatcgagcagcaccggcatggcggttagatgatcgaccggaccatcgaagaaaccctgctcctgagcggcgtgcagatcgaccgtcataatgcggtctgcaccggcggcgcggaacagatcgaaaatcagacgggcggtgatgggctcacgaccgcggtgcttcttatcctggcgcgagtagccgaggaagggcgccaccacggtaatcgacttggcggaggcgcgcttcaaagcgtcgatcatgatgagctgttccatgatccacttgttgatatcgcccgaatgacactgcagcacgaacacgtccgcaccacgcaccggttcggtgaaacgcacgtacatctcgccattggcaaagtcataggacgtggtttcgaggatttcggttcccaaacattcggccaccttctcagctagctcggggtaggcgcggcccgtgaccaatacgagtcgtttatccggagtgccttcaagaatcgccgacatgcgttcgcatcctttgtttgagtcgctgtgtgatttacgccttaaccagtgtacaagcaccccgccgcagcgaacgccacggcggggtgcctatttcgtaagagtgttgagattgccgaaattattcggagaactcgacactgaccttattgtctttgatggtgaaggtgccgtacaccgagaaagtgctggaatcatcttccggttcccagccatcgctgtaacggtactcgtaattcgccgtcacatcaccttcgtcggtgctgaacgagctatccgacaggctcacgctggtgaccttcggataaccgtcaatcgtccacttgaagttgcggtatcggctggaattggaggtgtagtagccgaacgggcagccctgcggttccgcatcggtggaagccgcgcattcatccagcttgctcttcaccgccgtgtcgatttccgacgtcaacttgtccgtaggctgagcgtcaagagtgccgctatcggagctgttggtgctcagagacacggtcttggcggtgtaatagtcggacttcaccacgccaactttgtagacgccggggtacaccttgagccggtagttgccggtttcgtccgcgtcgttgttcacggcgttcttgggcgttacggtcacgccattgacggtgatgctgcccagcgagcttggcgcatataccgaaatggtcttgaccaacggttcggcgacggtccagttcttgaagatcaggaacttgctgccgttggccaccatcttgatggaatcgccggtgacctccttgccttcaagcgtgtacgtcagctgggcgctcacggtgccatcggcattgttggaagtctgcgagatgcgcgcgttggtgatgtgcgtgttctcgcccgaggatgccttgctggtcagcagtgcgcgctggttcgtatccacgtgaggatcggcgatggtgttggccttgtcgtagtcgccggaggagatggcggccacatagctgttcgccacgctcttcgcgctgaacacggcggaagacagcacgccatacacgataccgaacagtacgaggaagccggccacggcaccaacgatgatgaagatcttcttctgctgctcattcatggtggtggaggtcgcgccaggtgcggctaccggtgccgctccgggagtggtgggagccgcggttgcgaatgcggtgcccggagcaccgggggttgcaggggcggctggggcgcctggggcagcaggcgcgggtacgccgacaccggcaacaggaggctggccggcggacgtcggcgtggcgttgacgtgaggctgcgcagcgtttgcgcccgtacccacaccggcgctcggcgtgccccacgtgggccacttgccgaccattgcgccgctggcatagatgtagtcgaccaccggctgaggcgtagcacgcacagtgccgcctacaagcagtgcccgcagtcccggcatggaaaccaccatggtcgggccgaacgtcagcgcaacgacctcaaccaggaatgcccacaggcccatgaccaggaagtaccacatggcaggtccgatggtctgaacttgcgtgacggaggtgcggttgcccatagtacccatcagcagcgtggcaatcgcccagaacaccatgatggcgatcggggctttccagcagtgctgccagcccatgtaggcacggtcgtacaggttgcgtgcggagacgcgcaatgccgtgtagaaggtgaggaccaggaacacggcgaacaggatccaaataggccatacggtaacgctgaggttgatgctgaacaggctgagatcctgcggcagctgaccggactcggtcagtgtaatggcgccgaaggttccccaggtaaagaagaactcgccgatcatcagcagtgtgaccgggaacgtcagtatcaggattccctgacctgaggagaatgccacggcgaacagggccaccaggccgacgatgaagagcaaagccagctggaagctcaagacgctgaccaccgtgcgcgtgtatccgcgaacgcggtgtgcccactgccaagtagctccgaacacattcttggaatcggaagcatattgggccagtgcatagccggccagagcgccgagcgcggagagcaggtaggccataaagaacgtacgcactgtggcgccggtcaccttggccacgatggtggtgccactggcgagtggtgccgccgcgatggccgcaagcagcgtgatgaccacggccggcagcaatccggtgataaagccggagatcaggccggtgaacttgaatcgaatgctcttggaacgggccagcatgaatgcgccgaatgcggtgccgaccagcaatgccaagccggtgagccccagtgggtacgacatcatgttgctggcgtccatgctggaggatgagaggtcgacgatgtcgaaatgaataccgccagacaggcccatgaccaacgataggaacaggtagtggaagaagttcatgccgttgccggtgatgaacatgccgccaacggcttggttcagtgttgaatcggccccgaggctgggtgctgcggtgctcatggaattcattgcgattgcagggaaaatcgaaagcaccaaggcggctgccgtaccgatgccggccgcaatgccgatggtctgcatgttgggggcgccgaacagttccttgaccagtgggctggaagagatgggttgtgccggagcggcgggagccgacgatgggccgggctgccctgggttcggaatggccgtggtcggtgcggtgaatgccggtccgcctgcgggctgggcctgcggctgtgcagcgggctgaggcgtcggctgcacagccgctgcgccgggcaacggaatcgatggtgcgggagccgcgggctgtgcggtcgtgggaacggcgccggtgggttgaccgggcgtgggtgcggcgggcgtcgctgctgctggagctgacgccgcggcaagatggttgccgcaggaaccgcagaattgcgctccttcgcgcacagctgcgccacaattaggacagaacatatagtccccctttcttctgatgcttcttcgagcactatcgtacccgcaaaatcagcgccatgaccatagggcgaggctcgaaatggacaatactgggtgatggcgcgcgggcttggctgcgcgggcttggccaaaatggtgggcatcgcgaaaccggcaggaatatggccataccctgtcccgccttatatatagactgtccaagttgcccgaagatgcggtgccggtttggtgctgcgccatgggctaacacgcatacacactcctgccacggaacgtccgtggccgaatagtccgaaggaggtgggtgatgtctgcgcacaagtacgaactgatgttcatcgccgatcctgagctggatgagcgcggtctgaagaagctgaccgagcagtatctggaactcgtcaccaaggaaggcggctctttcgatgagcccgattactggggccgtcgcaagctcgcctatgagattgccggtaagaccgaaggcaactacgtcgtggtgaagtacaccgccgagcccgctaccagcgatgagctcgaccgtgttctgaacctcaacgaatccgtgatccgtacgaagatccttcgtaagggctgaatcaagcgtttagtcagctgaacagctggtattcaaggtaagtaagaaggaccgttatggcaggcgaaaccgtcatcaccatcgtgggcaacctcactgcggaccccgagctgcgcactattggcagcggcgcgaccgtggcgagcttcacgattgcttccaccccgcgaacctggaatcgtcagaccaaccagttcgaggatggtcaggcgctgttcatgaggtgctcagcttggcgtgacctggccgaccactgcgcccagtccctgaagaagggcatgcgcgtgattgccaccggccgcctccagcagcgttcctatcaggcacaggatggttcccagcgaaccgtcgtggagatgcagctcgatgaaatcgggccctccctgcgctacgccaccgcacaggtgacccgccagtcgtccggtcagggcggcttccagggtcgttccggtggtttccagggtggtcagcaacccaatcagggctatggcaaccagagtggccaaggtggttatgccggtggccagggcggttacaacggtggctatcagggtggtggcgctggatactcccagcagcctgccgctcccgccaacccgtccgctcctgcggccgacccgtggagcaatgccggtgcatctgatgccggtagcttctccacgttcggcgcttcctccgatttcggcggcggcgacgattccgacccggagttctgatcagtacttacctccccgctgccagcagcaatcaatatcaagatttataaggagaacatcatgtcacgtaagaggccgcaaccgccggtcaagccgttcaagaagaagccgaacccgctgaaggccgccaaggtcaccgagatcgattacaaggacgtcgcgctgctgcgcaagttcatttccgatcgcggcaagattcgttcccgtcgtatcaccggcgtgaccgtgcaggaacagcgcgagctctccaaggcgatcaagaacgcccgcgagatggccctgctgccgtacgccacctcgggtcgctgagttagggaggctttgaacaatggctgaaaccaaggttattctcaccaagaccgtgtccaacctgggccactccggtgacgttgtcgacgtgaaggccggctacgcccgcaactacctgttcccgcagggcctcgctttcgcgtggaccaagggtgctgaggctcagatcaccgctatgaagcgcgctcgtctggccaaggccgtcgccacccgcgaggacgccgtcgccgctaaggccgccatcgagggcaccaccgtcgagatcgccgccaaggtgtccgagtccggcaagctgttcggtggtatctccaacgaggccatcgccatcgctctgtccgacaaggccgcggtgaacccgaaggccatcgaggtcgagaccatcaagaccaccggcgatttccccgccaaggtggccctccacccggagatcaccgcttccttcttcgtgaaggtcgtggccgagtgagtcattccggcctagtgctggaatcacacagaccaagagtctgagcttaagcatcatcccccgtgcggttcgcgccgcatgggggatttttgtattggtgtttaaaaatgctggaaataggcgcgacacgccgagagttgcatccgcttcaaatctgagtatatttaacacctgttgcaaggaacacttcaacatctaaccaagcccctgtagctcagttggttagagcagctgactcttaatcagcgtgtccagggttcgaatccctgcgggggcacagacaaccggaatcgaaagattccggttttttgttttttccagcatcagtccgtagctggtgcggaaaggccgtcttcgcgcgtgacggccggacgtgtaaggagcggcgtcatgtctcagatattcgcgttcaccgtatccgaccccgaaggcatgcacgcccgcccagctggccggttggttgccaaagcgcaggaatatgagtcgaacatcaccgttgcctacggcggcaaatccgtggatgccaagcgtatcttcggtgttatgggacttgatgttcaacaaggtgacgaggttacggttcgggtgcagggcaacgatgaagctgtcgctgccgcagagttcgagcgattcctcaaggagcacctgtaatgagaacgatacagggcgtcggcgtatccgctggcattgctatcggcacggtccgcgtgctcgccgccgccgatcatgctgtagaacgccgcgtaatcgacgatccgcaggctgagatggatcgattccgcgcggcccgtgacatggccgtcgctcagctcaagcaactgcgtgacaacgtcgccgctgagttcggcgaaaacaaggccgagctgttcgacgcccatcggcttatgctccaggacccggactatgcgggatgcgtcgaaggtttgattgcgcaagacaaggtgaacgccgaatttgcggtgaaaagcgtcgccgaacagttcgccgccatgttcgctgcgatggatagctcgaccatgcaggctcgagccgctgatgtcgaggatgtttctcgccgcgtgatgaacgtgctgcaaggcaaacgcgatagcacggcgcaggatggcagtatacaaggcgatgctgtgcagaacggtactgtgcagaacgggattgcgcagaacggcgaaagccacatcatcttcgcccaagatcttgctcccagcgagaccgcgcagctcgaccgcgctaaggttttgggcctcgtgaccgccaagggctcagcgaactcgcacaccgcgattctggcgcgcacgatgggcctgcccgccatcaccggtatcggcgacgccttcgacccgactgatgacggtcacgttgccgtaatcgacggcgccagcggtgcggtgttcgtcgacccggacgaggccacgctgaccgagtgccagcgcaggaaggccgaagctgaggaacacctgagcctactacggaagctcaaaggcaagcccaccgaaaccaagtccggtcagcgggtccacctgtacgccaacatcagccgtccctctgacgtagccgccgtgctggccaacgatgctgagggcatcggcttgttccgcagtgagttcctgtatctggaacgcgaggactggccgaccgaggaatttcagttcgatgcatacagacaagtcgcacaggagatgggcgaccgtccggtcatcatccgcacactcgacatcggcgcggacaaacaggtcgactacttcaatctggaccacgaggataaccccgcgcttggttaccgggcaatccgcatctgcctgacccgcccggagattttcaaagtccagttacgcgcattgttgcgcgcctcagcatacggcaatatcgccattatgctgcccatgatcacctcggtgcaggaggtgcgcgacgccaagcggattcttgaagaagccaaaagcgagctgcgcggcgagcacaccgacttcaacgagagtatccagatcggcgtcatgatcgagacgcctgcgtcggtcatcatggccgacgagctggccgccgaagtcgatttcttctccatcggcaccaacgacctgacccagtacacgctggcctgtgaccgtcagaccccgagtctcgaacgctttgccgacccgcattcaccagctgtgctgcgcatgatccagatgactatcgaggctgcccatcgtcatggcatctggtgcggcatctgcggcgagcttggcgcagacctgagcctgaccgatacgttcctgtgcctaggaatcgacgaactgtccgtctcgcccaccagcgtcctacccctgcgcaacgtcattcgcaaccactgagagtcaaggtcgcttcggctgattccggtggcttttttgggcattgcattcggctggacattcgacatcgcatcctgccagcatttcgtcgtggggcaaagtgtacaatcgccacgtttgctttcgcgcccagcgtaaatcgcgtcgccggctccgcgaacggatttccaatcacacagaatgccgtgaacagtcagccatgcctgttgcgcggcgaagagaaaagaagaagcagtggaatactctctctttaccaagctggccgccgagttcttcggcaccgccattctgatgatcttcggcaacggctccgtggccaac

SEQ ID NO: 935 - DNA, 8252 bp, Unknown
  R117_24m  MAG No. k141_9791
acatgggtatgttcatgaccgccgaccgcaggaacgaacaggcccgtccgccacggaccgcatcttgcggttcaggcggacgggccttatgggagggatgggaacgggagatcagttcttaataactgcctgcgcctcatcaccggcggcctcgacggcctccacgacctgcgcctcatcgtcgacgatctcgccggaagcgagcttggcttcgagctcgtcaacgatctgcgcgtgcatcttctcggtgatcttgaccttggagacgaacaccaccaggctgagcacgatcaggatgagcggggcatagaacgcgcagatcttgaagacgtggatattcgtcggggtcatatcggcggcggttgcgtcacccgtcatgccggccgcaagggcgatgaagccgacgatgccgttcgacagagcgccgccgatcttatcgagcatcgggcggatggaaagcgtaacggcctcgttgcgcttgccgttcttcagctggccgtactcgatggagtcggtcagggagaggatgaccgtcatcatgatgagcgtgccgggaacgtagaagagcaccagcgcgatgaagaccaggacgatgttgctggagaacagggcgagcatcacataagccacgatcatggagaccatgccgccgatgtacaggtagcggcgcggaatgtacctgttcagaatcgggtacagcggggacatgaccaggcccgcgatcatggcgatgacaccggtcgcggagaaagcggcctgattgtcaaggacgaacttgaacaggaagagaagcacaccggtggtggtcacgttcgcgatggcgtacagcaggtaggacagggcgacccacagcagctggtcgttctggaacacggccttgaacgcctgcaacggaccaccgttgtcttcggcgttggcgcgaagggcgctttggttttccctggtgccgaaggcgacggtccaggcggtcatgatgccgagcaccgcgacgatgatgccgaaagcggtccaacccgactggtgctcggcgttctcgccggtgaacacccagctgaaataggtgacgaccggaatcacgaggatggtgatggcgttgccgccgatggagccggtgaaggagccgagggcggtgtaggtggaacgttcgtgggagtcggaggacaatgccgggatcatgccccagtaggagatgtcacgcagggagtagaacacgtcaagcacgatgaacgtgatgacgaacacgacgatgaacaatgtggagttaacgttcaccaggccaaacatgccgctgaaaaccacggcaagcagcacggaggagaccagtccgccgaagaactgccacgggcggaaacggccccacttggtggtggtgttgtccacgaggttgcccagcaacggatcgacgaagatctcggcgatgcggatgatcaccacgaggctggtgatgacgccgatcagcttggccgcaagcgccttgtcaacgcccgagaacaggcagctggtgacatacacgatgaagtacgtgctcatcgcgttgtagaaggcggcctgaccgaggttgccgaacgcgtaggcgatgcgctggcctaacccactcttcctgcggacgtcaccgtccgcggcattttcgttgctcattaatcttctccttaagaacccagagcatggaatcactcattgattttgtaaagtaagcatacaagttttatcaccaaaagtaaaaagcattagtaaacaaggagataaacagcgtgtcgcaaggatgggataacatgggctgaaccgagacattgcatggacgcggcgtagcgtcgacggcaagcagtgccagtgatttggaagcggtaaacaggatttgcgttttatataaaaactgtttattcttttcggtaaaggaggccccgacctcctccataatatcattcacaacgaggtaatgacagaaagcaggagagcatgacagacgtcacacatgtcgatcgcgcatcgcaggcttggctgaccgacccgacgatgttcgaggtgaaccggactccggcccattccagccacaagtggtacacccgcgacccccagagcggacaatggtccgatctcaagcagagccttgacggcgagtggcgggtcgaggtcgttcaggccgccgacatcaacctcgaagaggaacccgcgacggccgagtcgttcgacgactcctcgttcgagcgtatccaggttccgggccacctgcagacggccggtctgatgaaccacaagtacgtgaacgtccagtatccgtgggacggccacgagaacccgttggaaccgaacatcccggagaacaatcacgtcgcgctctaccgcaggaagttcaccgtctccgcccccgtagcaaacgccaagcaggccggcggatcggtgtcgatcgtgttccacggcatggccacggcgatctacgtgtgggtcaacggcgcgttcgtcggctatggcgaggacggcttcacgcccaatgagttcgacatcaccgaactgctgcacgacggggagaacgtcgtggccgtcgcctgctacgaatactccagcgcctcctggcttgaggatcaggacttctggcgtctgcacggcctgttccgctccgtcgaactcgccgcccgcccgcacgtgcacatcgagaacacgcaaatcgaagccgattgggatcccgaggccggcaccgcttccctcgacgccgcgctgaccgtgctcaacgcggccgacgcggccacggtccgcgcgaccctgaaggacgccgacggcaacacggtgtggcagacgacgggcgacgcggaggcgcagaccgcgatctccagcgagccgctgcagggcatcgaaccctggagcgccgaaagcccgacgctgtacgaacttgacgtcgacgtcatcgaccaagcgggcgacgtcatcgaatgcacgtcccagaaggtcggtttccgccgcttccgcatcgaggacggcatcctgaccatcaacggcaagcgcatcgtgttcaagggcgccgaccgccacgagttcgacgccgaacgcggccgcgccatcaccgagcaggacatgatcgatgacgtggtcttctgcaagcgccacaacatcaactccatccgcacctcgcactacccgaaccaggaacgctggtacgaactgtgcgacgagtacggcatctacctgatcgacgagaccaacctcgaagcccacggcagctggtccctgcccggagacgtcctcaccgaggacaccatcgtgccgggcagcaatcgcgaatgggaaggcgcctgcgtcgaccgcgtcaacagcatgatgcgtcgcgactacaaccacccgagcgtgctgatctggtcactgggcaacgaatcctacgtgggtgacgtgttccgcgccatgtacaagcacgtgcacgacatcgacccgaaccgtccggtgcactacgagggcgtgacccacaaccgtgactacgatgacgtcaccgacatcgagacccgtatgtactcgcatgccgacgagatcgagaagtacctgaaggacgacccgaagaagccgtacctctcctgcgaatacatgcacgccatgggcaactccgtgggcaacatggacgaatacacggcgctcgaacgctacccgaagtatcagggcggcttcatctgggacttcatcgaccaggccatctacgccacccagcccgacggcaccaggagcctgcgctacggcggagacttcggcgaccgtccgtccgactacgagttctccggcgacggcctgctgttcgccgaccgcaagccttcccccaaggcccaggaagtcaagcagctgtactcgaacgtccacatcgacgtgacgaaggactcggtgtccgtcaagaacgacaacctgttcaccgccaccggcgactacgtgttcgtcctgagcgttctcgccgacggcaagccggtctggcagtccacccggcgtttcgacgtgcccgccggtgagacccgcacgttcgatgtcgcatggccggtggcggcgtaccgcgccgacgcccgcgaactggtgctgcaggtttcgcagcgtctcgccaaggcgaccgattgggccgagagcggctacgagctcgccttcggacaggcggtggtgcccgcggacgcgatcgcgacgcccgacacgaagccggccgatgggaccatcaccgtgggccgttggaacgccggcgtgcgaggcgccggacgcgaggtcctgctgtcgcgtacccagggcggcatggtctcctacaccttcgccggcaacgagttcgtgctgcgccgtcccgcaatcaccaccttccgtccgctgaccgacaacgatcgcggtgccggtcatggcttcgagcgcgtccagtggctgggcgccggccgctacgcccgctgcgtggacaacgtgctcgagcagatcgacgacagcacgctcaagggcacgtacacgtatgagctcgccaccgcgcagcgcaccaaggtgaccgtctcctacacggcccacaccgatggccgcgtgaacctgcacgtcgaataccccggagagcagggtgacctgcccaccatcccggcgttcggcatcgaatggacgctgcctgtgcagtacacgaacctgaggttcttcggcaccggcccggaggagacgtacctggaccgcaagcacgccaagctcggcgtgtggagcaccaacgccttcgccgatcatgcgccgtacctcatgccgcaggagactggcaaccatgaggatgtgcgttgggccgagattaccgacgatcacggccacggcatgcgcgtcagccgcgccgatggtgccgcgccgttcgcggtaagcctgttgccgtactccagcttcatgcttgaggaggctcagcaccaggacgagctgccgaagccgaagcacatgttcctgcgcgtccttgccgcacagatgggcgttggcggcgatgattcctggatgtcgccggtgcacccccagtaccatatcccggcggacaagccgatcagcctcgatgtcgacctcgagctgatctgatcagaattgatccgatagtccaccgtgcaaacgatgtggcccccgacttcctcgcaggaagtcgggggccacatcgtttgcacggtccttgttagtccagcggatgcgccggatatcgatgcagatccaaacctagtcgttgtagagcatcaatgaataaagatgtcactcataagctatcaagagaatccagaacctttttgaattcatatgctcgacacgcaatgtatccagcgtcgtttataatgattcctcgtgccttaatggcacatcgggctatagcgcagtttggtagcgcgcctgctttgggagcaggatgataccaaaccagcaaaactatgaccctcgctgaggcctactgccgcttaggttttgggacttcggtaaaaactgaaaaatggcatccgttaacaatggttaacaatgaccgcagacctccgagtttgcggatgttcagggcttgatcccttgggtgcctgaaggtacagagtgtcccactcggtgcgtataattaaaaagttatgccttaaggcatgaaaacgggctgtggcgcagtttggtagcgcgcttgctttgggagcaagacgtcgcaggttcaaatcctgtcagcccgacaatgaaagccctactcccacttgggatgtagggcttcttcttttttgctctgggggcgtttgctaacacaattccagtgttaacggattggctgaatccgttaacattttctgttaacgcagcttggtgcccgtaatccttgtgattccaatggtttcggtatgatcgatggatcgtcgcaatccctcacacgctgtgagccaattcgtgagccaactgaccggaacgacattcatgtcacgataattccgatacctcccgatcacatctcactgccacgtcaaattgtcgagatccacaccgaatcttgtcgcgttggcttcaatcagtgcaagcagccactgggccaaacccggttccaaagcatcgtaatgctgtacgaaacgctcgtcggccacgtacatgcggccgaggcacacgtgcattgacggggtgacatcgaaccataccaaggaacgacggtgggcttccgccagctcattgccctcatcgctgccgggcttcacgccgtgacgcatggcatcggcgagccgctgctcgatggcttcgaattgcttcatgtcgcgctcctgcatatcagacgttctcctcacctggtattccgcaacctgcatccactgccggctcccgccccaacggctctgcgcttcttcggcccattctcgggattgctgcgtcgcatcattcatatcgattcctttctgtgcaacgttcataagccgatcgatatcggccaatgcctgattgatatgttccgccttgcgtgcaagttggccccgacgatccgccaactcgcgtattacctcactcggcttggcatcgagcagctgcttgatacgcggcacgggtatgccgagctccctgtacagcagcagcctgcgcagtcgtctgagatccgaatcggaatacagccggtatccattccagtcgcgttgcggagacaccagacccatttcgtcccaatgccgcagcatgcgaatactgatgttcgtcagccgcgacacatcccctacgttgagatgggaaatacgctccgccggagtgtccatgtcgtgtgattgccggtcattcatggttacaggctaaagtatgacatcatgtgagggtcaaatcagcatggcgacgcgaacacagacatcgatttcagttcacggtatccacggctggagtaaaaatccgattatactgaatcgcacatcacactaacggctaaaaccaaccgtctccgacaatccatagggagaacacatggatgacatgaacccacgctgcggctggtgcaatctcagcaatcccgtctatgttgcctatcacgatgccgaatgggcggttccgtcgcatgatgaccaccacctctttgagatgctggtgctcgagaccttccaagccggactgtcatgggagacgatactgaacaaacgcgagcgtttccgtcaggcgttcgatgggttcgacatcgaacggatccggcgctatgacgagaacaagatcgccgaactcatgaacgatccgggcatcatccgcaaccgtcgcaaaatcgtcgcgacggtcggcaatgccaacgcattccgggatatccagacgtcgtacggcagtttcgacgactatatttggcggttcaccggccgtcacgtcatctacgagacaggcatgactacatcccctctgtccgacgccatcgcagcggatctcaagacgtacggcatgcgattcatcggcaccaccatcgtctacgcctatctgcaatccatcggcgtcatcaatgcacatgagcctggatgcttcctgcaccgggaaaggtgacccgcgcaaggatttataaggtcgctcgggcagaatctctccgagaggaaccagtgcttctagttattttgcttatcgagttcttggtagcgctctttgaccacggtgaggattccggcagattgttcgcgctactgcgcggtgagcgcttcgagcagttcgccgaaagtcaacccaccttcactaccggatgacggatgatggttttgagattttccggtttggctcggcgcgggtcggataggtagatctcgtgatggcggcgggcgtcggagaagtcgagcccgtagccttgcgaacgcgcgtagccgtccagaatcatcacggttgcgggctcgtcgtcgtacgggcctttgtgcatgacctgcgcgaccacgccttcatcgaagtcgaagagatatgcacgattgatgtcgacttcgggatgcttggaggcaaacgatgccttggcccacgcaaagacctcatcggtcacgaattccggcagacgaatcatcgaagtccaatagaagtcggttttacgcgtgtaatcgacgccgggcacaccctcccccatgctccataagccctccagcggaggcacggtgtagtcgaagtacccgtcgatatgctcggccgggttctttgacttcttgctcattttgacggtgaacgaaatgccgtacagcagttgcatcgccttggcgtaatcgccgccttcttcgttcgggtcgcccacaccgtccaccgcgacgaaccgcatcgccggtaccatgacgatggccggcatggtcttcggctgatacaggtccttatactccttctta

SEQ ID NO: 936 - DNA, 3675 bp, Unknown
  R117_24m  MAG No. k141_10561
accgcgaacgcaacgtggagccgcatgctgcaaggcaaccggcgctttgccgagggcaagcccgaccacccatggcaggacaaggagacccgccagacgctgcttgatggccagaacccggatgccgcggtgctctcctgctcggactcgcgcgtacctccggaaatcatttttgatcagggcctgggcgacctgttcaccgtgcgcaccgccgggcaactcatcgatagcgcggttatcgcctcgctggagtacgcggtcaagaaactgcacgtcagcctgatctgtgtgctcggtcacgagcactgcggcgcaatcgaggccgccgagcaggagctggacgacctgatgcacaccatcacttccgaagccgacggctcactggaggccgcggatgcgatggacgacctcgacgagcacatcgccgccgccgaatcgattattctgcgccaggccggcatgtccgtctggcaggcgcgcgaagccgagctcgacgcgcatgaagacatcgagcgcgtacacgtggcccacaccatcgagacgctggtggaacaatcccccatcattcagcaggcattggctgccgaccagctgatgatcgtcggcgcccgttaccagctcgacaccggcaaggtcgaggtgctgagtttctgaccatcagtcagaccccgttcaccgggggtaatgcggtcgtggtacatctgtgtgcagagagatcgaagaacacggaagtctgaaccaatgccacctgcccttactattcactacggatccgccacctatacccccaatcctgcacgtgccacgaccatcgggcgtgcgccggattgcgatctggtgattcacaacccgtacgtatctcaccatcatgctcgcgtcacctttaccgacgatggttggctcttggaagacacgggtagtgcaaacggactgtccatcaacggcattcacaccacttccgtactgctgctgaacagcaccaaagtgacgctggcacaaggtgccaccatcgtctgcatcgtcggaaccagcgggccgtccacgccggcacagcccccgcgacgccctgcggcaaacgtggcccagcctgcgctaccgccggcaccatcagcgcaaccggcacaacccacgcaactcgcgccgcaacaggcacgcccagtagtgcaacccacaccaccagcaccgcaaccggcacaaccggtacaaccgcaaccaacgccagccccgctggccccgcaccgcgtatccccggccctcgcgcacctgcaacagcaaccccgcccaacagcagtggcaccgacggcagtatcgccagtgccggtatcacccgcatcaccatctccgtctccctgcgcatccccttccccatcgaatgccgccggcaccgttctggcaggcagcacgcaagcggtaaggctcgaatcccaactcaccaccaaccgcgtgcacgggtccttcagccccgagcacgacaccacaggcgtcatcggccgcgataccgcctgcctgattcgcatcaacgattatctggtctcccgcaaacactgctcgctggaaaccaccagcagcggcatcctgctcactgacctgaactccgccaacggcacttacgtcaacggccgccgcgtcgcgaagatctggctgcgggaagacgacgtcgtcaccgtcggcaacaccgacctgatcgtgcatgaaggcgtgctgtgcgaccgcacgccgtttgtcagcaacgacgcggttatcgccgaaaacatcggactgaccgtgggcaaaggcacccggctgcttgacggcatcaacgccgtattcgccaagggcacgctcaccgccgtaatcggaccttccggcgccggcaaatcaacattcacctccatcgtcgccgggctcaacagccccacggacgggcgcgtgctgtttgatggatacgacgtgcatcagaacatcgaactgttgcgcagccgtatcggattcgtgccgcaggacgacgtggtgcaccgcaagctctctgtggacgcggcgctcgaatacgccgccaagctgcgcctgcccggctcaaccaaggccgagcgcgccgaaatcatcgacaacgtgctcaatgagctggaactcacgtctcgccgtaagaatcgcattgacagactgtccggcggccaacgcaagcgcgtgtccaccgctatcgagctactcaccgaacccgaactgctgattctcgacgaaccgacctcgggcctcgacccggcgctggatcttacggtgatgaccatgttgcgccaactggcggatgccggccgcgtggttatcgtggtcacccattcactgtcgtatatcaacaagttgtgcgataacgtgctcatgctcgctcccggcggccatccggcattcttcggcaccgtgcaggagatgagccaggcgttcaacggcaaggaatgggccgacatcttcaacgatgtcgccgaatctccggaacgggtgtattcgattactgattcacgccagcgcaccatgcaggccgagtccaccatcacgcggcacaccgagcatgagaaaccggcaaagccattccgcatcaaacagaccatcactctggtgattcgtcagctgcatttgatcatcgccgaccccggattgctgatcttcctgctgttgctgccattgctcctaggactgctgtcgctggttgtgcccggttctcatggcttgggtgagcccgatttcaaagacgccgccaccgagccgaaccagctgcttgtgctcgtcatactgggtgcctgttttatgggatcggctttgtccgtgcgagacatcgtctccgagcgagcgatttacggccgcgagcgcgcggtgggtttgtcgcccacgtcatacaccgcctcgaaactcatcgtgatgggtttgcagaccttgttgcaggcggcgattctgaccactgcggtcagcctcggcaagcccggcccggaccatggtgtggtcactgattccggcatacccgaactggtgttggcgatttggctgactgcgtggacttccgcattgttgggcgaagtcggctcggcgttggtgaagtcgggagaacagacgatgccattgctggtggtgctggtcatggcccagttggtgttctccggcggcatgattccggtcaccggccgcgacagcctcgagctggtcagcatgatcttccccggacgttggggcttctccgccgccgcctcggatatcgggctcaacgatctgctgtatggccccaccaaggtgccgatgttcaaaaaggatgatctgtgggagcacaccacggatcagttctggttcaacattggcattctggggattatggtcgtcgtcttcaccattgtgctgcgtatttgcgtcagcaatgccgtggccaagatgcgtcggcgctcatagaactggatcgaaactagcccgcaaccggcttacttcattcattaggtcaattatgcgttcatttggtcactgcactccaacactgaccattgaaatgccgccattccaacgcctcaccatgccgacaacccaccaaatgaacgcgcaacctaccaaatgaatgaacccagccctatatttggtgctacaacgactgcaaatactgccccaaatgcggcaccgcaaattccagctgcccatgacctgccgggcggatgagtttgtccttga

SEQ ID NO: 937 - DNA, 7134 bp, Unknown
  R117_24m  MAG No. k141_10900
atacccacatgcgactgcgcttcgtccaacgaaccgactgtgatgccttggctcagctggtcacgccatgtctgaggcaggtccgcggtggcgatattggtggtctgcacttcgtgcgaaagctcaagtccaaagagattggtcggcacgccacgataaatggccacggtgccgttgctatctcccacgtagtagtgcgtctggctccacgtgtacgcgccccagccagcgccggccaatgccagcacggcaagaatgcaggtaataatcaccgcaagcttattgcggcgcttcttggtacgcgtggccttcttctgctcgacctgctcatcgcggatggctttggccacatccgggtcgttggggtcggcggacaggcgcccatccggcttttgcaccaccggaatctcaccggtatcgggattggctcgttcaccggtctcctcgcggacggtggacggctgcaccacgcgtgtggacgacggttcggccgtggtttgcgcggcctccgtctcgtgcgcgctggcgggctgaatcaatgctgcggcgcgctgggcgggggaatcatcctcacgcagcgcgggcgcggtagccaccggctcgttgacgatgtcggcgatcggctcaagattacggctggcggcaccgccgaccaacggcgtttggtgcggcagatcgaacgcatcggcatccaacgccaacgtggcatccgcaataacggccgtgacattatcggtgctgcctgcccgcagtgccatctgcaccagacgctgcgcgcattcgccctgatcggacagcgtggtcatcgtctcttcgatggtggaatcttccagcacaccgcacagaccgtccgagcacagcagccaacggtcggcggggtgggctcggcgaatcgaaatatccgggcgcgggtcaatgtcaaagtcgccaagcacgcgcatcacgacgttgcgctgcgggtggttcttggcttcggacggggtgatacgaccggtgttgatgaggtgctgcacgtagctgtggtcgcacgtgatgcggctcaggtgtccgtcgcgcagcaggtaggcgcgcgaatcgccgatatgggcgatgacccagtagccggccaccaatgccactgcggtaacggtggtgcccatgccggcaagcttgcgttcgcgcttggccttgccgacgatggcgtcatgcgcggccataacggaggtctccatcatgcgggagatcgtctcgacgttgccaccggtgtcgtcctgctcgatgtgggccagtgaccggatggcgatggaggatgccgtatcgccgccggcgtgaccgcccatgccgtcgcacatggcgatgagatgctcgccggcgaaggaggaatcctgattgttcgcgcgcacggtgcccacatcggacaccgtggtggaatacaggaacagcggttgtgaagcggcggattttggcatgcggctacctcagttcgaaggtggtggcgccgatgcgcacaggaatacgagcgggcagaatggtggggcggttgatgcgctgctggttgaccacggtgccattggtggagttcaggtcttcaatggcccactgcccggagcgcgtgtcacggtagacacgggcatggtgggaagacacgaattcgtcatcgagcaccacggtgttcgaggcggcgcggccaagcgtgatgtcggcttcggccagcggcacggagctgccggcaagcggaccatcgatgatgaccaacagggtaggctgcgccgaggcggcggacgacgcggaagcgctgggctggcgatgcgggcgcggcgcagctgcctgcggcgtttcggccttggccttatgcacttcacgctcacggcgacgacgcgcgcgcgaaggtcgcggactgaacgtctcgatgtccttgcgcagcgaacgtacggccagccagatgaatatccacagcaggatcaggaatccatacttgagcagggcgaatgtcagttcggtcataagtggacgactttcgggcgtgtgctcgactactcctgggcttgggcggaggcccagtacaggatgcgggtacggccgatggtgatggtgttgccgtcgagcagcgtggcggcgggcacttggtggccctccacgtacgtgccgttggtcgaacccaggtcgcgggcgatcacgccgttatccgtgatgtcgatttccaggtgcttgcgggagatgcccggatcgtcgatgacgatatcgcaaccggaaccgcggccgattaccgtcttgtctttggtgagcaggtactggttgccgttcacctcgagcaccgggctatcctcggtctgcgcatcggtggtgaccggcacggcattgccctgcacggattcggaggtgaggttgaagttgcccttggacaggtcaaggtcttcctcgaagatcacgatcaccgggcccacgaaggcgtaatgctggctcttcgcgtactcggtgaggttatcggccagttcgttggccagggtctcgctaccccatgcctcgatacggtcgaagtcaggagtactgagcttgaaacggtattcattcggggccaccgtgcggtcacggcccacgggcatggcctcggcgtcaatctcgcgctccaaggcgctggaaagatcgacaggctgcaggtctttggagccaaacttggcgaatactccgttgactgcaccctccacgcttttttcaaaacggtcgagaacgctcatagtcctccctttctaatcctcacccatcctacgcggtgatgggaatatgaggcaaaaaaccggtctttcacatgacgatgggtgcaaaatatccaaaaatatccaaaaattcagggcggaaatgggtgcggcgcaccacctgcgccgtttttccgcatgccgtgtgggcgcgggccccgggcgtgccgcggacgtcacggcccacggcgcgcccggggccggtcaggccagggcgtcgcgcaggaagtcgcgctggagggtgagcaggttttcggctacggtctcgtcgttggtcatatgggtgatgcccgtcaacggcaggaaggtgtgcgggcgacccgccgccatcagggcttgcgagaggcgcaggctatgggcgatggtgacgttgtcgtcggcgaaaccgtggatcagcataagcgggcgctcgagtttcggtgcgtcctgcacgatgccgttgcggtagtagacatccgggtcgaggcccagatagcgctcggtgtagtgcgtgtcgtacagcgtccaatcggtgggcggggcgccggcgcacgcggccttgaacacgttcggcgcgtccagcacggccagtgcggacaggaagccgccgtacgaccagccgatcatgcacaccttgtcgaggtccggcatgggaatcgcctcccgctggcgggaggtggcgcgaagcgccggtgggtggttctcggcgtctgcctgatcgcccgcagccggctgtgccgcacgtgattccacatcggcgttgagccgggcgacggcctcgggcagggcgttgacggcctcgacctgatcggccagtgttacgtccttcatatcctcgaagatctcgcggtcccatgccgggccgcggccggtggtgccacggccgtctgccgtgaccaccaggaagccttggtcggcccaccactggccctcccagtagaaggactgcgaggcgatgacctgctggaagccgggcccgccgtacggcttcatcagcaccggcagcttctcggcgtgcgcgtacgggctttccgggctcggcgcgatgatcgccgtgtacagctggtgctcgcccagtcgcgtaaacgtgacgttcggtgtaaagccgggttcggccgccgtggacgcgatagtggcgctctgttctcccagaatgtgccgcatccgggcgcgggcggaacgcatatcgcggccggagaccacgatgccgcgctcgccgcgcgaggcggtccactgaccgggctcggtcgtgaccggcgtgatcgtgccgttgtaatcgatactcaccacatcgaagctgcgggcgtcatggccgccgaacagagactcggcatccgaagcggcacccgagccggcccaggcgtccggcatctcagacgcgatttcgggcgcacgctgcaccacggccagcacgtcgtcgtcggtcacgtcgagcaccgcgcgcacgttccacccggccggcgtgaacggtcggccgtccaccgtcagacggttggtatccgtggccatatcgttgagcgagcacaccagacgatcatccggcgtgtaggcgggcgtgccgtgaaccaagtcgatccactgctcgttcgcgtgctcctcaagcacacgcgtggcgcccagcgcggccccatccgccgcgaccgccacctcgagcacctggtcgcgggtctggcggcggttctgcaccagcaccagcggatcgtggccgcgacgccagctcacggcggccacatactcgtacgcctcgcgatcccaatccacatcggcgttgccggtgatgcccgcgtaccggtcgttctcatcgaacgccagcgtgatcacggtcaggtacacgtcggcgttgcgggtcagcgcgcgcgggtagcggcggccggcggccggcttctcggggtcggccggatcgctgatgtaccaggtcggctcgtcggcggtgtcgaaggattcgaacagcacgtgctgcgaatccggggcccaccagaaaccgtcgtaacggtccatctcctcgccggccacgaactcggccagaccgattttccacgtgttttcggccggattgccgtcctcatcctccacgctcacgccgtagacggcggtgatgcggtcacccagctcgccgccgatatcgaccagcatcaggtagctgcccgtggtgtacagcacatgttcgccatccggggcgatgcgcgggttcagcaccggcgtgtacatcgccgggtcctcatcgagccattcgccggccagttcgcgggtgtgcggctcgggtgcgccggtctcgtcattccaggcgatctcggtcaggaacaggcggccgttgatggtgaacacgatgcgattgccgtcatcgtctgcggagtagccgacgatgccggtgccgccttcgcgcgcacgctcgcggcgggccttctcctcggccggcacgtcctcgctgtcggcggttgcgcccagcagttcgcgcgggtcggccagcttggtctcatggtgttcgccggactcgtcgaaccagctcagccacagtgcggtcaccagatcctcggggccgtcggagcgcaggaacagggcccgcgagccgtcgcccacggtctgtgcggagcgcggtgcgccgcagccgaaccgcagcgtgcgcgccctgaggcgtgggaaatgcttgattgcgtcattgacatcattggtttcgctcatactcacaacctacgcgcctgtgcggtcagcggcgtgaggcttgtcctaagatgggaaccatgcaggtgacgatgatcgacgagaacaagtacgccgaaacgatggccgacgtggtgctgcccgcgctcgagcaatgccgcgaggagggctggttcgatccgtccgccgccgaacgttcggccggggtcgagccgctgtccggcattatggacaccggcggccgttcgggacagctgcactacctgtgctatgacgccgccaggttcgacgcaatccgcgaacaaggcgccaccgccgtcttccgcggggccatcgtcatcagccacggcttcaccgagttcgccgagaagtacgacgaactggtctggtacttcctgctcgccggctattcggtgtgcgtgctcgaacatcgcggccacggcaagtccgcgcgcgacgtggacgatcattgcatggtgtggattgatgactggcagcgctacgtggccgatctggccggcttcgccgaaaccatcggccagcagtacgcagccggcatgccgctgaacctgttctgccattcgatgggcggcggcattggcgcggccgtgttggagcgataccccaccctgttcgacaaagcggtgctctccgccccgatggtcgcccccgccaccggcatgccgctgggcgtggcccgtgtgctggtcggcgcgctgtgcggactcggcttcggcaagaagcgtgtgttcgggcagtcggacttcacgccggagttctcgatggaaggcaacgagggcgcttccgaggcgcgtgaacgctggtacttcaagctgcgttgcgagaaccgcgaataccagacctactgcgcggcgttcgaatgggtgcgccaggcgttgaagctcaaccgggccgtgctgaacccgtccgcctgcgccgaagtggagacgccggtgctgctcttccagtccggacgcgacatctgggtactcaataagccgcagaatcacttcgtccaactggtcaaggacggcggcggcgaggcgaacatcgtgcgcttccccgaatcgcgccacgaaatcttctccatgcccaacagcacctacaagccctacctcgaaaagatcctcggcttctacgacgatcccatgatcgccagcgccgcgtactgatgtagctcttcattcattgttcaccgtgcggtcaccttgtggcccggcccgctttaggtggcgggagaacaatggaattatgggcataatgtcttctctccgtcgccgcgccgccgtggttgcggccgcggtatgcgccggcgcgctcgcgttgaccggttgcacggcgttcaataattccgatgacggcacagcggacggcaacggcgcgtccgccaccacgcagaccttccagccgtccggcggcaaaccgaccgccaccctgagcattgcctccggctccgagaacaaggaagtcgccactgccatccagaaagcggccgaccaatccaacgtagccgtgacgatgcactacatgggttcgctggagattatgaacgcgctcaaggccggcggccagaattacgacgccgtctggcccgcttcttcgatgtggatttcgatgggagacgccaagcacatcgtcaaagacgcggccagcacctccaccacgccgatcgtgttcggcatcgccaaatccaaggccgtcaaactcggctgggctgacgactccggcgccaccaagcccgtctccaccgcggacatcctcgccg

SEQ ID NO: 938 - DNA, 3185 bp, Unknown
  R117_24m  MAG No. k141_11138
cacggacagcgcctggtccacgctcatcgccatcagctgcggcagactcaacgaaaggtgcgattctcccttaacggcacgccgaatcgcgccggcttcgggcgcataccgggatccgccgcaatccgggcattcgatggtaacgtccggcaggaactgcacgtcgagtgagatcgaaccggtgccgtcgcacgtggggcaacgcagtcggccggtgttgtatgagaaatcgccagccttccagccgcccgctttggctccgtccgtgcgggcgaaggcgcggcgcaattcgtcgtgaatatcggcataggtggccacggtggagcgcacgtttgcgccaatcggcgtggcgtcgatgagattcgcgcgactgatgcccgcggtctcaagctcgcgcacgtgttccggcaacagctcccccgccgcctgcgctttgagtgcgggaatcagcgattcgagcaccatcgtggttttaccggagccggagacgcctgtcaccgccacgagccggccgcgcggaatatcaacgtccagcggcttgaccgtatgcaactggctggttgtcatgcggatacggccaaggtcgaacacctgcggttccgccacgcgctcacggatgcgcgcgctcacattatcggccaagaacggcgcaatacgactacttggattcgccgccacttcgtccaccgtgccttgcgcgatcacatgcccgccttcagcgccggcaaccggtcccatttcaatgagatggccggcggctttgagcacgcgcacgtcatggtccacgaccaccacggaattgccgtccgccactagatcgcgcatcacgccgagcagtccgtccacattcgaggggtgcagcccgatggatggctcgtcaagcacatacagcacgccagtggtgcggttgcgcacggcacgggcgagctgcacacgctggcgttcaccggtcgaaagcgtggcaccggcgcggtcaagcgccagatagccgaggcccaaatccaacagtcggcgggccacgtccaggaatgattcgcagatgttggtggccatcggccgcatgtcggggcgcagggattccggcacgccgcgcacccaatccaccgccgcatccaaggtcatcgcgctggcttcggcaaggttcagcccgcgcacatgcggggcccgggcggcgacgctcagtcgtgtgccgccgcagtcggtgcatgggccttccttgaggaaccgggccacgcgcttcaggcctttctcgtccttggctttggcgagcgcgttctccaccgtgtatacggcgttgaagtaggtgaagtcgagttcggcgaaatcgtcgcctttcttcggcttgtaaagaatatgctttttgacggccggcccgttgaatacgatgtcacgctcttcgggcgtgagctcgctgaacggcacattggtgcgcacgcccatcgcgccgcacacctgcttcatgaggtcccacatgagcgaaccccatggcagcaccgcaccgtcgtcgatgcttttcgactcatccggcaccagggccgcacggttcacttcgcgcacaatgccggttccggagcaggtcgggcaggcgccggccgagttgaaggcgagcgattcggcgccgggcacgtggaattccttgccacagctgacgcaagtaatgggcagtccggccgccacgttcagcgtcggttcgttgcgcgccccgcaatgcgggcacacgtgcgaggcgacgcgggagaacaggagccgcagactgttgagcagttcggtcatcgtgccgaacgtcgaacggatgccaggcaccgtgggccgctggtgcagggccagcgcggccggcacgtgcagtacttcgtccacttgggcgcgactggcctgggtcaggcggcgtcgcgtgtacgtggacagcgcctccaagtagcgccgcgaaccttccgcatacagcacgccgagcgccagcgagctcttgcccgaaccggagacgccggccacgcccaccagttcgcccagcggaatgtcgatgtcaatgttcttcaggttatgcacgcgcgccccgcgcacttcgatcgcctgcggccgttgatcgttgcctatgctcggcactgctccgccgccaccctactgtctgacctattatcaagcgtcacgccgttgcctctttctcgatctcgccctagaccgccgccgcacgagcttcatggtctccagtatcatcacgaccaacgacggcagccgagaggctttcgctattgagcaccgcctctcgcatgctgttcgccgcgacaacgaacgaaagaaggtgccacaatgccgtggttcagcgccaagaacgcgctcgcagaggatcccgtcatggggctgctccgggaacaggtgacgacgacccgcaaaggagtgtccatcgcgttggacgccgtcgaggggcatctgagcgtcgatgaatccagaaagagcgtcaacgatatcgagcacgagggggacgaggtccgttccaaggtcgttcacgcgttggccaaggcctggaccacgccgttggaccgtgaggatttgttccgtttctcccgatccatcgacgacgtgctcgacaacacccgcgatttcatacgcgagatccatctttggaaaggacatgccggcgaacacgccaatgtcgcgttgacccacgtgaacgtcgccctgcacgatctggaactcgccgtgaccgcggaaggcgccgacatgcgccgatactgcctcgaggccagcaaggaatccgcccgcgtgcggcgcgcctacgaatcggggcttgcagccgtctacaccggcgaaatgagcatggacaccctgaaaacccgagatctgctgcgccgcgtcgacgtcataggcctgaggcttggggagtcctccgacgccatcctcgacgggctcgtcaaacgcgggctgtgactcaccggaataccgcaaagggaaaggcgcgaatatgcgcaggaaactgattcttgatttggatacgggcatcgacgacgcgctggcgatcggatccatcttctcgcgtcacagacagtggaccatatacaacggcagcttgatgcgttctccatccacttcgagttggcggggatgcagaacgtattccttgcccaatcgttgggcataccttttgcggaatttgtcgagcgaagatacgccgtatcgtttcgtggatttca

SEQ ID NO: 939 - DNA, 41296 bp, Unknown
  R117_24m  MAG No. k141_11567
ggcgatcattcgctcgatgaccccggccgagcgccgcgatccgtcgattatcaatggttcccgccgcgcccgtatcgcctatggttccggcgtgacggtttctcaggtgaacgctttgctgcagcgtttcgagcaggccgcgaagatgatgaagcgcatgtccaatcgtggcggcatgggcggcggcatccccggcttcggcggcccggctatgggcggcggcaagaagaagggcaagaacaagaagaaaggcggcaaatccggcaatccgatgaagcgcgaggccgaggagaaggcattgcgcgacaagctggccggcaaatcctccggttcgaccggcggttccgccttcgccaagaagccgcagaacccgcccctgcccgccggccttgaacagatgatgggcaacgtcgatggtggcactgaactgccgccgaacctcggcggaggccttggcggactgttcggccgctgatctcacaacttggctcccctcgcagaggggagccaagttatatctcggttcaatttatatttcgaaaggaacttccatgacgacaatcttcagcgcggtggcaatcatcgcactgttatggacggccttaagcgcgctgcccgccggtctcgaggcccgtatgccgcttccgtacatgattgccctgactccgctgctgtgggttcctttgatgattctggccgcggtcgccgcatggcaacatgaatggactgcgatgtcgtcgcttattgtggtcgcgctgattgccagctcacagcgcatcaactactggggtacgtcaatcgacccagccggcaaacgcagagaatcccaccgtgaaacagcccgtgaaacaacttcgccgacgctgtcaaaaagccataacagcaatacatcgagcacctcaaacactccgaaggaaggacccgaaacagtccccgatgggcaccgtgaaacggtgcgtgaaacactctcgccccagttctcggttatgacgatgaattgtcgatacggacgcgccgacgccgctgaaatcattcgcaatattcgcgaacgcaatatcagcgtattggccttgcaggaagtcaccgacgacctcatcacacgtcttaccgaagccgacatcaacgaactcctcccctaccatcagttcggagacgccaaagagaccgataatggcggattcaacgtgatctattcccgctacgagccgagcgcagcggtgcccaacgtggtctccatccctgccgccgacgttcccgccatcaccctcaaaacctccggtactcgcacggtgacgctttgttcggctcacccgaaatcgccgatgcgcggctgcgcggattggtcggccggcattctgggtctgcgagaactcgcccgtgcaaaatccgtcagcaatcgcaacatcgtcgtcgttatgggcgatctcaactcgagcaccgaccacccgagcttccgcgcgttgctcaagtccggattcaaggacgcgagtctgattcaagccgccggaccgaacctcaccttcccgcgctggctcaagtggccgcgcatcgaactggaccatattctgttcacccaagggctcagaccgtccggcgtgacgtccttcgaagtgccggacaccgaccatctggctttggccgcaacgctcaccctgcggtagcgggcgcggcgatcgatcgggccttggccgtgtggcgcgaagcgggcgggaacgtctggaagacccccgcccgcagccgggtggttcgccgtcagaggtccatggagcggatcagattcaccatttcgatcgcgccctgcgcgcactcggaacccttgttccccgctttggtgccggcccgttcgatcgcctgttcgatggaatccgtcgtcagcacgccgaacagcaccggcacaccggtgtcgaggctggtctgcgcgattcccttcgagacctcgttgcacacgtaatcgtagtggctggtgctgccccgaatgaccgcgcccaggcagatgatcgcatcgtagcgcttgctcttggccatcttcgacgcgatcaggggtatctcaaaggcgcccggcacccaggccaccgctatgtcctgttcgcggacattctcccttttcagggtgtccagcgcccctgccagcagttttgaggtgatgaactcgttgaacctcgccacaacgatgcctatcgtgatgttttcggctaccagatcgccttcgaacgtgtgcatttattcctcctccatgttcaggatatgtcccatgcggtttttcttggttttgagatagaaactgtcgtaagcattggcttcgatttcgattggtattctgtcgcggatctccattccatagtcttccaattgatacactttgtcgggattgttggtcagcaggagcatggaccgtatccccaaatccctgagaatctgcgctccgatgtagtactccctcgcgtcaccggggaatcccaacgcgagattggcgtcgagcgtgtccatgccctcgtcctgcagacggtaggccttcagcttgttgaccagaccgatgccccgcccttcctgacgcatgtacagcagcacgcccgagccatgctccgcgatcgtccgcatcgccgcgtccaactgctgaccgcaatcgcaacgcaacgagccgaagacgtcaccggtcagacattccgaatgcacccggcacaacacatcggtcccatcgcccagattccccatgaccagcgcgacatgatgctcgccgttcaacctgttcacatagcagtgcgccgtgaattccccgtatcgcgtgggcatcgccacggtcgagacacattcgacgagcgtatcgtgcgctttcctgtattcctgcagttccttgatggtcaggagcgggatctgatgctcctgggcgaaccgggtcaggtcgggggtcctcatcatccggccatcgtcgtccatgatctcgcagcacaggccgcattcacgcaatcccgccaaccgcatgaggtcgacggtcgcctccgtgtgcccgttccgttccaggacgccgcccttcttcgccaccagggggaacatatgccccggtctgcggaaatcgaggggttccacgtcatcggagacgcacatgcgagccgtcaatccccgttcttcggcggagatgccggtcgtggtgccacggtaatcgatggacaccgtaaaagcggtttcatggttatcggtgttgtgctcgaccatgggcggaagcatcagcttgtgggccagttgctcgctcatgggcatgcagatcaatcccttggcgtgggttgccatgaaattgacgttccatgtggtggccgactgcgcggcacagatgagatccccctcgttctcccggtcctcgtcatcgatgaccagaacgagcttcccttcccgcagcgcctgcaacgccgcttgcaccgactgatggttcatgattcatgcatcctttctcagaacccgcaccgggacagcagatcctgcgtcagtcccgtccgggtcgtcatcatgttccgcacgtattttcccaatacgtcgttttcgagattgaccacgccgccgacccgtttctcgcccagcaccgtctgcgccaaggtgtgcgggatgatcgataccgagaagtccctttccgtgatctccgcgaccgtcaggctgatgccgtcgacggcgattgagcctttctcgacgatgccttcgagtatctcgtttcgcgccgcgatccggtaccacacggcattgccttcgcgccgcacggaggatatgctgcccgtgccgtcgatgtgcccggtgacgatatggccaccgaaccttccgttcaccggcagggcccgttccaggttgacgccgttcccgcggcgcaatacgccaagcgaggttctgcgccacgtctcattcatcacgtcgacggtgaagcgtcgccggtcgaaatcgacgaccgtcagacagatgccgttcaccgccatgctgtcgccgatatggaggtcctccatcacgttcgtggcatcgaccgacagcgtgcagttggcggcgctcctccgtatgtccgccaccgttccgacttcctccactattcccgtgaacatgaatacaccacctcgctttccaccagataatcctctcccacccgggagcaggcgcggggccggagcatgacggcgtcggaaggcagggcgactccttggccgcccaccgggcttttcgcggtgccgccgaatatcttcggcgcgatgtacacgtgcgcctcatcgacgatccgctgttcgagggcgctccaattcatcgcgctaccgccttccagcagcacgctgtccatctgcatatcccccaggcgccgcaccacgtccgccagatcgacgtggtcgcccttccttccgacggcgagtatttcgcagccgtgccgccggtagtcctccgccttgcgttcgtcatcgcaggcggtggcgatataggtcctgacgtcattcgccgtctgcacgatccgcgaggtgaggggcgtcctcaatcgcgtatcgcagacgacgcgaaccgggttccttccgtgtgccatgcggcatgtcagcaacgggtcgtcctcgatcaccgtgttcacccccaccatgaccgccgcgacggatcgacggagctgatggacccgacgcctcgactcctcgccgctgatccaccgtgattgattggtatgggtcgctatcttcccgtccatcgtcatggcgtatttcatgatgacatacggcgtatgcgtggtgatgtatttgctgaacacccgtatcagatgccggcactcgtcggccagcacccccacatcgacccgtatgccgtggtcttcgagcatgcgcacgcccttgccggacaccacgggattgcagtccaaggttccgacgacgacccttgcgatgccgctttccacgatcgcctccgtgcatggcggcgttttgccgtaatggcagcacggctcaagcgtgacgtacaacgtcgccccggcgggcgactgcgtgcaatgccgcaacgcgttcctctcggcgtgcaatccgccgaactcctcgtgatacccctgcccgatgatccgatcgtccttgacgatcaccgcgccgaccatgggattggggttcacgtatccggcccctcgcttcgccagctcgatcgcgagtcccatgtactgcgcatcgtccatgtacgcctccaagcatgttgcgcccatacgctatccaaggcatacaaaagaaggttcatgcgaacacgaaaacgccctgaaatgatatggcatcatttcagggcgtacgacgaagcatgaacgtactttcatcttctctcatccagactgtactgtcggctttggaatctcaccaaatcatgccttgcggctcgtgggctgtaccaccggtagggaatcgcaccctgccctgaagatagttattcgttttgcccgtgattgtactcgccgacgctccccctgtcaacggaagcggcctcacgcagcgcccgggccttctgcatcgtctcgtcgtactcgaagtcgaaatcggattccacggtgatgcctccgcccacgccgagcgacgtctcgcctccctcccgcacgatggtgcggatcacgacgttgaaatcgcaatcgcccgtatcggagaaatacccgatgctgcccgtgtacaatccccggggcgcgcgttcgagctcgtcgatgatctgcatggcgcgaaccttcggggcgccggtgatcgaaccggtggggaacgcggcgcgaaccgcgtccacggcgcaacgatccttgcgcagcgtcccctcgacggtcgcgacgagatggaatacggaaggatacgtctcgatggcaaagtcggggtccgtgccgacggaacccggttcgcagacgatcgacaggtcgttgcgttcgaggtccacgaccatcagcagttcgctgtggtccttctcgctgcgggcgagttcctctcggttcgcccgatcctcgtccggcgtgccgccgcgcggccgggtccccttgatgggccgcgtcaccacatgccccgagcgaatctccatgaaccgttccatgctcgaacagcacacgtcgagacccggtgcgcgcagataggcggaaaacggggccgggttgtgggtgcgcagataacggtagatggcataggggctcccggatgtctccaggcgcaggcgctgcgccatgttgacgacgtaggcgtcgccggcgcgcagatggtcgacgagacgggccagggcgtcgccgtacccggcccgcgtgaaatcggaggagcatggggcgagcgaacgtcggcgcgcgggatgaggggcgggcgggcatgaatccaccaggtcctgcgcccatgtcagggcgtgggcggccgtcatcgtccgcccctggcagcaacagaacaacgcccgcgaccggacgtcctcgatgagcagcaggtcgtagaagaccatgctcgcctccggtgtggccgcgacgggatcgtgcctggtcggtacgccgcacgattcgcggccgaaatcgtatcccagatatccgatcgcgcctcccgtgaggggcagacgcggatcgcgcgcgccatcgcagggtccaagccgcttcttcacgacatcgaggaaatcaccctccacggcaacgccgtcgacgaggcatccgccccgcccatgttcgatcacaagataggggaagagtcccaggatcgagtagcgcccctgcgcccccggcatcgaggagtccaggaacgcgaagcgttcctcgccgcgcacgcactccacgatgtcggcaagcggtcggaacgtcctgagcttgaacacctgcgcgctcaccggaactccttcgtctgcgcccgggcccgcgtccgcgccaccatgcgggcgtaggtgtcgttcacgtcgcgcgacacgctccccggttcgaattccacgccgccgataccggccacgggcatggcacccatcagggagttggtgaggaacacctcgtcggcccgaagcagctcgtcgggcatgatcgggcgttcgacggcccccgtgaacccgatcacggcatggcgcatgaccccgggcagcagaccgcaggagacgggaggcgtcacgacgtctcccctgatgacggcgaagatattggagacggccccttcggcgacctcgccccgcgtattgaggaacaacggctcgtcgacggcgcggtcacgggcgcgacgcttctccatgatgttttcggcatacgccagcgtcttcatgcgcgcgaggggggaggattcgttcctgcgcacatcggcgaagtcgcagcggaagacgcgcttcgcccccggcgcggcatacgggttgcgtctcaacgagacgacgcggttgcgctcggtgaccgtgagcttgagggccgaatcgtccgatgcgccgagtccggcgcatgcgcggagaaccatcgtctccagatcggcgcgacgcgcctcgatgccgaggtatcgcaacgtctcacccaaacgcgtcagatggtcgtccagaaacacgggcgcgccgccggataccgcgatggtctcgaaggcccccatgccgaagaagaatccgtcatccgcatccacacgcgcccgggcaccggggccgatcacgcactcacccatcgatcagcgccccctttcccgtctcgcactgccatcaatcaggctatcagtcatgaagacggtaggtgcgccgccgacacgccgtccgtccggcgattccgtgcgtcacgaccggaccgatgcgcaatatccggcttccgcgttacactagtacggttattcgcgcgcgcgtggcgccctctacaccccgagccgcgaggacacgtggattccggccggtcatgccccacatggcaaaccgagaacccgcacacctagcattacaaggagagccattttggcaaccaagattcgtctgaagcgacagggcaagaagttctacgccttctaccgtgtggtggtcgtcgattcccgcaagaagcgtgacggcaaggtcatcgaggagatcggtacctacaaccccaacacccagccctcgaccatccagatcaagtctgaccgcgctcagtactggctcggcgtcggcgctcagccgtccgagcccgtcttcaagctgctgaacatcaccggcgactggcagaagtacaagggccttgaaggtgccgaaggcaccctgaagaccgttgaggctggcccggacgccgaggcccgcatcgcggccgttgagaaccaggctcagaagctgaaggccgccaaggccgaagctgccgccaaggccaaggctgaagccgaagccgctgccgccgctgaggaagccccggctgaagaggccgccgaagaagctccggccgaggcctgagcggaaacgaaaggctagctatgcttgcacaggctgtggaacacctcatcaagaacatcgttgattttcccgacgatgtttccgtcaagtcccatgagaacgcgcgtggcgaactgcttcgcgtacgcgtgaacccggaagacatcggccgtgtgatcggccgtggcggccgcaccgccaacgcgattcgcaccgtgatccaggcactgtctgaccacaaggtccgcgttgacatcatggacgtccgtcgataaccgataaggaacgattcacagcatggcacagcaagacatgcacggcgaccctcagcagctcgagttgctgagggtcgctcgtattggccgcgcacagggcctgaagggcgaagtcaccgtgcgcctgtacaccgatgatcccgagtggcgcttcgagccggactccgtgctctacagccaggatggcgagaccgagtacatcgtcgagggctcgcgcacgttcaaggatcgttggattctcaagcttgagggcgtcgacgaccgcaatgccgccgaggccctaaacggtgtcgaactctacggcgaggtcgacgacgcagaagatatgctcgaagccgacgaatggtatcccaaggatcttattggccttgaggcccgtctagtcgagggcaacggtctgggactgcccgccggccaagtggtcggcaaagtggtggatgtggtcgactcccccgctcagtccctgctcaagattcgtttgaccgagccggtggtaaccggccagaattccaagggcgaggatgtggtcgaaaagaccgcattggtcccgttcgtggaggccttggtccccgacatcgatctggaggagcaatacctcacgctcgatccgcccggcggtctgattcccgggctgtaaacagtctttcaaaccaataccgagttccacactcaatttattccatcgcaaagggcggtctttctgagattagtctcagaaagaccgccctttgattgctccttaacgtttataccgcgtaagatggctgagcctcacagataaccaaataggatgccgaagcgatcaagacccgtaccgatcggctggtatccgttgcgctagaactactgcgactgcaataaactataaaaaatgtgtgatgcttacacatttatgatatgataaatgtgtaagcgtcacacatttatcataggatattcgtcatgaagctccagcgaaaagcactgaaaacgctcaagcagtggaagaccacacctgaccataagcctctcctgatccgtggcgcacggcagacaggcaagacatggcttgtcaacgagttcgcgaatggacaatacgacaacatcgtctcggttgatttcatgcagcggccatccctatccgggatattcgagcaggatcttgacccgcaacgaataatccgtcagctcgaactcgccgccaatcaacggatactccccggcagaacactgctcttctttgacgagatacaggaaagtccgctcgcgttgacctctctcaaatacttcaccgagcagacacctgactatgacatcatcgccaccggctcctacatgggaatatccaagcacggcaaaacctcttttcctgtaggaaaagtcaccatgatgaacctacatccgctctccttcgccgagtatctggacagcatcggacaagacatgatcgccgacaccatacgtgaaggccggttcgaggacattccacaagctctcgaacctcagatgaatgacctactcaaaacatatatgtgggtcggcggcatgccagcagcattaagcgctcacctggataacgggattccgcaggatgtgcgaactgtccaacaagatattctcaacgcctacgatcttgatttttccaagcatgccgcatatacgctgggcgagcgtatccggcttgtatggaacacactgccatcacaactcgccaaggagaaccgcaaattcgtttacggtgttgtcaggcaaggagcccgcgcccgcgaatatgaggaagcgctcacttggctgacggactacgggatcattaccaaagtcccccgcctcgatgctctgcatattcctctgcccggatatgagagtcttaacacgttcaagatctatctggaagacacgggcatactgggcgcactgtccggtctcgacgtgaatactctggtgaacaagtcgaagctcttttccgaattcaagggcgcgttcgtagaacaatacgtatgtcagcagctggtagctcaaggaatcagaccccgctattgggctaacccaaatcctcaaggaaatgcggaaatagatttcgtaatggaacagggagacgaggtttttcccatcgaagtgaagtcctcttccaatattcgtgcgagaagtctctcgtatgtctgcaacagatacgggctccacggtatccgtataggagaaataggctataggaagcaatcttggctgacgaacatcccactttggtgcgtggatgggctgggcgaatatctcaaacgtcagatcgaaaagagcagggaaaatccagcgaccatctgattctttttctgttttttcgggtatgtgaaataggtggttgagttttggtgattctcatacatcaatttggacgaggatgccatcgcatatctcaatggcgcactcgaagaggatgatcccgcatttgtgcaagatgcgttcggtgtggtcgcacgcgcacgaggcatgaccaatgtggcccgaaaatccggcctcggccgcgaatccttatataaggcgcttcgcccgaattcgcagccctcgttcaacaccatcatgcgagtcgcagacgcacttgacgcagaaccctattccctgccgaagcgtaatcgttcacccgcgcgcggcggcggtgacgcgggtcatgaaacggtcgaggaattccggcacgttgacgcccaatgcgacttgggtgtgtttgtcggggtcctggagccgtgaacgatcgccgatggtacggcctcggaacgggccctcgagatcgacttgcaagttgaacccgaaggtcgtgaccagcgatgggtcgagcgcggcggccacggccagcgggtcgtgcagtccacatccgcgaatctccggctggttcttcaggtagaagtcgatgtagtagtcggtcatggtgacgaggaagtcgccggccggtgtccccagagacgcccattcatgggctttctcacgggtgagcgcggtctggtgggtcacgtcgaggccgatcatggtggtgcgtgcgccacacttgaacagatagtctgctgactctgggtcttgggagatgttcgcttcggcggccgggcttacattgccgggcagcgtcaacgcaccgcccatcaacgtcacgttcacgccggaatccttcaggtccggagcgttgcggaatacggtggccatggtggtcatcgcgcccgtaggtacgatggtcaggtccgggccgtattcgcgcgcggcggcgatgatgaaatcgaccgccgagcctggtgcttccggagcgcgcggggagtcggggatgattgcgccgccgatgccgttgggatggtggaccgccaccgagccgggagttggtgcccacgaagcgtccgtttgccagccgtccgcgccgccgttctgccagcgcgcgtaggcctgggtccgctcgtctggtgtggtgccacgcattttcggcaatgttgccggggcgatgggatggtcgactccgggatagaccggaacgtcgtcacggccgaacaagtgcaccaccgccagcgcgttgcgcgcgaccagcggcaccgcgacattgccgtaggtggccgtgataccgatcagatcgatctcgtcggcactgcctagggcatatgcgatggcgagcgcgtcatcgatgccggtatcgaggtcgaggatgagttttttgcgcacaattatctccttgcgggactacccgggactactccagcgactacccctcagtctcgctacgcgagacagctcccctgacaaggggagctgagaaagttcagccgagcttggcgagctcttcgggggtgagttcgagctggtcggccttgagggagtcaaggatggtctcggggtggtgggcgccgggaatcacgaacatgtggtcgcccttggcgagctcccatgccagcacgacctgctggtagctcacgccgtgggccgccgcgacctcgcggaacgggtcgaacttggtctcatcataggggtgacggtagccgccgagcgggctccagcacacgaaggccagaccgaccttggcgcagtagtcgagcgtgtcctgggtctccaggtgaatcggcgagtactggttctgcacggccacgagcttgtcgcccagaatgccgcgcgcaatgtcgatttgctcgatggaggcgttggagataccggcctcctgcgccacgccctcgtccaccagctgcttgatggcttcgacggactcgttgtacggcaccttcgggtccgggcggtggaagtacagcaggtcgatggtgtccacgccgagcgccagtgcgctctccttgccgcgccgaatcaggttctccgggcgaccgtccacatcccacgtggggcggccgtcggtgaagttgcggaagtggcccaccttggtggccaccagcacctcgtccttcggccccttccaggtctcaagggcctcgcgcaccagcttttcaccggtctgctcctcgccgccggagcagtagtaggcccaagcggtgtcgatgtggcggcagccggcgtccagcgaggcatgcagggtttcgatgccgacctcatggccgcggttgttttcgatggtcagcggcatttcgccgtggccgatggcggtggtggagaacggtccgaggttacggaacaatgccatggtgattcccttcgtgaaacttatggaaactcgatatccacgatcaagcctaagcatcccgttggatttcacactctcggcctgcccgcacaatcaatctatgaaatttccgcaacttcacggaatagaaaacgcaacttactcatacccagttcagcgaaaacgaggagccggaaccccatggattccggctgttccgctgataaatcagtggcctcgtctgagactcattcccagcaataccagtgcggcaatgatgatggccgtcgaccgcccctgtccaacttgattggccagggcgatcaacaggccggtcatcagaccttcccggtattgccggtcttgtctcggacggttgtcatggttgttgcctaccgtgagaacctcctcttgaattttgagacgtcattatgccggttgacacaacgacaccgcgccaaagtggcacgctagtagaccttggtttggtcagtccagtgtactggtgagcttcggtggaggctggtatgctgtgttgtagcagaaaggtcacgctagcttcgaggcaatcttctcggcggcgccacagactttcgccccgttggacctgactgttgaggtctcctcacctcgattttgagagaaaggcccgatgtcttatgacaccgggccttttactttcaaagctatagggactttcagaagcacatcgcttaccgcccgccgaacgaaccgccgccggaaccgccgctgctaccgccaaagccgcctgagccaccggatggcgaggccgcattgattgtcgcggtgatatccgcaaatccgtacgacaattgcgtgccgaggtcagagaacccagccgcgaacgacgtgcccccgaacgctggcaccgctccggccaatccgctgtcagccacggaatccgcgaacgccgagccattgtagaaacgcaacccataccagtcgtacggacgataattccaatagaacaccgtgtcggaggcattggcatcaagccattccggatcggatacttgcggataggccatggccagctcccgcatcacccggtcggatatgccaaatgcggcagcgtagaccatataccaatcccacagcgtcaaatccgcgactccacggtacttgaagttcgagaagccttgcatatatcgtttgagacccaagcattgcccggccatctgctgaccatgatcggtcagcacgtaggaattccccatcaggaagcagaatatgccgaccgtcatcaggggaatgccgatgagggccccggccaccagatatccggccaaaccgttgatgaatatgctggcgccaccgatcagcacggtgattgccccgggaatgagccatccgttctcggttttcggcgcgatatccgccgccgcgaattcggtcttgcacgcattggtgaacttttcgagttccttgtagccatctttccaatccttgcaggcgtctttgatgtcatccatgtcaaatgccgtacgacctacgcgctcggaaatcacggtgagcagatagagcaatgcccgctcagaagcactgagatcgggctggtgtgcatcggacacgctagatgcggcagatccagatccgccagatccagatccatcaaatacggattcgacgaatactgattcatcaaatccctcagatacgccgtaatcgtactgccacagcatcacaatcgtgctattggtacgcgcattattgcgcttgtatggatcggacccgattcgctgactgagctccaccggagaaacttgtttcagatccacgccgatatacaggtccgccgaaccggggaacacagcaatgactttcttcacggccagagaaagcaaggtcgcgacgagttggcgctcggaaatgtcgggtttgtcgccggaagtcacgatatcgatgggtttggccgccgatgcggggctcagctcggggcgatcgcgccaatattcgatggagccacggtaacgtgaacgtccggaggagcgtaaggctgcaacaacaccaataatcccgaatatcaggccggccgatatggtggtcatccagttgttcaggcgccttgtggcgcgttggcgttccagattgcgccagaaccgttcgtcgtcggcttcgtcttccttcaactcctgcagatgatcgtcggtctcgacacgagccatatctcccgccttggccgcgtcgaaagcggccaccacgtctaggtactcgccgcttttcacatcatttacggtgaaggtgaagctgccatccttggttcggccggtttccgaggtttgttcagtgtgcagccaagtccacgagttgctcgcggtcacacctttggggaaatgcaccgtgccggtgaccgtaccaatcggcacctgattgttctcaccgaatggctcccattggaaggtcgccacgtccttccacttggtggccacgtcatgcatggtgaagctcaccgtgaacttgatgctgttggtttttacggtggtgggaatattccagccgatctccacggtttggtcttgccatcgtcatccttgcgtttgcgcaacttgatatcgatatgctccgtgctttaagatcgccgtcggcggtggcggtcacatcgtaatcaagcgtgcggtagctcaggtcggcaccatctgtgccgagaatcaaggcaccggcacagagtgcggcaagaatcagcgcaccgacaaggcttaagcccagggcacgaacaatgcgtttcgacataggcatgcgctaccgcccgccgaacgagccgccacctgagccaccgaacgagccgccgaaaccggagccgccgcccgaaccgaagctggagaaatcgccaccggaatcggcggatggtgctgccgcgctgatggtcgagctgatgtccgccagaccggagttcagctgcgagccgaggtcggagaatccgccggcaaacgacgtgcctccgtaagccggagctgggccgccaacgcctaggtccgtctgcccggcagcatcgtggtcgaatggaccattatgacggtggctgtaccagccatacgggcggtagttccagtagaacaacgagttggaggcgttggcatccagccaagccgggtcgttgacctgaggatatgctttggccagttcacgcatcacgcgatcggaaatgccaaacgcggcggcgtagaccatataccaatcccacaaggccaaatcggcggtaccccggtcggtgaagttggagaagtcttccatataacgcttaaggcccagagtccggccggcgatatcctgcccttgatcagtgagcacggtcatcgcgccggccatcgagcagaacagtccgaccaggaatatcggcagcccgataagaccagccaccgggtatccgataaagctgttggccagcagcgaaccaaatcccagcacggcggccaatacgccgggtaggatccattgccagcccacagagcgcgtggcacccagccgctggtattccatgctgcatgcaccggtgaatttgccgagctcaatatagccgtcttgccagttctggcaggtcgccttcatctggttcaggtcgaataccgggctgcccacgcgctgagaaatgacgatgagcaggttcagcagcgcatcttccgattcgctcaatcccaactgttgcgcgttgggtgcctcatcaatggcgagcggcagaatcacgatggtgctggtgatgcctgccgcatactgcttgccttggtcggcggcaatcatttggctcaagcccaccggcgtggcctggctcatgtcgatgccgcgatacatgtccgacggccccggataaatggcgatggccttcttgacggcgagcgacagcatggtggcggtcagctggcggtcttcatcggattggcgcgtcgacggatcgaccacgcgaatcagacgggctgcggaagccggactgatgccgggctggtcgcgccagtattcgacgctgccactgtattgcgcacgccggttgctggagatcacagcccagataccccacgcgcacaacgcgatgccgagcacgatgctgacaatccagaacacgagacgagctctggcagcgaatcgttgcttgtcgagccagcgctgctgttgcttatattcgtcctgtttcaggtccgtgagatgattgccggttcccttgcgggcgatgcccttggctttggcggcatcgaacgccgcgaccacatcgaggtagtctccattgtggatgttgtaggccgtgaacgtgtagctgccgtcgctgttgcgcttggtttccgaggtgcgctcggtgtgcagccatgtccatgaggttttgccggtgatgccgttggggaaatggacggtgccggtgaccgtgccgataggcacttggttcttcttgccgaacggctcccattggaaggaggccacgtctttccatttggtggccacatcgtgcatggtgaagcttacatcgaacttcatgctgtcggcctcggtggtgaccggaatattccagccgatctccacggttgtgtcatcttcggtggcggaggcgctgggcttgaggccatcggtaccgggcgtgtatgcctttggatggtcgctgccatcgctcacatcggcgacataccaatggttggcgtagtcgctgttccattccttgtcggaagagacgtcactgggcagcttgggctcgctctgttgtgcgtagtcgatgccgtcggtgacgttgcgcacgctgatatcgctgatatcagtcaaggtgccggagttcagcgtgtattgctggaacagctgcttccacggcttggtgttgtcgtcactgtcggtacgctcacgcatcttgacgtcgatatgctgcgtgaccttcaaatcaccgttcgcggtggcggtcacgtcatagtccagcgtgcggtagctgaggtcggccgaatcgccgaacgcggaagtcccgattatcgccaaggtgataactgccaacaccaccgtggcaacaatgctgatgattccggcgcgaatgaatcgtatccgcatatcttccttctcttaagacaatacgggcccggccggcggcttaccggacgggcctgaagcgggtcagaactggacctgtggcacctgacgggaagcgtcatcggcctcgaagtattgcgcctgctcaaagtggaacagaccggcgatgatgttcgtcggcacggtttcgatggcggtgttgagcttcaggaccacgtcgttgtagaactgacgggcgtaggcgatcttgttctccagttccttgagctggttctgcagatccatgaagttctggttggcttgcagctgcggatatgcctcagccgtggcttgcaggttgaacagggcgcgggacagctggttttcggcggcggcgcgctgagcagtggtcgtgctcgggttgctggccacagccactacgccggcgcgggcggcggtcacctgagtgaagacttcagactcgtgggatgcgtaccccttgacggtattcaccaggttcgggatgaggtcggcgcgctgcttcaactgcacgtcgatttgcgcccaaccgttcttcacacggttcttcagcgtcaccaggttgttataggcgctgacgccccaaccaatcaagacaacgataataacgacaacgacaatgccgacgatcagaccagtactcacctatgctcctttgctggaccttgctgtgaccattcttccacactcgcaccgtaaacagaagattcatcacagagtattcatcgtgcggacttgtcttgtaccgctttacccgccgttctcccgtcgatcgaccgaagcgggaagtcgccgcccagtccgacgaagtattccagctcgctccgttgcgagaacggtaatactcggcaatactcgccctcaatatgcgaaagcccgccttgcggcgggctttgccgtttctcctacgcacaaatcattacgctgcgcgcaggaaacgatcagccgaagcgaccggagatgtagcgctcggcttcttcgttttgcgggttgttgaacatcgtgatggtgtccgcgaagtactcgaggtgaccgggctggcccactgccttcaggttgaagaaggcggtgtagtcggcgatacgggcggcctgctgcatgttgtgggtcacgatcacgatggtgtagtcgctcttgagctcgttgatcagatcctcgacagccaaggtcgaaatcgggtccaaggcggagcagggctcatccatgagcagcacctgcgggtggacggccacggcgcgggcgatgcacagacgctgctgctggccaccggacaagccgatgccagggttgtcaagacggtccttgacctcttcccagaggttggcaccgcgcagagcccactcgaccagatcgtcggcgtcggacttggccaggtggtggttgttcaggcgcacaccggccagcacgttctcacggatggacatggtcgggaacgggttcgggcgctggaagaccatgccgacgtcgcggcgcacggccaccggatccacgtccttgtcgtacaggttcttgccttcgagcagcacctcgccctcgacgtgagcgccggggatgatctcgtgcatacggtccaaggtgcgcagcacggtggacttgccgcagccggacgggccgatgaaggcggtgaccttgttcggctcgatgttgatgttcacatcttccacggccagaaagtcgccgtaatagatgttctcgtggttgacgtcaatacgttgtcccatgatgtttccttatatttccttgtgttcttaaggcttaggcttagcgactggcttagcgctcggtcttgacggcgaagaccttcgccacgattcggccaatgaggttcagcagcagcacgatgacgatcagcacgagagccgcagcccacgcacgttccatcggaatcgtggtcacgcaggtggcgtcggcgttgggcgggcagttcgcgctgagcttcgagtactcctggtagacgaacaccggcagggtggtcatctggccggagaacaggttcacgttggtgctggagatgtagccggcggtcatcagcaacggtgcggtctcaccaatcacgcgggcgatggccagaatggcaccggagacgatgcccggcagagcggtgcgcagcacgatcttggtaatcgtgcgctgcttggtaacgcccagagccaaggaggcctcacgcaaatcgttcggcacgatcttcagcatttcctcgctggacttgaccacggtgggcagcatcagcagggagagagccacggagccttcgaaaccgttgatggtaccggggcccagcagaatcgtgaacatcgagaaggcgaacaggccggccacgatggacgggatgccgctcatcacgtcgacgagcagggagatcgtggtggcgagcttgccgcggttcgagtattcgaccaggtacacggcgcacatcaaaccgatcgggatggagataaccatagcgccagcggtgatttcgagagtaccgatgatggcgtgcagcacaccgccgtaaccaccggacggggtctggctaccaccgaccacaccggtcatgttgtagctcaggaagttcaggttcaggcgcttgatgccgttgacgatagtggtccacagcagggagatcagcgggatgcaggcgatcacaaacgccaccgcgatcagggcccacatgaagcggtccatgatattacggcgctggatggcggaacgggtcgggcggaaacgatcgaagtcgatttcgggcgtgccgtccatcggagtcttttcagtgttctcagcagcagtcatcacgcagtcgctttctcggtaagcttacgggcgatgaagttgaccacgaacgtgatcaggaacagaatcagaccggttccaatcagcgtggagacgcccagatcgttggcttcagggtactgtgcggcaatattcgcggcgatggtctggttctgcgaggcctgcagcagcttgatggagtagttgaggcccggggacaggatcatcaacacggccatcgtctcaccaagcgcgcggccgagagccagcatggaggcggacacaataccggacttgccgaaaggcagcacggccagacgaatcatctcccacttggtggcgccgagcgccagcgcggcctcttcgtgcaggcgcggggtctgcatgaagatatcgcgggacatggaggtgataatcggcaaaatcataacggcgagcaccacagccacggtggcgacggtgcgcgacgggttggcggccgggccctcgaacagtggaatgaagcccaagtggttggcaacccagttccagaacgggtagatggccggcaccagaatcaggccgccccacaaaccgtagataacggacgggatggcagccagcagatcgaccacatagctcagcgcggtggcgagcttcttaggtgcatagtgcgaaatgaacagcgcaatgccgatggacacgaagaaggcaatcagcagtgccagcaaagacacgagcacagtaccgaacaacagcgggagcacgtagccccagaagctgctggccttgccgccggtaaagctggacacggtgtcgctgttggcggcctgatcgccaccgatgagtggccaggcgcggaaaaacaggaacaggaacacagcggcaagtacaaccaggatcaggatgccgcaggcgtatgccacaccgcgaaacaccttgtcggcggtcttgcctccaactggctgcacagccgttttgtcttgcgaactcacggattctccttatatagggtggttatcaagtattcaagtggtgcggttttcgtctgtgactttgccaaaccgttcgggtcctgacccgctttaagccgcagccgtatggtttacgactgcggcttaaagttggcggcgactgctcttactactacagtctatcgttcagttgtcaggtccagtccacacgacccttgcgggccgacgtcatcacttggtcttgatggcctcgatggacttggtgatcttagacttcagggaggagggcagcggagcggtgccggcggcatcctgagcggccttctggccctcgtcggaggtcacgtaggtcagccaagccttggcgaactcagcctgcttggtgtccttgtaggccgggcagacgatgtcgtaggagaccaagacgatcgggtaggcaccctcggcctcggtggcgtggttgatcttgatgacgatgcggttgtcgcccttaacggtgtcgtcctgcttggagtcctcgatgaccttggagccggcctcggcggaaatctcgttgtacttgtcgccgaccttgacggccacggtgcccaggtcgccgacctgggagaagtcagcgtagccgatggtgccgtcggcctgcttgacggtggagatcacgccggaagtgcccttggcgccctggccaacctcgttcggccagttctcggagaggtcgtaggtccagttgtcaggggtgacgtccttgaagtaggagacgaagttctgggtggtgccggacttatcggagcggtgcacgacggtgatggcggtgtcgggcagcttcaggtccttgttctgatcggcgatggccggatcgttccacttggtgatcttgccgtcgaagatcttggcgatggtggcagcgtccatgttgatgtgcttgccggcatcggaaacgcccttgaggttgaagaccacggcgatcggggagatgtagaccgggacatcgaaggcggtgccttcagtgcacacggacttggactgctcaacttcgtcatcggcaagggccttatcggagccggcccaagcggtggcaccggtcaggaaggtctgcacgccagcgccggaaccggacgggttgtaggcgatcttggcttcagggttggtgccctggaagccggcgatccaggcttcaacggcggcctgctgagaggaggcgccggcgcccgagaagttgccggagaccggggtggacttggaagtggaatcggaggaggagctgttgtcggtcgtggtggcggtgttatcgccgcaggcggccacggaagcgagcatcacaatgccggacagagcggcaatggagcgaatgaggatgttcttctgcatgattattacttaatccctctatcaactattcgcgggcggctcagcgctgcccggtcaattcatgacaactacaagcgtattggtggtttcaagggcccaaaaccgaaatcagtaaacagaagatgaacacttggatgtttgtgggctacgttgaggctacgtagtttttggagtggactcgcctgcggcgagcccacaatccacaacaaaaaaggcggcccgaaggccgccttccatttactccgcgggagtatcgatcttgtatccgagaccgcgcacggtagtcagatacttggggtgcgccggatcttcctcgatcttggagcgcacgcgcttgacatgcacgtcgagcgtcttggtgtcgcccacataatccgaaccccagatgcggtcgatcagctggtgacgcgtcatcacacggcccttgttctgcatcaggtattcgagcagttcgaattccttgagcgggaagaacacggtttcgccgcgtacggtgacctgatgctggcctacctgcatggcgatatcgccgcacaccagcggaatatcgtcatccacagtgccggaagcctgggccgtggcctgattgcgacgcatcacggcacggatgcgggccagcagctcacggaaagagtacggcttggtcacataatcgtccgcaccaatctcaaggccaacgaccttatcgatttcggcgctcttggcggtgagcataataatcggcacacggctctgctcacgaatgcgacggcacagtgcagtgccgtcaatgcccggcagcatcaaatcaagcagcaccaaatcgatgccgcccttggtgaacagttccagaccttcctcgccagtggcggcggcggacacgtcgtacccctcgcgtgtgagctggtataccaacggctcgcgataggattcctcgtcttcgacgataagaatgcgtgccatagtagcctttcttgggtatgttcccgtgcgcataggcgcaaagttttccgatactatcgtaaccatttgttctccgttagcctgctgtttcctgaaagtacgtaattgcgtaattgtgctacgcacggtgtgcgcacctcgcccactgtgtgattgtgcggcaatggaatggcaccatatcgggcaccaaccaaggccctacgcttgtgtcgactcgtccggccgggcctcgtcgtcatcctcatccggggcggccggcagctcgatggtgaacgtcgacccctcccccgtacgcgaccagaccgaaatccgaccgccgttctcctgcacgcagtgcttggtgatggccaagccgagtcccgaaccgccggtctcgcgcgaacgggccgggtcgacccggtagaaccgctcgaaaatgcggtccagtgatttggcggggatgccgatgccctgatcgaccacgcgaatggtgactttgccatcgcgctcccccacgccgaccgccacagtggtgtgttcgggcgagtaatggatggcgttctctacgaggttcttgacggcggtttgcatggcctctttgtcggccttgatcatcggaccgctcgtggccgggctgcctgattcttccaaggaaccttcgccatcggccagctcctcgaccttcgtgggcactgactgtccgttgacactcagtcgaatatccacatggcgggagtcggcttgggtctgattggcggcgatggcagcgcgtgccacatccagcgcggaaatgcgccgcgcatcaatcacactttgcgggctttgggctttctgcaagtcgataagatgatgtaccagttcggtcaggcgcgcggattccttggagatacggccggaaaaataccgtacggcgtccggatcatcggcggcgtcggtcacggtttcggccagtagcgagatggcaccggccggagtcttgagttcgtgcgaaacgttggtcacaaagtcacggcgaacggcctcgaaacggcgctgctcggacatgtcgttgatgaagatggcgtacaggtcatcgccgatatcgccaatgcgcacacgcaaatacagcatgttggacgggcgtgactggccggcctccagtcctcggccattagaggacggataggaattgcgattgaccggcagctgaacctcacgctcacgcacgccaccgtcggcggcggcctgagtgaggatgtcctcgacttcgcgcgagttgagtcggtcgccggagaccaggccgaatggcactgagccggggcttgaatattggaccaagccgttgcggtcggtaacaatcagggcttcgggcaggacttcaatcaggcgacgctcggtggggcgcacgggcgcatcatcaccgaatagagaacgcgtatcctcgtcgccggacaggtcctgttcggcggcgagccgacctgaaacgcggcctttgttgtaggcgatgacggcaacccacgccagtatcagcgcggcgagcaccacaatcacgacgatctgccagatatccatgatttccagagtaaaacgtgcaaggcgtagtgagatgcccaaactacgtaagttcgtctattgttcatttttggtgggacgacataacaaaatgctcccgctggcgggagctgtcgaacgcagtgagactgagggtggtcaaagaaccgaaatcccattggccaccctcagtccgctttcgtggacagctcccgccagcgggagcataatatggggagctctatttacagctcgtagtccttgtccttgctttccttaatcaggaacagagcgagcagagcgagggcggccatgatggccatgtaccagcccacaccggcaacgccgaacttggaggcgaccagggcctgggcgatggtcggagcgaatgcgccaccgaagatggcggcgaggttgtagctcaggccggcgccggagtaacgcacgtgcaccgggaacagctcaggcaggtaggcgccgcaggggccgaacaaaccacccatgatcatgaagccgacgcacaggaagatcatgatatgggcggcggagtgcacgagcagcatcggcacgaagaagctgaacaccaaggcggcggcggtcacggcaatcatgaccttcttgcggcccaccttgtcggcgtacacgcaggagaccacgatgaagatggcgaagaacaccacggagcacatctgcatgagcaggtactcgccctgctggaagcccaagcccttgacgccgtaggccagcgaccaagtgccgagtacgtagaacagggtataggtgatacccatggctacggtgccgagcacgacttccttccagtacggcagcaggtcgcgcagcgggtgcttggaggtgcgcttctcttcagtggccttctggaacactggggtctcagacatgcgggcacgcacgtacaggccaatgatcaccagcacggcggagcacaggaacgggatacgccagccgaaggcaatcatctgttccttgctcaggttggattcgagtagcaggttcaggccgtaagcgcagaagaagccaatcggggcgccaaggttcgggaaggaaccgtacagggcgcgcttgtcggccggagcgttttcagtggcgaccagcgcggcaccggaccattcgccggcgaggcccacgccctggcaggcacggcagatgcacagaatcacgacggaccatgcgccaatctgctcataaccgggcaggcagccgaccaggaaggtggcgatacccatggtcatcagggcgataaccagcgtcttcttacggccgagcttgtcaccgaagtggccgaacagcatggagccgaacggacgggcgaggaacgaaacggcgaaggtcacgaaggccatcagcgtggcgagggtctggttggacttggcgacgtccgtgaagaagatcatgccgaagtagctagcagcggcaatggaatagcagtagttatcgtagaattcgatggccgtaccgaccatggaagcggcgatgatctcaggaaccgaatccttcttcaccggtttggtcacagccgcggttgcgcttgcagtcattttttctctcctcatgctgcagataaaccccagtgcagcgtgcgcattgtgtattcaatgcttcgcgacggtgttgtcgtcgcttaacgaattgagcacagcgaccggcatgcgggagaagaactggtacggcttgtggccccagcgatgaaccccgcacatcgctgtgccgaacaccgagtatggctcaggttataagcaatagtttgaaaacgctcatattgtggtcatcatacccaaaacgtggatggtgagatgggccagcccaccgactacaggcgcttgacgatgtcgacagccagacgggcggcggtatcggcgtactcggagatgtcgaactccttgaatacctcgtaatcggtgtcggcgttgtcggaaagggcacgaatcaccagtgccggcacgtcattgcgggcggcgacctgtgccacggcggcgccttccatctccacggcgtcagccccggtgagtcggatgacctcctcgaccttttggggcgtgtccacgaagtagttgccagaggcgatgatgccggtgatgtgggtaatgcccgcattggcaagcgcctcgtcggcaacttccagcagacggtcatcagagtggaattcctccaccggagcgtccgcagtgccgggcttccactggcctacgagccgcatgtcagtgtcgaggtagcgcagggtgccgccgagcaccacgtcgttgatgtgcaggtgggtgttgaggttgccggcgatgccgctgaaaatcacggcgtccggggcgaactcgtcaatcagcagctgcgtggtggcggccgcattgaccagtcccatgccgcctaccgttgcggcaaccttgatgacgtcagaaccgaaggagtcgaccgtgccggacacgatgtcaaggctgcccttggcggtgtgcgtcacatgcgtgagcgatttggcgatcagtgccacttcttcatccaatgcgccaataatagctacagttttcatacccatacgtaagttcctttcacaacactttcggttccccttgtcaggggagctggccgccgaatggcgggctgaggggtagtcagacgtttcgtcacattgctccccccgagagagccgatgacgcaactcagtgccaacgccgcgtggccacggcttccgcaagctcgcgcagcaaggcctcggtttcttcccagctgatgcacttgtcggtaatcgacttgccatagaccagctgatcaagcggcgcggccttctgattgcccccttcaataaagctttccatcatgatgccggtaataccctgttcgccagctgcaattctgctggcaatattgcgcacgacttcggcctgacgatgctcgtccttgccggagttaccgtgcgagcaatcaacaatcagaccgtgcgaggctgcggattcggcgggcatttcggcgcgtacgtcttccatggctttggccacggactcggcatcgtagttcgggccgtgaatcgagccgcgcaacaccacatggcagtccgggttgccaagggtctcgactgcgcaggcacgccccagatggtcaatgccgaagaacgtgtgctgctgggcggcggcgaagcaaccgttgaccgccgccttcaccgagccgtcagtggcgttcttgaagccgaccggcatggaaagcccgctggccaattggcggtggatctggctttccgtgttgcgcgcaccaatggcgccccaactcaccgcgtccgagatgaactgcgggctggtgggctccagaaattccgtggcggccgccaatccttccttcagcacaccaagcaaggttttgcgagcaagcaacaggcctttgcgaatattgtggctgccatcaatatccgggtcgttgatcaggcccttccagccgatggtggtgcgcggcttctcgaagtacacgcgcatgacgatgagcagctgctcaccgagctcgtccttcagcttggccaatcggtgcgcgtagtccagcgcggccttcgggtcatgaaccgaacaggggccgacgatgaccaacaacctgtcgtcttggccgtacaggcacgcgcgaatctcatcacgcgagtaggcgacgatttcctgagcctgatcggtcagcgggagttcagcgagcacttgcgcaggcgtgggcagcggctccagctccaatacgcggcggttgatgatgcgactgacacccacctgatcttcccagcgcggcacatcagtggcaacgagcgggttcttcccctcccccatcgcctgacgaatggcgcgaagctcttccggggtgttcaacggctgcggaccgacttgcaacggatgcagcgaatgtgctgcttcctcctgctgctgcataacatctctccttggatcagtatctttcccaaggataaggtgtcacgggaacaaactgacatgaccaccgttattggcaaaaaatgctcactgagtgggtctcagtgagcatttttacaaagacaaagctatttagccgagctgcgagcggtgacggcgtcggctagggtgtgcagcagctcgttggtgcgttcccacggcacgcaagagtcggtgacggactgaccgtagaccaactggtcgagcggggccggcttttggtgaccgccgaccaggaagctttccatcattacgccggtgatgccttgttcgccgtgcgccagacgctcagcgatctcttcgatgacttcggcttcgcggttttcgtctttgccgcagttgccgtgggcggcatcgatgacgaggccatgctggctcgggccggacgctttggaaaccttgaggtcttccagagcttgacgcacggattcggcatcgtagttcgggccgtggctggaaccgcgcagaaccagatggcaatccgggttgcctttggtttcggcggaaatcacgcgaccgtccaagttaatggacaggaagtgatgctcgaagccggccgcgaagcaggaatcggcggcggccttgatggagccgtcggtggagttcttgaagcccaccggcatggacaggccactggccagttcgcggtggacttgggattcggtgttacgcgcgccgatggcaccccagctgatcgcgtcgcagatgtactgcggggtgatggggtcaagccattcggtggcggcgggcaggccgaggctcagcacgtcggtgagcaccttgcgggccagccacatgcccttacggatattgaagcgaccgtccagatcggggtcgttgatcaaccctttccaaccgatcgtggtgcgcggcttctcgaaatacacgcgcatcacgatcacgagacggtcttcaagctcacgcttgacggcggccagtttctcggcgtattcgtgcgcggccttcggatcatggatcgagcacggacccacgatgacgagcaatcgatcgtcacggccattgagcacgtcgcggatttcctgccgcgagtggagcacgagctcgctcatctcatcggtgagcggctgctccctgaggaaggcacgcggcgcgggaatggggtcaagctgacgaatgttgacatcgacggtctcgggaaagacggcctgctcccccaaacgacgttcatcctcggaactatccggaccacgtagtgctgccattgctcgactcctttccttgtatacgtaccgtcggtatggcgctatagacgcaaaagcccaactatagcagtctgttacggggactgcttgttgggccggcggttatggactttgggtgaactcgcctgcgtggactcgcctgcgtggactcgcctgcggcgatgctgtgttgttgtgcggcctgcgaccgcggcctccccccccgtcagcggcttcgcgctgacagagggagagaccctagcagccggcaggctgcgaaaaaacacagcatcggccgtcaggccgattccgggaggctggcgaagtcaggccaaggcacccatcgggtcccatgcggggagcatggtggctggctcttcgagggccttctggtattcctccggcaacagggccttcgggacggctacctcgtagacgtattcggtgaaccagtcgtcggacatggtgaagtagcccttgtcggcgatcttggtgccccaagagttctccactcgccagcggcgggtggtgccgtcgtcggccacgtcaacgccggcgaaagccatggcgtggttcatggcggagtcaccgaagcgcacgcgggcttccttgtccaaatcgaagtccacgtcgtacacgcggccgtactcgaacaggtcggtggcccaagcgccgttctcacggtccatgaacgggtggcagtcggcaccgaaccataccgggatgccctgctcaacgagaatctgcttgacacagtccttcatgaactggtttggcacgttgaggtactcggtggcgtcgccgccagccacattgccgaggtgctcgatgccgatcttcttgcccttggcgtgctcggtgcgcggatcatccaccaggcacacgtagtcctcaagaccagccggacccacgtacttcttccagaactcaaccggcgtaatctcgccgtcgcggtggaattcgccatccttgtcggtccattcccagtcgaaggagaccggcggctcgcccaggtggatggtcagaatacggtggccggcagcagtggcgtcggcaataatcgcctcgaccttggagacatcgccgtcagcggcgtacatgtgcgccacggcggtgtgcagcatgtggcgcagctgggtgttcatttcaccggtgttcttggaggattcggtctccgggaacaggtccttgggcacagcgccgtacttcttgtacacgttcatggccatggtccactggccgccatcgcccatcacgtcggcgagcaggtgctgcatcaggcgggagtcggaaggctctccggcagccaccagagtggccacatccttaaggaagtagttgacgcgctccagcttgtcgtagtacatcgcgtagttctgggagaactcgaactccttcaagttcatgttcttcttggccacgaaacgggccacgttcagggagctgaacagccagcagcggccggagcgatcctgatgggtggcttcgccattgtcaacgatggtggagaaacggcgctgcatcagacgagcgcggtcataattgcgagccaccttgtcgatgccggcggcggtcaccgcgttcatggccagacggttggtgccgctctgtgcgaaatcgccgcgcagggtattcaatgcttcgccggtcagaggcgtcaattcactcatgtcatactccttctgtgatggtgcgcttgtggcgcagatccaaacgaatacggcacctggctcgaaagcgcaggtgccgtaattcttaccgctagtagtctaatcgaaggcctgtcattcgccgttctgctcagatacggctggattctcctgagtcggggcctccggttcgccctgtgtctggtgctcggacggctcagacgattcggactgctcattctgcgcagctgaatcagccgaatcagccggtgccgcatctgtctcattgtgatcgtcggcagccgactcgtttccgctcaactcacccggctgatcatcggcctcgttgtgtacaggcttgacttccgggacgggcgcgaccaccggcaatgacgccacggcagcggcttcctgactctgaccagaggccgccgcattaccaccgaaagcgaatccggagaacgcctgcgagaacatagaacgcagttccgaaacacgctgggtgatgacggactcgcgttcctgcagatcggcgatgcgcttggacagaccgtcaagctcgctttgggcggcggcacgacgctcctcgatctgcgcatcggcttcctcgcccgccttatgcacgattgcggcggcctggatgtccgcctcctcgcgcttggacgcggcatatgaatcggcttggtcgcgagtgttcttggcctggccgaccaactcatcggcttcccgcttggccgccacacgacgctcttcgaggtgctgcaggagttcgttgaccttcttcgtggcctcatcctgctgagcggcgatgtcgtgacggatctgctcgacttcggcgttgacctggctcatcgtgctggtgcgcttgacctcggcctcatcagtgatttcctgacccttggtcttggccgcatcaatgatttcgctggccttgcgctgggcttcggtcatcatcttggacacttgctcgcgcacgtcggcgagcttcttgttggcctcggcgagcgccgcctcaatctgatcgttggaatcggacttaagcttggtgatctcctcattggcgcttttgcgcattgcggcgacctgctgggtagcttccgccttcatatcggcgatttcgcgctcttgggtggagcgttcggaagccatcttcttggtgtgctcttcgcgcgcgttgctgagctcaagctcgacggtctgacgctgttcggtgatggtcttggcggtttcggagcgcagttgtgcggcgtcctcgttggcggaggtggtcactgattcggcctgattgttggcgttcgtcagaatcgaggcggccttggcattggcgtcgtcaacaatatgctgggcatccagcttggcgttgttgatcagtgtttcggcctgagcctgagccgtggtacggatggaggacgcgtcctgcttggcgcgttccagcagttcggtactcgtctgttcggcggaggcaagcatctgctgggcgttcgctcccaaggaagcgaagctgttgccttccggcttcttgttcttctcttcctgaagttgggcctgcagttgcagaatacggtcgtcatccgccgcaatctgctcacgcatgctggccaacgtctgctgcgcacgcttcacactctcctgagtagcgtcgaaggcagcatcaaccttctccttgtcatatcctcgcagcaccaccgggaaacgatccaccatcgctgtttattcctttcgcacacgcataaagctcttggcacatccttgaagcactgtagcgcatcgcactagcgctgggcgttgagtgacgcgcaatcgttacaatgcgtgcgaaccatgttctattccggcgtggcgcgcagcgtgctaggcgatgaggatgccggagctggagggcttgagatagtagcgcacggcttcgcgcaccacatcacggccagcggcgatctgctggtcgagtggcagaccatgctggctggaatccgccggcacgaccggcgggaagctgacgaatccgcccagcacccgctcctgggtggcggtccagttcagcaagttgtagaacagcgaattacatacgaacgtgcctgcgtccgagctcagggtggccggaatcgaatcgtccgtgaaatcattcaggatcgagcgcaacggcaggcgggtccaataggcggccgggccattggggtcgatgggttcgcggcgtggggtcacgttgtccgcgtccggcttgatcgcgtccatcaggttggtggcgcatcgttcaagcatcacgcctcgggctgcgtgcttgagcccggtggcgatgacgatattgggcttggtggcctcaatcgtctctttcagcgtgggccaggctttggcgaagctcaccgggatgctgacggcatggacggtgacggcgacctgctccaacggatcgtccggagcagaggagacgcccaacccctgctcggcgatggccttgggcacttcgacggcgggattgacctccacgccgtcatagtggtcgaagccggagatcacaacattgagttcacgcataatgccagtctagcgatgcatctggccggccgcttgggccagcagggcgtgcatgcgggcgcgggcctcttccttgggatcacgaccgagaatctcctcggcgatacgctcagctgtgggaatatcctccagcgtggtgatcttcaggttggtttccgcaccggagacaatggcgacgggttcatcaggcagataatcgaccacaacgcgcgtgtcgtcggtgggatggaagtccgggtcggcggcagccagatcgtaagcgtgacgaatcgtcgcgaagcggaaggattgcggggtctgcgcgcggaaggtgttcgggcggtccggcaccgacttgaccactttcaaatcgcccagatcctcggtcaacagcacggtgtcggttgaggtgtaggccacggtcgcggccgtgaactggtcgagcgcatcaatcgaaccgtcgatggcggactgttccacgaacggacggacggcgtcatggatcagaatcttggcatcgtccggaatgccagccgtagccagcatgtcgagcgcggcggcggtactgtccacacgttcgtcaccgccgtcaatgatgacgcggaccttggtgtagcccatctcgccaaccaacgtttccacttcaccgcgcaccttgggattgaccaccaccacgatgtcgctgacgcgatcgcaatgttcaaaggcatcaatgctccagcacacgatgggcttgccgcccacggagacaagctgcttgggattgtcggggtcgaagcgcgtaccgaagccggcggccagcaccacggccaccaccggcacggtttgtgccggtttggagccccgagcgggggccggctggacggtaggcgtctcgacgggggtatcgaaatctctctcagtcataggcaccaccgtagggtgagggctggccgtccgtgaactgcatcacatcttctccacggaatgtgctcgcattctccgtttagtcacgcacgatgagggcaaggaggcggccttcgtgtgttttgttggcgagcgcggcgcggcggtgcgagtaccacagtgggttttcgagcgtgcacatgctgtggctgatgttgtcgatgcgctccgcgagctcggccgggccttcgccgtccgtacggcacagttcggcgagttccgggtcttcctcaaggtactgggtggcggcgtgcacgcgcggcatcgaatcgaccacctggtgtacgccggcgaaggcgaggtcgatcatcgcggcttcggcgatgtcgatgccggcaccaccgaaacgggtcttcgtcttggtcagcgggaagcgcttgatgaactggtcggcgatctcgtcgcccacttcatagcagtcgccgcagatgcgcgggccgagtgtggccacgatgttcgccggatcggcacccttgctcttcatcaggtctaccgtggcgccgatcacaccacgctccagaccacgacggccgcagtgagccgcaccgatgatgccggtgaccgggtcgcccagcagcaccggcaggcagtcggccgcgaacatgcctagggcgatgccggattgtgcggtgacctggccgtccgcctcgatgacgtgcggagtgtcagtctcaccgtgtgtgccggacacgtcgaagccgaagggggtgttgatgacgaacgagtcgtccacgtccacagccacgccggaatgtacttgggagaccagcgataggcgggcttgcaccgcttcggcgagtgcgatgcggttcgacagtacggcctcaggttcgtcgccggacttgccgccgaggttcaggttgccgtaatcgccggcgctcaggccgcccagtcgcgtggtgtacaccaccttgatgccgggggccagtgcgatggggatggtcaccggaatagggcgaccggctttatcggtagagctgatgctgttggaatcgaggatttcttcgctgtattcaggcataaggcattctttcttgggtgcgggcggtgttcatgattcccatgaccacccccagtcagcgggggcggagtggtaggttattcggctttgagggtgggctttttggtgcgcgagcggatggcggcgttgatgggcacctggtgcgggcagggcatcgagaacacgtgcgccggattattgatggcgggtactggcgcgccatcggcatcgcgcaggccggtttccggcacggtaaagaccaatggtctctcgccaggcagcaggaattcaacctgttgaccgggctcgatcttgttacggctcatcagcgtgacacgtccgccttcgtccgcgctccagctcagcacttcgcccactaccagccatgagcggaagtaggcggagcggtcggtgttctgtgtgaccttgtgctccgggtaatagaagccggtggagtagtcgcggtgggccaccttgtcggtttcctcgagcagccattcgggcagttcgacgtgcggggccgggcgaacggccgcatgcttccaatcggtctcgatctgttcgaccgcggtgttggacttgcggcgcgtggagcgggcgtgggagctcatgccgtcgggttcgacggcggtgccggccgacgtaccagaggcagttgagtcggcggcatcagcaaccgtcacgcggtcacgttctgcggcaaccgagccggtgaccgaatcggcaaccgcagtatcagagccacggtcatatccctcatcggccacaccggcgaacgcggcatcggcattgctcatcacttgatcttcggttccttggccaaaatcggggtcgcccgggcgaatcacacggtcacggaaaggcttcagaacattgccatcagcgtcttcaaaaccgcgttgaatcatgtattcattaaccgcggttttgtaggcgttggtcatggcggcgatatagtaggcgcttttcgcgcggccttcgattttgaggctggtggcaccggagtcaatcaaatcatccaagtgccccagcatattcatgtcctgcgaattgaacagataggcgccgttctcggtctgctcgatcgggaagtactggccggggcgcttctcttccacgatcgaatacttccagcggcatggctgcgcgcattcgccatgattgccatcacgcccggtcagatagttggagaacaggcaacggccggagaacgccatgcacatcgcgccatgcacgaagcattcgatgtcgaggtcaccgggaatgttggcgcgaatatcacgcacggcctgcaagtccatctcgcgggccaacaccacacggcgagcgccaagctcatagaaggcgctcgcagcttggtaattggtgacgccggcctgcgtggagacatgcaattccaggttcggagccacttggcgggccatcatcatcacgccgatgtcagagacgatcagcgcgtccacgccggtgtccttgagctggccgacgtactcgcgcatggcttcgatctcgttgttgcgcggcagcacgttgcaggtcacgtacacgcgggcgccgcgttcatgggcgtagcgcgagccttcctcaaagtcctcaaggcttaggtttttgggggccgatcgcatgccgaaggctttgccgccgcagtagacggcgtcggcaccataatcgaccgcggttttcaggcccctcaggttgccggccggggacaacacttcgggctttttgcgggtggggaggttcatcgtcgtattcatcaccgcaatagtgtagtggtggccgtgtaatgcgggcggggctaccgttaggctggataacatgaagatcgatatcgtgagcgtgttccccgaatactttgaggtgatgaacctcagcctgatgggcaaagcccaggccaagggattgttggagatcaaagcgcacaacctgcgcgactggacccacgatgtgcatcattcggtggatgatacgccggtcggcggcggggccggcatggtgatgaagcccgaggtgtggagcgaatgcctggacgaactgctgggattctcgcggccgtctgaatcctccgccctatccggcacaccggtgctcatcttcccgaacccatcggccccgttgtttacccaacgcgacgccaccgagctcagccatgccgaccatctgctgttcggctgcggccggtatgagggctacgatgcgcgcatcccggactactaccgctcccagggcgtcgacgtacgcgaatattcgatcggcgactatgtgctgaacggtggcgaagtggcggtgtcggtgatgcttgaggccatcacccgcctgatgcccggattcatgggcaacccagattcgattgtcgaggaatcctacactggcgaggacgcactgcttgaacatcgccagtacaccaagccggccgtgtggcgtggtattgcggtgccggacgtgctgttgtccggcgaccacggcaaggtggaccgttttcgccgcgacgaagcgctggcccgcaccgccgagatccggccagaccttatcgcggcactggattgcaaggcgctggataaggccgaccgcaagaccctgatggccttgggctgggaggtctccgccacccatccgcgccggctcgccgattaattcaccacacggtgggagattcactacgcggcggaatcgtcggaacgctctatatccgagtcgtcatccgcgggctcgatgtagaagacggcggtttcgccgtagttgcggctttcagtgatttgccagccttcgggggcggtgggggtgtcggagcgtaccgagcgttcgagcataatcacggtgttctcgttggtggcgctgcccaccgccagattggccaacaactgattgcattcagcggtctcataggcgtagggcggatcaatgaatatcacgtcaaaggattcaccaaagccgccagccacttgctcggcctttttggtgaacacacgggccttgagcgaggcatcccacgaacgattcttctgtaactgcgacaaggtcttggtaatcagcgccgccgcaggccgggaactttccacggccacgagttctcgcgcgccacggctcagcgcttcgatgcccaacgcaccagtaccggcgaacaggtccagtacacgggcgtcatccagcactccccatgagtcgaggtgcgagaaaatcgcctctttggtgcgatccgtggtaggccgggtacccgttttcggcgtagcaagcgccacacccttgaatcgtccagaaattacacgcatagctttcactgtacaggttcatctgcgcataccaatcgtggaaaatggcggaatctcctttcccatcaaaaaaagattgcggaccgtcctcctctattaggaaagacggtccgcaacatttagtaacggatataacgcaatacgttaacgccggatggttcccttgaatggcttatccggagacaatgcgacacgtcccatatcagtccccagaacgttcagcgtaatctccgtgggcttcgaacagcgcaacgtatattccactgtctgatccgtccatgtcgcatccacttggattccacctcttgcgcggagcgcatggaagcttccctcatgccaatcctccggcagggccggaagaatgcgaatccagccatcgtggctttggacaagcatctccgacaaggccgccgggaatccaaggttcccgtcgatctggaacggcgggtgggcgcataatccgctgtcgtacactcctccgcccagcagattggtttcagcgttcgcatccaccggccgtaggaacatgcctatgattcgtttggcgtgttccgcatcacgcagacgagcccacatgatcatgcgccatacgatgctccaaccggaaccatcatcgccacgcacttcgagggattttctcgcggcttcctccagacgcggagtcttagacgtgatgcctgcaccaggatgcagttcgtaaaggtgggacagatggcggtgctgtggatcggattcgatgaattcgtcgttccattcaaggactcttccatcagctcccaatcgcgtttcagccagttgggaacggacggattccgcttcacggaccagagcgctgtcctcttcgtcaaggttttccaaatcgtgagaagcctgaatcaaatcatcaagcagattacgcacgatggccgtggcattctcactgctttgcgcaacggataccggttctccattcaccaggaaacagttctccggtgatgttgcaggggacggggccagcccatgctttgtctccgataggaaatccatgcagaatcgcgcgttgtcccgcatga

SEQ ID NO: 940 - DNA, 9078 bp, Unknown
  R117_24m  MAG No. k141_12118
catcatgcgctttccccggatgacgccgccgccatccgcaccagacgtcgccgtaaaaccaacgacgattcgcttcagctcatcgatgatcttgtcaatcgtccgatggatccgatgttctccgactcacgactggtccatgagcatcgttcgaccttctccatctggtttaatcgcatcgtcgtattcatcatctgcgtcggcgttggctttgcctgcagcctattcgtgcaacagttgcaatccgatccgcgtaagcaggtacggcagactttggccacgcaattggagaatcgcaactcgcaaatagacgaactcaccacggacgtcaataagttgcgctcccaagttgacgaacagtccaagaaaatctccggcagcgtgaaaagcgatacgcttatccaagacgaaatggtcaatggtgccacggtggtcgaaggcgaaggaatcaccatgacgctggccgatccaatcgcggcaagccagtcggatcaatcctcctcgacgagagtcggcacctccacgaacatccgagtcatcaccgatctggatctgcagcaactggtctccctgatgttccaaaacggagccgaagccattgccatcaacggtaataggctcggcgcgcaaacctcgatacgcaaggccggcgggcatattctcatcggcatgaccgcgatacaaagcccctataccattgaagccataggcgataagagcgtcttggccgaagcgatggggaagaagaaacttgcaagtctttacgattccttcaaggaagccggtatctacccgcaggtgagcaaatccaattcgattacacttgaggcagcagtcactggcgaagtgaagtacgcggaaaggaatgaataatggcagccgttctgggactgatcatcggcgtcgtcatcggcgtgttcgtcaagccggacattccgatcatcgtgcagccatatctgccgattatggtggtcgctgctcttgacgccctgctgggtgccgcgcgagcctatttcgagcgcagcttctccgaccgcgtgttcgtgatctccttcctcgccaacgtggtgacggcaacactgctcgtgttcctcggcaaccagctcggcgtcggttcgcagctgcagacggccgtcatcgtcgtactcggcatccgcatcttctccaacgtgtccgcgatcagacgcttcatcttccgaggctgacaagggtactgacgtatggcacgtaaagcacaatcagacaacatgctggagaaaatgcgcgaccagcatgcacaagacaaggtcaacgaccggatggaaaccgggtcgttccccacggtgcgcaagaagccccggaaggatctcaaccgggccagcaacaaatcacggctactatcctcgattctcattgctctgatgtgcgcgctgctgggtttcgcctacatgagccagatcaataacactaaatccacgtacgaaacgatggacgagagcgaactggtaaggctgctgaacgagtcgaatacgcaaatctcgaatctcgagcagcgtaaaacccagttgaacagccagctcgactcactgaaatcggcggctaacgagcaggagcaggcgcgtaagatcgccaagcaaaacgaagagaccagcggcttgatctccggcagactcccggcgaagggccaaggcgtgaccatccggatcggacgaggctcgacgactaaagtggacgcctcaatcatgttcaacctcatcgaggaactccgcaatgccggcgccgaggtaatcgccatcaataacgtgcgcgtcatcacctccacctacattcaggatgccgaggaaggcttgatcgtggatggcaccaccatcaagcccacatacacggtgaaggccatcggcaatccgcaggagctgtccaacgcagtcgatatcgccggcggtgtgggcgctcagctccaggtgaaatacggatccaacgtcaacgtgcagccttctgacagcatcattatcgacgaagtacgcgaagctacgcaaaaccagtatgcaaagacggtagaataggggattatgaccaacccgattcctagcgcaggcgaaaccaccattatcggcctgcccgcgattaatgtactgcccattaccaccaccggcgatcgaccgctgactcaagaggatctggacaccatcaccagattgtccgagggaacggcattgctgatttccgccaggggagcggtctcaggttctcgttacttgcttgacgaggatgaaatcaccgtcggtcgtgatccgcgagctgatattctgctcgacgactccaccgtatcccgtcagcatgccgtgttccgcagggttaacggtcagttctttgtggttgacgcaggaagtctgaacggcacctacgtgaaccgtcagcgtgttgatcaggcgtcgctgaagaacggcgacgaaatcatgatcggtaaattccgtctcgtgttcttcacgaaatccgccattatttcccaatagtccacacccagcacggggttagactgattgcagaaattgcaatcatgtgattacaccagtgtgagtcacatgcgagacacgcatgagttaggggagtgccatgggacagacagggctgcatcttcatgtttcgcttgaggaccgtcagaatctgaacgctgacgcgattcagggggagttgttctccaatgtcgatactgaggagatcaagcgcggctaccgtggcactgtggcctccaaggtggccggcatcacgtaccgacagctcgattattgggcacgcaagcagattgttgagccgtccatcacgccgtctcatggctccggttcacgccgactgtactcgtttaaggatgtggtgattctcgctgtatccaagaagctgcttgatgccggtgtgaatctgcagaacgtgacggcggccatcggattcttgactcaacgcagcaccgatcagctggccaatgtgaccatcatgtgcgatggtcaaaacgtgcacgaatgcactaccagcgaacagatgctcgaactgttgcaaagcggtaaggcagtgttcgccgtgtcggtgggttcgttgtggcaccagattgagacggccttggaacaggaagaatatattgatcttgaggctaagccgctgacgattgccacgggccgtccgattgatgaactgactgccatgaggatgcgcaagaagctcgaggcacagcgcttgcaacgcgcaaccgcctgatacatgtatggttgttggcgacttgccggctttggtcggcaggtcgctttgttgtatgtgttgcttttgttgcctgccatcttatgtttttatatgttgcggtgattattatgactgattggaggaccgggtgaacgggattgttgtcggattgttgccgggcgttctgtggatggtcgccgtcatctttgctgtgtccatcatcactataacggtcagccgaggccatctgttcacgccgaaacgccggcgaccgccggtcgatccggtcgactggtcgatggtgaaaacgcatttcatgtcgtttgcggcggcgctgattccgtttcccgtgttgacgttcaccgcagatctgatggatgctcgcatgctcgcgttctacgaccacgcgcaattgcccggagcaatcatcatattcgtgctggtgctgctggaacttgtcgccatgtatctgcaggcacgcaacgcctcagaaaccgaaatggacaagcgtttgggcgttgcttctcaccggaataaggatgatgttgcgaagtagccgattctctgcggcgaggctaatccgcagctagatactactggttcggctaaaatcaccacatactattaaccgataacgtacgctgtgcgacagtgattcgaccggacttcaggaatggctctatttcaacggtttgaagccatgttaatcagcggtctggaccgaagcctgccaaaggtagccaaacccgtatatgacaattggctatggggatgatgcggcccacggcctcggtgtgcattgcccctgccgtgggtcggtttcatcatacccggcatccctgcccggcgagtttcgccaagctggcgtcgggcacatcgaaccacgccccgcgtttggcgggcgacaccagctccgcgcccaacccgtgccccggcgtccatctgcggacgagccccgatgcgtcgcggtccaccatgccgtgctccgacctccagaagccctgccattccggcgtctcgcggctcctgtcgaagtcgaagcagccatccctcagaagggccatgagatcgggttcgacgggttcgccggtcacagggtcgttgacgaccagactcaggtcggcggcgttgcgcctcacggcggagattcgccatgacttcggcagaccgccgggctcgaacgtcacgagacggtcgcccggcaccacgcgccaagtgtccgtcagaccgttgcgcgggtcgcggtcgggcaggtcgggcgtcgggcgcacgtcgtcggggccttggtcttcttggagtgcgatgccatgttcagccttcctgtagctgtggatggctgtgcgaggaaaggcggttcggaaggggcttggcgaaggggccggggtggcacagttttcggacctcccggaaaacgcatgaggcgtttttaaaggtggttttaacaatttgttaaatcacttcgcacttttgctcatgagttttgggaaccatggcattttgtgccacgagtggaaaatgagtcaaaactcttgtggcagtaaggctcaggcagtatttggaaccttcggggcaagatgggtgaaaagagtgctgtgccaccctctcagccctactcccataagggttttcggcatttttggggagggcgagcaccccggcgaagaggggtggcacggcggttttcgggccgaaatcgccggaacctcgaaaacgttggaacgacgccgttttcgcgctggcacagcgcttgcacagcggtggcacagcggtgtcgggccctgtttttcgacctttctccgcccgccccggagcgtcccgtcccggcggtcgcgggacagccttccgaaggaaggctggtttgatatgacaccccacatgattctgcaaacggcgctcggcatgctctacgccgcgctcttcgtcaccgcgctcgtcaggctctccgcttggctgctgcgcgtcctctccaagggccgcgtcgatctgcggtgcagttggagggccggcatgaccgtcacgctgttcacgatgttgtcgctcatggcgctctccggtctggccgacctgctggcggcgctcgctctgacactctgacgcgcacagcccaccccggcatgcgagggatgccatgtttcgacagaaaggtacctctagatggaacagatggaacatctgaacgtgaagaaactcgtcaccgcagccgtcgcctccgtggcggcgctcggcatgaccgtgccgtcggcatacgccggcgagatggggcaggcgctcaacccgccggtcgagcaggcgcagggtggctccacccgcgccgccgacgggaccgccgacaacaccccgtatctacaggtggacgggaccgaggacaggttcgccttggccgagggcagccgctacaccctcgtccaccagatgtactcgaagccggccgacacctacaccgtccgccacggccttgagcacgacgtcctgaccaaggacgcctcgcgctccaccgggccggagtaccgcgtcgccgcgggggaccgcgtcgaggccatcggcaccgacgtgttcaccggcaaatgcgccgacggcagcggcatgaccttcgagctgaccgttccctataactactccgccgcttcggagaactccgccaaggcgaccctcggcaacggtctgggcgagatcgcgctgagctatgacgacgccaagaaggcttggaccggcacgaccgcgctggccggggagccggaggcgacgccgaccgccaaggccaccgtctccgtgaagccggagggcgtggacaaggccgtcacgaagacctccgacctgaacgtggcctcctccgaggacggctccacccgccgctactcgctgacgggcgacctcggcctgttcggcagggtcgatgcgaccgccgaggccaccatcaggaagggcgcaccggtgtccggcaccgtgaccatcggcggaaccggtttcgcgctgaaggccgacggcaagggcaactacaccgcgagcggtgccgccgccgatggcaccaaacccgagcgcgacgccaccgtgaccctgacctacgctgacggcacggccatgaccctgaaggccagccgccccaacctagcgaagccgaccacgaaggacggcgcttgggtatacaagggcgagaccacctacaccgccgacggcaaggaccgcatcgacctcaagaagggcggcgacggcaattggaccggcgtcatcgacctgaagggcaaggccccggcggacaccttacaggcgtaccgcgagtggtccgccgacggcgttgactccccgctcagggagggctacgagctgacgttcggcaccgacggcatcagggacaccgagcccaagctgggcgtccgccaccacgagggcgaggccaagtggaccggcgacggcaccaccgtgaccgccccggtcaagtacgacgagggcaccgaggtgaccctctccgaggccgacggcaagggcgcgtggaccgccaccgcagccaccaaggccggaagcctgaccgactccaacgagccggtcgccaagaccgtcgccctgtccgatggcaccatgctggacatcgactacgagaccaaggtctcctcggtgaccgaccccaagggcaacgtgttcgtcaccctgaagggcgtcgccaagggcgagaccaaggagggcggcaaggtgaaggtctccgtgaccgcctaccgcgccgagaaccgcagggtctccggcatcaaggtcgagcgctccaaggccgacggcaccagcgaggagctggacgtcaccccggccttcagcgaggacgtccacgagtactccgtcacgctgccgcacgacgccaccggcgactcctacacgctgaacgtcgcgcacggcgttgacgccgacgtggaggccccgaccgccaagctgggcgggggcgcgagccgcatcctcacgcaggtgatcgagggcgtcgagtggaaggtcacggtgaacttccaagccgccgacatccagccggactccccggccaagctcaagggcatcttcgtgaactacagcggcgaggccaagaagggcaatctaatcaaggactgggacccgaaccggctcgactacacgatcagcgtgggcgagaaggccccgagcccctacatcaccgccgagtgggacgacaagctcgttgacgcgaaggccggcgacatccgccagaccgccgacggcaccgcccagagcttcgtggtgaccgccaagaccggcggcgcgacccgcacctacaccgtgaccgtggtccgcgagcgttcttggaagaccgccgccgaggagttcaagcccgccgagccgattgtgcgggacgcgaccgtggaggccgattcggactccgacaccaagctggtgtccgccggctacgagaaaggacggcaggtacacgccttcgacggacgacccgatcagggtgccggagggcggcgcgttctccgtggagccgaagaagggccagtccgtgtccatctccggcaagcgcctgagcggcatgacctacgagtacacggtcagcgtgctggcccccgacggggtcacgctgggcacctccacgtacagggtgctctacctgacctcgaagactcaggacgcgaccttgcagggcatcaaggtgaacggcaaggacgtggagggcttcgacccgtcgaagcgcgggtacaaggtgtccgtgccggacgtcgccaaggcgatggtgaccccggtgttcgaccgcacgctcggccagaccgttgacaccaagcgcgacggcgacgtggtgaccatctccgtgacctccgccgacggcctgaacaccgtcgagtacaaggtgacgctggtctccggcgcggtcgccatgagcaaggaccttgcccggaccggtgccgacgtggcgctggtcatggccgccgcgggcgcgttggtgaccgccggcgtgggcctgacactcgcggcccgcaggcgcgggaagaagaccgcgaccgaagccgtgaccgagaccgaggtcaagaacgagaccgcgaccgaagccgcgaccgagaccgaggccgaaaacgggaacgagtgaccctctcccgtgaatcgtgagggcccgcaggagtttccgaacccctgcgagcccacggatagggtttctgcttggctgtggaaaccctttgttttgccgttcctggctttatttcaacgttttctggcgtctttcgctgagagaggcgtttcgccagatgactcacgataagtcagtatagtgcgtagttaggttacgctttaggttacgcactctgacggaagggtcagggcggttatgccgaggagaaaagccatgcgcagtgcgttcggttcgatcatcagaaggaggaatcggcgtggagagattgtgcctcttctggcgcggtatgtgaattcgaaggatcctgccaagcgggtcgcaatgtcgtttcccgccgatgcgaagggccaggcccaggtgtggctggaacgcgaggaaaagctggtcgaggcgtataaaagcggggagtgcgactggggttagtccgcaggagcggaaacgggccgaggaggaggcccataggcggccgtccgtcacgtttgccgattactcgcagcggttcttggaggattaccgcacggcgtcgggggagaggccggccagtgcgacgatgcggaagaaaaaggaggccgtccgccatctcgatgaatatttcggcgacatgctgatcagagagatcggcgagagcgatatcaatagatggcttgatggtggctccatcaagggcaagtatctgccgtaccggtcatggaaccgtccccgcgcgtgggggcgggcccgacggttcatgggaacggccgtccgcccgtcgttcctga

SEQ ID NO: 941 - DNA, 7431 bp, Unknown
  R117_24m  MAG No. k141_12226
ccgctgaaggacacgctgaaggtgcaggccgtgaacgtcggctgccaggacaccggcgactacgcatacttctgtgatttcgtggtgcatcgcatccagaactccgaagaattcggcaagactcgtgcggagcgtaacaagttgctgcaggagggtggcctgaagatcgtcaccacgttggatgtggaagcgaattccacgatgatggagaccgcgcgtaataccattccaccggacgatcccagcggcatggaaatagccatggccgcagtcaaaccgggaaccggcgaggtgctgagctttggcctgaatcgttactatgacgccactccggcagccgcgaacgatccgaccaagtcgggccagaactatgccgtcgatctggtggacggcggcggctccggttggaccattggttcgtcttggaagccgatcaacctgattgcgtggatggaagcgggccattccatcaacgacaacctccagacctcgacgtcataccccactacggacttcgcctgcagtaactattcgggcggtgccgattcgtggaacgtgtcgaacgccaggggcacaggtacagtgaacccagaaagcccattcctcggtctggtccgttcgcataacactactcaggcttccatgggtgccatcctcaaactgtgcaaggtggcggacaccgcgactgaactgggataccatgacgccgccacgggtgagaccatcgacaaaacccaggtgtatacaccatccatgatgatcggctcggtgaatgtgtccccgctgaccatggcgagcatcttcgccgtatacgcctcgaatggtgtgcaatgcaacccgattgccatcagcaaggtgaccgataaggacggcaacgatctcaaggttccatccgcgaactgccatcaggcggtggataaggacatcatccaaacactcgcttataccctgaaccaaggtacggtgcggccggatggtgccggttggtcattcagattggctgacgggcgtaagacgtttggtaagaccggtaccagtgaggatcttgcggtgtccggtggatcgttcattcctaatcagattgcggcgttcgctgtggtcggcgatgcacagaacccgtacaccaaccgtatttccaacattgccatcaacggccggtacaacagctattgggatggttcgacaatcgcgggtccggccgttaccaacttcttcaatagctacatttccaagaagaaaataccgattgacaacgattacggccagcccgtctcgaagtacaccacgactggcaagtatctgggcattggcggacgaacgttcagcgtgccgcagaccactacgaatggcaacagccaatcgcagacgaccaccaatggtcaatcccagtcgcagtctcagtcgcagaacactgggcaaaacaacacccaaacccagggcaccaattcagagcggtcgaatgatggccagtgattggtgattggcgtttgacatttggtgattgcaggccggctgagtctacgtaacatagtcgactgcgatacccaaattacgtagtttgcgggcgttacctgtttcaggtgacgcccgttttacaatacttaatgacaacgccagcgcgttcatcgaatattcgccatgaacgcgcattggaaaggggaacgatgagcaacgacgatctgacgcatgagaattttgattttcgtggattcgacgtgccggatctcaaagcggtgacgctggcttcgtcttcggacggcgaacagtccaagcagccgaagaccaagcacgaggatgcatcgaggaaccgtaggcacggtaagaagaagtcaaaatccgacgcacggtccaagaagcgggccggcgcgggcaagacgagcgaatcgtttgatgattatgaggattatgaggattatgagggaagggaagctgtgagcaaggcagataagaaagccagcaaggaccgtccgggactgtttgcgccaatgacgctgcgcgaagtgaccgtgcgtaatcgtatttggttgccgccgatgtgcacgtattcgtcgttcgcctgcgatggtaggcccacgccgttccactaccagcattacgtgtctcgtgcgttcggcggattcggcatggtgatcgtcgaatccaccgccgtggctcctgaagggcgtatcacgccgtgcgatctgggcctgtgggaagacgggcagattgatgcttggcgctggatcgtggacggtattcgcgaggcgggtgcggtgcctgccatccagctcaaccatgcggggcgtaaggcttcgaccggttgcttcgccgttggttacgacggtcagagtgtgccggaggaggcgggcggctggcccaccatggcaccgtctgaaatcgcgttcggcgggctgcgtacgccgcgcgcgctgtccgtggatgagattcatggtctggtcggtgcgttcgccgcggcggcgggccgtgcggtggccgccggctttcaggctattcagattcatgctgcgcatggctatctgatttctcagttccttgacccgctgagcaatgagcgtgatgacgaatatggtggcgatttgaccggtcgctctcgtttcctggtcgaggttgtggatgccgtgcgcggggccgtccccgagggcgtgccggttctggtgcgcatttcggccacggattgggccgctggcggttgggatttggatcagaccattgcactatccaaggtgctgaaggagcatggcgtcgatgtgatggacgtgtccactggcggcatcatgtcgggagtgtcgattccggtcaagccgaactatcaggtgccgttcgccgagcaggtcaagtccaaggccgatattccggtgaccgcggtgggtcttatcaccaagccgaagcaggcggccaagattttggcccgtggcgaagccgatgccgtggaaattggccgcgccgcattgcgcgatccgtactggccgttgcgtgcggccaacaagctgggcataccgtccacagaggtcccctacgccccgcaatacgtggccggtgcgtactgaatcctcatggggcggtgactttcccatggggcggtaaaaccctcatggggcggtaaaaccctcatggggcggtaaaaccctcatggggcggtaacccaaaacggcggtattctgcggaatgtgaaatttggctaaccgccccatgggacaatcaccgccccatgagggttttaccgccccatgggtaatagggcaatatgtgagttcactccacgtccacgccgacggcgtcggagacgtgctcgaatccgtcgcggcgcagcagctgggccagaccgcgcttcaacacggtgatctgctgcgggcctcggtacatcagcgagctgatgaacatgaccaggctggagccggaacgaatcttcgcataggcttgctcgggggtaaagacgccaccgatgccggcgatggcgaaccggtcgccatactccttatacaccttgcgaatcagctcggtgctggcgttggtgcacgggccgccggacaggccgccctcccaatcgcgcggaatctcgaggccggtgcggtccttctgcagattggcgatggacagcccctgcacattgtgctcggccagcacatcgagcagctccttgtactcgccccacggcttgttcaacggcatcttgaccagcgtgggctgcgggcggtcgatcttgtcgagcgccgtaaacagacggtcgagcgcttccggagtcgcggtgaacggttcgccgacgcgcgtgttcgggcaggagacgttgacctccaccatcgcggtgcggccggcggcgcggcgcatcgaaatgcagtaatcctcaatgccttcgtccaaatcgccgcactggtcgtcgttggtgcgggcgatcgacacagacagctgcatctggcgggcctgagtccaagccttctcggcgcgctcgatgaccttgtccgaaccgatgttggcgaggccgacgtgcaccatcatcgaatcgtattcaggcagacggtggaaccacggcttggcgttgcccgggcagggacgcgaggtggtggagcctacggtttcaaaaccgaagccggcatggtccagcaccacgggcatgtcgcagttcttgtcgaggccggcggacaggccgaacgggttggtgaaatcgacgcccatcacattcgtttccagaatggggtcggtgtagtcgagcatcagctgctcggcgagcagcagcggcgggacgttcttgacgacgtggcagaactcgatcatctgatcgtgtgcctcatcggggcggtggttgaacacgaagttcggtttgatgatgtgcttgtagccgaaggtgaacagatcggtggtggctttgttgacggcgtcgtgccagaagctttcagaaacgtaagtcataccgcctattgtctcacgcttgggctggtgcggctaggcgattcctgcctaggcgaattggggaaggggctaccgcgtgtcgaggcgcacgcaggcgtcggctcggcagaagatacatgaatcgggatgcaccaggtatcaggcgtgactcgccgctgagcaacgcgctcgggagagtcgtcggtcgtgagtcatcgcgctagtggtcgctgcgagaatatcggttcgcacaatgtgcgattttgcgcggttttgtggaaatgaacacctgaattgcccggaattttcgagagattgtccccaaaacgctcaagccggtttggtttgtgagcttttgtgtgcgataatgttcacatgatttcgtcacaacgtcagcacctcatcttgagcaggttgcgcacgcgcggggcagtgcgcattacggcgctatcgaaggaactgggtgtgtcagcgatgaccatccgccgcgatatcgccgaacttgccgacaagggactgctgaagcgcgtccatggcggcgcggtgactaccagtaccttgctcagcgaacccctgttctctgtcaagtcccagatggatctcggcctgaaggacgccatcgcccaggaagccatcaaatatgtggctcccggcgatgtgatcgccatcggcggcggcaccacggcctatgtcttcgcccagcatctgctcgaatcgcagcagtccagcggcatcaccatcctcaccaattcgattcccgtggccgaactggtccaggccctcgaatccaaggacgtggaggtgatcgtcaccggcggcgtgatcacccgatcgaactcgcttgtcggtccgatcgcggacaaggtcgtcgcctcgctgcgtgtcaacaccgtattcctcggcacccactcggtgtcgattccccgtggcttcctgatgccgaattcgctggaagccgcaaccgatatggcgatgatggacatcgccgatcgtaccatagttttgaccgatcacaccaagtggagctgcacatcgctgtcgctgtttgcgcgcttcgaccaggtggacacggtcattactgacgacgggctcgatcccgactccgccgccaaaaccaaggatttggtaaaggaactcgtgctggcccaccagagcgagatcattgaggaaagtgagtaaacccatggctgatttcgccaactacacccccggggagtatgcgaaggagcacatccgcatcacgccgacgacgcttgccgacggtcgtgacttcttctacctggacgacgaccccgagttcgtctccggtgccaagacccgcgagctcaaggacccgcgcccgctggactaccgtttcgccccgcacctggacgccgacggcaacgaagtgccgtacgccgccccgcagatgcgccgcgacccgctgaccggcgactggatcccgatggccaccgcccgtatgaaccgcccgattaccgccggccccggcgctaccgccaagggcaacccgctggccgcccgcaagcccggtgacccgtaccaggacggcgaagtgccggacaccgactacaacgtcgtcgtgttcgagaaccgcttcccctccatggtgcgcgtgcccggcgtctccgaggacgtgacctacgttgacggcaacccgctgtgggagaagaagctcgccgccggccgctgcgaagtcatctgcttcgacccgaacgaggacggcctgccggccgatctgccggtctcccgcctgcgcaccgtggttgaggcttgggccttccgtaccgccgaaatctccaagatggaaggcatcgagcagatcttcccgttcgagaaccacggccaggaaatcggcgtctccctcgcccacccgcacggccaggtctactgctacccgttcatcgccccgaagatggagaaggaactccagcacaccgaggcctaccacgagaagaccggcggcaacctgcttaaggacatcatgaacgccgagctcgaagccggcgaacgcatcgtgatgcgcaaccacagctgggtcgcctacgtgccggccgccgcccgttggcccctcgaggtccacgtggctccggtgcgcgacgtgctcaccctcgaccagctcaacgacgaagagcgttgggacctcgcctccatgtactcgcacctcctgaagcgcggcaacgccttcttcgacaagggcgacggcaagggcatggatctgccatacatcgccgcctggcaccaggccccgatccacgacgcccgccgcgagaactaccgcctgaacctgcagttcttctccttccgccgcgccgccaacaagatcaagtacctcgccggctccgaatccggcatggccgcctggatctccgacaccacgccggaactcatcgccaagcgcttccacgagctcggctccatcgacatcgccgactgatagaaagataacatcaatgactgctgttgaattcattgagccgctgacccatgaggaaggcgtctcgcaagccaccaagctgtttgtggacacctacggcgctgcgcccgagggcgtgtgggctgctccgggccgtgtgaacctgatcggtgagcacaccgattacaacgccggcctgtgcctgccgatcgctctgccgcatcgcaccttcatcgccctgaagccgcgcgaagacaccaaggttcgcgtcgtctccggcgtggctcccgacaaggtcgccgaagctgatctcgatggcctcaaggcccgtggcgtggacggctggtccgcctacccgaccggtgtggcctgggcgctgcgtcaggctggtttcgacaaggtcaagggctttgatgccgccttcgtctcctgcgtgccgttgggctctggcctgagctcctccgccgccatgacctgctccaccgctctggctctggacgacgtgtacggccttggctacggcgattccgacgccggccgtgtgaccctcatcaacgccgccatcaagtccgagaacgagatggccggcgcctccaccggcggtcttgaccagaacgcttccatgcgttgcaccg

SEQ ID NO: 942 - DNA, 19888 bp, Unknown
  R117_24m  MAG No. k141_12274
acaacggcgctcccggtccgcgcccgtaccatcccggctattactccgcattcgtgctggacccggatggcaataacatcgaagccgtcgtggattgggctcattcgaacgagtaaaaatcatatccgtatcgtgcctcagacggcatcgacggcgtgggctccagtcagtcggatttgtggtcgcgacggcgttataggtcacatcacgcaagcgtgacggtggcggtctgctcggcggtttcggtgccggtccatgtaccggctttgcggttccaatccatgccgtccgcgtgcagtgcgtcaatgccgtattgacgtgcatgcgtgaccagccagcctgccgtctgccagcaaagtcgagtgcggttgtcggcggacaggccgtccggcagcgtgatcgtcaacgttgtgctggccgtattggtcgcagcaccgttgttcgtgccggttttgccatttgggggcgcaaccgagacgctgacattcggcagtgtaccgcctatggcggcaaccaacccgtccgcgtccgaggagattgctggctccaacgcgcacgtgacgtccgccgaccgttcaccggtcagccccgaggcccaagcgcgtgccatcgcatcccatgtggcatatagttccgggtagcctgagcgctgcacctcctgcgcggcgtcctccaccggaatcgtctcccaatccggcacctgcagcagatggtcgtagaagatgtttgtcgcataggtcatgtcggacacctgctccgccgtgccccagccttggctgggccgctgttggaacaggccgagcgaatccaagtcgccgtagtccagattcgtcagcctcgactcctgcatggccgtggcgatggccaccgtcgccgcgtgatccggcagtccgcgcgtgacggcgatgttcgcaatcagcgccgcgttctgcgcctgatcaggcgtcaaggtgcggcgggctccgtcgggcgacaccgccgcgcaatatgcttcctcggccgtgcgcgcggtctcgtgaggcgtgaatagccgtggcagcagcgtccatgccgcgatcagcgccgcaacaacaagtatgacggctgcaatcagcgcgcccgcgccatgggagcggcgtctgccgcaccgcacctgttgtcccattgcgcctccaatatttcggtgtcatggctgaccgtgaccggctggcctatgcagcatgcgagatttgccgtgttccggctcggccgtcatcatgacagcgtggcatatccacctgaatggcggctgcgccatcacgcgacttcgtgacaattcttcacgcttcatgacatccgcgcaatcagaccggggaatgatacgccgacatctgtattgcaaggttgacgcggctgataagccgattcgcaatcgtctatctgtgtttcaaggggctgatttgcttgttccgagacatccacttccgtttcgaggggctgatggccgagtagcaacagctccaaaacggcgaaatgacgttggcatgaagccattcgtacttgggctttggccaatgaccagccccttgaaacggaagtggatgtccccaaaccacgaaatcagcccctcgaaaccgagaatggcggtcgggattgctccgacaccaggggagctgctgccgctattgtgtgaaaggcgatttgtaccgggttgaaggagaggaacacatggcacaattgcagccgtactgcgcgattgagggcaatgatgatggattgcccgtcgtgttcgtgcatggcatgggtgtggaccatcgttcgctgatgatgctcgacaaggcgtttgacggcaatgattcaattcgccgtatatatctggatctgcccggtttcggccgtacgccggcattgcccgagcatgcctgcgggctgccggaaatggcggattggctgcaaacggccattgacggccttgtcggtaaagcggctccattcgccatggtcggcaactcgatgggcggtgcgcttgtccgcgaagtattggcgcgcgaacctcgccgagtggccggtatggcattgatcgcgccggtcgtggacccgcagcatgccggccggcatgtggccgaacatgtggttgcacagcccaatcccaagctgacgcactccttgccacaggaacaggtgttcgatttcattaccatgggcgtcaaccagtcattcgacgcgtggcggcgctaccaacggttcatcctgcccggcgtggcgttgtgcgaccgtgcggcatgcgaacggctggatcagcgttattggctggccgataatcccgaggaaatgctcggcacatatgcgggtccggtgctcatcgtcaccggcaagcaagaccagatcgtcggatacgaagaccagcaagccctgttgccgcactatcccaacgccaccttcgtgactctggataatgccggtcacaacgcgcacatcgaccaacccgaagccgtcatcacgctcgtgcgcgaatgggtggctcatatggcgttcgttccgttgagctgacggtctgctgacagtctgccgaagcctatatgcatatgagcgaccaatgccggttgacgcaatacgccttgcaaggtatatcgtttttcgatatagtcatatcgatgttcgcggtgtcgccaaaaacgtcggcacctgaaaggaccgggctatgaaaaactacatgaaccgatgggtgttgctcgcgttgaaagccatcgtgattctggtctggctggcctgcctatggggccaactattcgccgtaccgggattgagcggcgcgctggccggcctctgcccgagccagacgtcgatgcactggtcatatctcattatgggcgtgctgttcctgctctgcatcgaagcggcgttcgtggccgtatggaaactgttctccttgtccggatcgggcgcgaacttgagcaggtgatttgagatgacgattcgcatcaatctcgacgtcatgatggccaaacgcaagattggcgtcggcgagctcgccgaacaaattggcatcacgcctgccaacgtgtccattctgaagaacggacgtgccaaagccgtccgcttcaccacattggacgccatctgcaaggcactcgactgccaacccggagacatcctcgaatgggaagatgtcgattgatcgacacgccaccggctcgaactcatggttcaacttgtagtctctctcaaaatcaatgatgccctatcatcctgcaagacgatagggcatcagcatgtgattatgcgcagctgatatgtcgcgttgttatcactcggcgtccgcggccggtgcctccttgggcgcggagaggaagtgctcctcgctgggcagcacggcgttcaggattacggccaccacgaacgacacggcgatgcagttcgaggcgaagatttgttggaacagtgccgggaactgcgcgaagatgtcgctcacctgggtgaagccgatgccgatggtcagcgaaagcgccgcaatcgtgatgttgcgctgcgtgaagcccgcttcggcgatcatctggaagcccgaaagaatgatgttgccgaacatcatgatcgtgcagccgccgagcaccgcctgcggcagcgagttgaacacctcggcgatggccggcacgaagctcgccagcaccagaatcagtccgccggagagaatcaccttgcggttgacgaccttggtcatggccaccaatccgatgttctgtgcgaacgaggtcagcggcaggcatccgaacaggccggatacggtggagatcaggccgtcgccggcgatggcgcccgcggtctcgcgttcggtgggcgtacggttcaggcccaccttggtcagcgcggcggtgtcacccagcacctcgaccgaggagacgacgtagagcaggccgatggagatgatcgaaccccagtcgaactcaggcttgaacggcatgaactgcggcacggacacgatggcgaggttctggaaaccggagaaatcgaccttgcccatgcagatggccgccacatagccgaccaccaggccgaacagcacggacagctgcttggccgtgcccttcatcaacagctggaacgccaggcaggcgaccaaagatataagcccgagcgtcaggttctgccagcttccgaagtccttggctccgctgccgccgccgaagctcgtggcacccacgttaagcagcgagaagccgatcgacgtgaccacgatggcggagacgatgggcggcacgaaccgacgccaatacttggccgtcaaacccagcacgagttccagcaggccaccgaccattaccgcgccggccactgcgccatagcccttgtctgcgcagatcgccacggcggccgccacgtaggtgaaggagatgccggtgaccatcggcagacgcgagccgatgagccacgcgccgtacagttgcaggcaggtgcccaggcccgccaccagaaggccggcctggatgatggtggccgattgggccggggtcattttcgcggccgaggcgacgatgaagatcggggcgaggttcgccacgaacatggccatcacatgctgcaggccgaacggaatgcccttccagaaggatactggcgcgttcagcgaagacagcgcctcaaaggatacggaattcttggttttcttctctgacatgattcttttcttcgctctgttgctcccgctggcgggagcagtcaatgtgctcagtgcctaaatgtgatttcgccggtctcgggattcatggactcgacgatggccagcgaatccacatcgtagccttcggcacgcagcgcgtcaccgccgccctggaagcccttctccacggcgatgccaatgccctcgaccgtgacaccggccgcctcgcacaggtcaatcagaccgcgcaacgccttgccgttggccagaaaatcgtcaataagcagcacatggtcgccggcgttcagatacttcttggccacgatcaccgggaactccttctgcttggtgaaggaatagaccgtggtggtgtactggtcgccgtcaaggttgatggactgcgccttcttggcgaacaccaccggcacattgccgaaatgctgggccgccacacacgcaatgccgatgccggacgcctcgatggtcagaatcttggtgatgtgcttgccggcgaaatgagcggcccatgccgaacccatgcggtcgaacagacgcacgtcgcactggtggttcagaaacgcgtccaccttgagcacatcacccgccttcaccgttccctcgctctggattcgctcctcaagttcctgcattagacctcccattgctgtatgtcagtgaatgatatggatacttgtaagtgtacgttgtcctgcgctgacccgtgcatgtggtaaacatgaatgtcgcgattcaaagggaggcaacagtgtacgacgagccggaagtcatcgcacgcagcgcgcaggaactcgtaggcgatctgaacccgcagcaggcggaagccgtgcaataccgcggtcaggcgctactgatcggcgccggtgccggctccggcaaaacccgtgtgctgacccgccgcatcgcctggatcttgagccagttcggcgcatggccgagccagattctggccatcaccttcaccaacaaggccgccgccgaaatgcgcgaacgactcggctcgctgatcggcccggtggcccagcgcatgtgggtctccaccttccattccgcctgcgtgcgcattctgaggcgcgacggcaagtccatcgggctcaagtccggcttctccatttatgattccgccgactccgagcgactcgtcaaaatcatcgccaccgaattcaacctcgacatcaagcgctacactccacgctcgatcctcggccatatctccgacctcaagaacaatctgaccggttggaaggaaaacctcgccgttcacgcgcccgacttcacgcctggccagcgcggctaccagttcggcacggtgggcgaccttgaagccatctatgcggtgatctacgccgaatacgagcatcgcttggccctggccaacgccgtcgacttcgacgatctgatcggccgcacggtcgagttgctgcgcaccgacccggccgtcgccgagtactaccatcaccgcttccgttacattctcgtcgacgagtatcaggacaccaaccacgcccagtacgtgcttgtgcgcgagctggccggcgtggacacgggggagaaggccatcccgggcgcgccgaacgccggcaagtccggccccgcctggatcaccgtggtgggcgattccgaccagtccatctacgcgttccgtggcgccgacatccgcaacatccaggacttcgagcaggacttcccgaacgccaagaccatcatgctcgaacagaactatcgttcgacgcagaccattctggacgcggccaacgcggtgatcagcaacaacgagggccgcaagcccaagaaactgtggaccgcgctcggcaagggcgagccgatcgtcggctacgcggcggacaacgcccagcaggaggcccagtgggtggccaccgaaatcgcgcgcctgcacgccgaagagggcatctcctactccgacatggcgatcatgtaccgcgccaacgcccaatcccgctcgctcgaagaggcgctgatcaacacgaatcagccgtatcagctcgtcggcggcaccaagttctacgaacgtcgcgaaatcaaggatgcgctggcctatttgcaggcgctcgtcaatccggacgacgatgtgaatctacgtcgtattctcaacgttcccaagcgcgggcttggcgaccgcgccgaaggcgtgctgctcgcctacgcgcgcgagcatggcaccagcttcttctacgcactcatgcacttggatgagatcgaggtgccgacccgcaccgccacctcgctacgagcattccgcgatctgatgggcgcgctctcgcagttcacgcacgcgcacgactccaagcccagcgagatcgtggccgaagtattggagaagtcgggcttaagggccgaacttgagaaatccgtggatccgcaggacgcctcccgtctggagaacctctcccagctgcagtccaccgcagccgaattcgaacagaacacgcctgacgccacgttgtccgcattcctggagaccactgcgctcgtggccgactccgaccagctgcccggtgaggcggaggactccggcaaggtgacgctcatgaccttgcacaccgccaagggcctcgaatacccggtggtgttcctgaccggcatggaacagggcaccttcccgcattcgcgttcgatggaagacaccactgaactgcaggaggaacgccgactcgcctatgtgggcatcacgcgtgccaagcagagactgtatgtcacgcgcgccgccgtccgctcccagtggggccaggccgccgatatgatgcccagtcaattcctcgacgaaattccggattcgctgattgattggaaacgccgtgaagccggcgtggagcgtatgcgcgccaactgggagaccgatggattcgccgacgatttgggcggctgggatgatgacgatttcggcggtgccacgtttggtgggtcgtcgacgttcggctcgcgtggttcgtccggttcgggttcgtcctatgggtcgcggtcgcggtatgggtcgtcgtatggctcgggttccggctcctcgtcgtatggttcccgttcaggttcttcgtacggttcccgttcatcatcatatgattcccgctccggctcgtcctcctacgggtctcgctcccgttcggggtcgtcttacgggtcgcgttcccgttccggttcttcatccggttcatatggcggcacccgtggcggcaaggtcaccacgcgccgcaccacaccgaaatccggttcgaccggctctgccgtgcccagctcgaagctcaccaaggacaatggcctgaatatcgccgacttcgccgtgggcgacatgatcagccacgaccagtacggtctcggcaaggtcaccgacgcgcaagacaagggccgcaattcggtaatcaccgtggacttcggctccgccggcgtcaaacgcctcatgctccgcgtagcacctattgagaagttgtagatagattggcccctctgacgaggggctgagttatataccaaataaattcacaaaaaacaagacttgtgttcttcatcactatctgggcataatgcggaggttgcgcctacgagccctgggaacaggggagaggaaaaagtagttatgaagaacaagctgtttgcatccgtgcccaatattctgttcggcgcgctgatcaccatcgcgccccagacctttgcgcacgcctgcaccggccatgacatgccgggtgcctgccactactcgcagcaggcggccaccggcatcggcgtcgtcatcctcgtgttgggcgtcgtggctttgttcgtcgccccgcagattcgcatcggcctcaatatcgccgccgcagccaacgccctgctactactcgccgtacccaccttcctgatcggcatctgcaagggcgcgatgatgcactgccgcatggttatgctgcccacgctcatcgtgctcggcgtgctcaccatcgtgttcgcggccatcgccatctggctcgactctcgcgccgccaagcgcaactgatcgagcagacggccggagcccagccattccgaacgctggactccggtctcgcttattgcaaccgcactataagcaacataaggactcatcgtgccatcccatatcgcattgcgcggccttccgattgaaaacctcaaacgcaagccgttccgcaccggcgcactgctctccgtcgtcaccatcctcgcgctgacgttcttcggcggcaccatgctgaccatgaacctcaacaccggaatgaccagtatggagaagcgcctgggcgccgaccttatggtcgtgccgcaaaacaccgcgcagaaggctgaagcgctgctcaccagcggcaatcccagcactttctatttcaccaaagacatcgccgacgaggtcatgcaggccgacggcatcgcacaggccaccgaacagacctatatatcatcgctggccgccgcctgctgtgccgaaaagctgcagatcatcggttacgacccggacactgacttcgtcatcgaaccatgggtcgcatcccagttcgaaggcccccttgaagacggtcagatgattgccggcgcaaacgtcaacgtgtccaccgacggcaccatcgaactctacggccataagtggccggtcgtcgcccagctcgccaacaccggcaccagcctcgacaattcggtgttcatcaaccaaaacaccgtgcctgatatggtcgccgcctcggccaaggtctccaagcaggtcatgcccgccgaatatgcaggcgaagccgtctccaccgtgatgatcaagacgcagcggggttacgaagcgcagaccgtggctgaaaacatcaagcgtcttgactcccggttcgccgatttggggtacgtataccccggcggcatcaccgccaacaccagaacttcgctgaccgcgcttgtcacctacctcaagattttcgtggcggtgatctgggtaatgggcgtgattgtgctgctcgccgtattcgcctcgtcggtgaacgaacgcaaacgcgaattcgcgtccctgcgcatcatgggcgccacgcgcggcatgttgaatgccatcattctgaaggaatccgccatcatcggtctgatcggtggcgtaatcggcgtcggcgcggccagcctggtgattttcccattcagttcgctgatcggcaaacaacttcaattgccgtatctgcaagccagcccggttgcggtgatcggattcattgccgtgaccattgtgtgctctacggtcatcggcatcatcggttcgctggccaccatgtggcgtctcggccggcccgaagcctacctgaccctgcgagagggggagtgatatgactgagacaactacgccgactcagctgaccacggttgagccgaccaagctccagccgaccacgccagctcagccgaacgcgccgactgcgccggattcgccgcacgtaaccgagacgccctccccggaccatctgctgaccttgacggacctgacccgccagttcgtccgccgcggcacgccgttcgacgccgtcagccacgtgaacctcaccgtcgatgccggcgaattcatcgccatcgtcggccggtcgggcaacggcaaaagcacgctgatcaacatggtcgccgggctgattcgcccgacctcgggaaccgtgagcgtggctggacgcaatgtggccgacttgggcgataaagcactgtccgtgctgaggaatcgcaccatcggattcgtgacccaaagccagaccctgctcggcaacctgaccgtgctcgacaacgtgattctgcccgcaacgatgtttccggagccgctgccgtttgcccaaaacgcagaagcaacggatgccgttgctcaggtggacgctgttgcgtcgaccgatgccgtggcacaagccgctgccaccaatgatgaagcagccgccgacctgttcatgccggatgtcattgcgccaatcacagaccgggaaaacacgccgtcaaacacggctgcgagccgtccggacctgttcgccacccgagctcgcatgctgctcacccagcttggtgtcgccgatctggcagacagctacccgcgcgagctgtccggcggtgaaatgcggcgcgtctccatcgcccgcgcgctgatgaaccagccgagcctgctcatcgccgacgagccgaccggcgacctcgaccaggagagcaccgacatcgtaatgcgtctgctcagagaccaagccaacaacggcacggcgattctcatggtcacccatgatcccgatgcactcgaatacgcagaccgggtgtatcgcatggacgccggagtgctgtccatagcctcggtgtaatatggtctgctggtgtctgccaacaggtagataccgtctggagtcatagcccatcagcgggtcggcggtaggtgatcgcaagaaaaccaacccgttcgtgttcgttcacgacgaagcgctggggaggcccggctcagcgcttgccaggcatatgcaaggcaagcgttccgttcagataacgacagaaggattaatccaatgacgaacgttcagcgttctcgccgtcaggtgcgtctgtctcgcgccctcggcatcgcactgacccccaaggctcagcgcatcttcgaaaagcgtccgtacgctcctggcgagcacggccgtgaccgccgccgcaccgagtccgattacgcggtgcgtatgcgcgaaaagcagcgtctgcgcgctcagtacggcatctccgagaagcagcttcgcgccgcttacgagaaggccacccgtactgccggccagaccggtaacgccatgctgaccgacctcgagacccgtctcgacaacctggtgctgcgtgccggcttcgcccgcaccaccgcccaggcccgtcagttcgtggtgcaccgtcacatcctcgttgacggcaacatcgtggaccgcccgtcctaccgcgtcaagcccggccagaccattcaggtgaaggccaagagccagaccatggttccgttccagatcgccgccgaaggcgtgcaccgtgacgtgttgcctgcggtccccggctacctcgacgtgaacctgccgtccctgaaggccactgtgacccgtaagccggaggtcgaagagatcccggtgcaggtcaacatccagtacgtggtcgaattctacgcccgctgatccgggccctctggtcaacaaatccaggacataccgctcgaaccccgcgcttctttcgagaagccgcggggttcctgcgttatagggcgattactggccgcacaccgcctgacgaatcatcgtcgcgtacgcataggcaccggtcatattcggatgaatgccgtcatcgttgaggtattcgctatgaccttcgctatacccatgccaatcgatgatgcccacgttcttgttcttcttggcggcctcacgcagcatcgtattgttgttgttctcctgccacgggtatggcatacggatggtgatgaagtatgtcggcttgccgccggtcaggtcaatgagctgttgcacttcctgctcattcgaaatcacgccgttcgtgccgaggccaaacaccaccacactgccactgtggccggcagcggtgtcctgctgatacacatccaccgcctgcggcatctgacggtttggcaggccatcgataaaagcgttcgggaatgcggcctggatggcgtccgaagtacccgacgtcactgaatcgccgaccatcatcatatccgcgttgcagctttccgttgccggatcataggcgtacttcgaaatgtcaagattgtttggcaccttttccgcaatcggtttgatggtgggcggctgagaatccgaaccgttcttattcgcgtcagcggtattggtttcgccgttcgcggcattcgtggcagaagactcgggctcgggtttcgccggtttcttgaccggcttggcgggtgccgcgagttcggggcgcagctgaatggctcgcgcttgagcgatgccattccaatccaccggtgcccacgtcagcaccacaacggtcaccaatccgataaccgacatgacccacgcgcccgggcgcagctggtagccggctttcggcagcggcttggcatgttggctgcgaggcatctgcaccgatttacgggccgcctcgaccagctggtagaaggcttccgacgccgccaacaccacgatggcctcaagaacccaaccccaccacggcaacgcctgcgttcgtgtcgccgggttcatgaactgcagcagcggataatgcatgacgtacagcgagaacgatcgcgacccgatatagcgtaggggagcgcaacccagcacgcgcgaccagattgagtcattgttcacggcacaggccaaggcgcacaacgatatgaacgcggtaatcaggtacccgccttggtacatgtacgacagatacccgttggcgaaccagaatccggccagcagtgccgccaaagccgcggtgccaagaacattgcagacgatagtgagacgggcgcccgtcttgtcgccggcctgacgtccgatctgcactgtttgcgaagccgctccagcttccgcaacttccgtacctcgcgaggaaggcgcaatccagatagccaacagcgcgccggcggccagctcggcgagacgagtatcggtaccgtaatacacgcgggaggtattggccgggtcaaacagcagcaccatggcggcggtggaagcagccatgatgacaagaatcgccatggagcgcacccatttggacttggtgattttgccgagcaccaccatcagcaacggccaaatcagatagaactgcatcgtcacgcccaagaaccacagatgggtcagaggagaaggcaatccggccgcctcgaaatacggcaccttgcggaagatgtacacccaattgctggcgaacaaggcgctcggcagcgaatcggaaaccactttctgcaacaggctgggagcgaacatccaagtgagccaaggcaccacggcaatggtcgccagcatcaccggccataaacgagtaatgcggcggatcagatatcggccatatccaaaggacccggtgcggtccaccatgttcagtactgaacgtgtggcaagaaaaccggtgataacgaaaaacatcgtcacgccaatgaatccgccctgcaatagcgacgggcgggtgtggaatgctatgactccaagaatcgccagagcgcgcagtccatcgatacccctgaaatgggcaggctcagacgattgagatggtgcaggtttcgaggttatgctcatagtaccctaagtgtactctcaggaatcgtcaggtatactacccggattacgcatatctcaggtagtgacctatgccgttatgacttatgacttccggcagcccgcaccgaaaccgccggaatggtgacataatcggaaccatgattcttcatctgcatttggtccgtcacggacagacctatttcaaccgatacaaccgtctgcagggatggtcgaattcgccgctgaccgagtcgggcgtcgctgatgccgtcaaggccggtgagcgactgaaaggattgacgttcaccgccgcctactgttcggacaccacgcgtgcccggcagacggccgagaaaattctcgacatcaacgaagccgcgggtaacccgcgccccgcactcgtgacggacatgcacttccgcgagcagttctacggctactacgagggacttgacatggccatggcctggtacgccgcgggagcgcctcacggcgccaaaacctacaaccaaatcgtcgagaagttcgggttgggggcctcgcgtgattttctcaaggaagccgatcccttccacgatgcggaatccgatgaggaatattggacgcgcgtcgaaggcgcgttccgtcttatcgccgacaacccgaatctcaaggatggcgacgatgtgctgcagatttcgcatggcaacacactgcttagcctcggccaccggttcggcggccctgacctcgatctgaacgaacgcccggccaatggttcggtaaccgtgctcgacttcgacaccgacaagccgttcggcgaggccgtgaccatcgtttcgtacggcaagtagcaaatagcaagcaatacatatcgaatagcacgtacggtccacggcggcacgccgcaaacgaaagcgtcagcaggacacctttcgcctatagccgcatgcatccacgcgcacggttttcgccctgcgcgtgcaatggtatgccaagaaatagggaaggagtgctacccttaggcgagtaagtgtgaccgcaaggaggaaacaatgggagtcggagagatcgctggcctgatcgcggccatcgcgttcgcagtattggccggtttcatgatctatccgctgatcaggctgggcaagatgtttgatcagatatcgcagacggtccgggagtccggcgaacacgccatccccgcgctggacgaaggcgtgaccaccgtcaagcaggtcaacaagtcgcttgaagacgtgaacaagatttccgccgcggcttccaccaccgccaacaacgttggtgcgttgactgatctgtatggctctttcctcggtaagcccatcatcaagatcgcttccaccttctacgcgctgaaaaccacgggtcagtccttccttgcgaagaacgccgcgaaaaccaccgtcaacgacaccgccgagaagggggagtgatgttcaaacgcatcttctgggtcggcgtcggcgtggccatcggcgtgatggtcgtcaccaaggcgcaggcctacgtcaaagccaacacgcctgatgcggcccggcagttcctgcttggccccgatcaggacaatgtgccgatgaaaacactcgaagggttggttaacgagttcaatgccgcccgtcgagcccgcgaggctgagctcaaccgtcagtacatcgaacgcgccaactgacacgcgcatgccgccttgccatctagtcactgaaccagctagaacaaactagtcctcataatccagtctttttccaccaataccaggcgcaactgcgcccattacccaaacaaggagttcatccgctcatgcgcactgcggacatcgcaaagcgatacctcgattactttgccaaacatgatcatctcgtcatgccttcggcatccctgatttccccgaaccccaccacgctgttcaccatcgccggcatggtgccgttcattccctaccttcttggtgagcagaccccgccgaagcgccgcatgacatcgaaccagaagtgcgttcgtacgctggatatcgatgaggtcggcaagaccacccgccatggcaccttcttccagatgcttggcaacttctccatcggcgactacttcaaggaagaggccatccactacgcctgggagctgctgaccaccccgcagagcgagggcggttacggctttgacccggaaaagctgtgggtcaccacctttaccgacgatgaagaggcccgttccatctggaagaacgagggcttcgatcccgagcacatgcagattttcggcatggaagacaacttctggaccaccggcggccctggccccggcggcccctgctccgagatctacgtggatcgcggccccgaatacggccgtgatggcggccctgcggccgacgagacgcgctttatcgaaatttgggatctcgtgttcgagaactacgaggtcgacaatgtcaagtccaagaccgacctgcacatcgtcggcgagctggcccagaagaacatcgataccggcgccggtctggaacgtctggcctacctgatgcagggcaaacagaacatctatgagaccgacgaggtcttcccggtcatcgaggccgccgagcgcctgtccggccgcaagtacggcgaggacgaggccgcggatgtcaagttccgtgtcgtggccgaccacgtgcgttccgcgctgatgattatgtccgatggcgtgcgcccgtccaacgtcggccgcggctacgtgctgcgtcgtctgctgcgtcgtactgtgcaggccatgcgcgtgcttggcgtgaccgatccggtgattcccgagctgctgcccgtctccaaggaggctatggtcgccagctatccggagctcaacgacacgttccatgatgtctccgaagcggcctatggcgaggaagatgcgttccgtcgtacgttggagaacggcatcgagattcttgacgtggctgtcaagaaggccaagaagaccgccgatccggtggtctccggttccgacgcattcactctgcatgacacttacggcttcccgattgagctgaccctcgaaatggccgccgatcagggcgtgaaggtggacgaggccaagttccgcgaactcatggccgagcagaagtcccgcgcccgcgccgacgccctcaagaagcgtcacaacgtggacctgtcggtctatgacgacttcaagaagacgctcgccaagccgatcgacttcctcggctacacggatatgtccgcccgcgccaaggtcatcggcatcatgcaggaaggcaagggctccgtgcccgccgtcaccggcccggccaacgtcgaagtcattctcgaccgtaccccgttctatgcggaggccggcggccagcttgccgatcagggcgagatcctgtccgacgacggtgcagtgctcgaagtcgacgacgtgcagaagcccatcaaggacctcatcgtccaccagtgccgtctgaccgaaggcacgctggtcgtcggcgccgaagtcaacgccaacatcgacctggcccgccgtggcgccatcgcccgctcgcacaccgccacgcacatggtgcacaaggcgctgcgtgaggagctcggcccgcaggccacccagcgcggctccgaggacgccccgaaccgtctgcgcttcgacttccagtggtccaaggccccggccaagtccgtgatctccgcagtcgaggagcgcgtcaacgacaagctgcgcgacaacctcgccgtgaccaccaaggaaatgaagttcgacgacgccatcgccctcggtgccatgcacctgttcggcgagaagtacggcgacatcgtacgcgtggtctccatcggcgaagacggctggagccgcgagctgtgtggtggtacccacgtggaccacgtcggcaagatcggcatggtcaacatcctgtccgaagcctccatcggctccggcgtgcgtcgtgtcgacgccgtcgtgggccagggtgcctatgacttcaacgctcgtgagcacgcgttggtctcccagctgtccgacaagctcaacgctcgcccggacgagctcgccgagcgtgtgaacgccctgctcgccaagctcaaggaatccgatcgtcgcttggcctccatgtacgagtcccagctggccgcctcggttccggcgttggttgctgacaccaagaactccgcggccccggtcaaggtggccgtcaagaacgtgggccacttcggcgcggtcgacgccctgcgcaagaccgtactcgacgtgcgcgcccagctcggtgaagacgcccccgtggtggtggccctcgccggcgtgaacgaggatgacaagccgatggtcgccgtggccaccaacgaggccgcccgcaaggtcggcatcaaggccggtgatctggtgcgtggcgcagccaaggtcctcggcggcggtggcggcggcaagccggacttcgcccagggtggcggtgtcgatgcctccaagatcgacgaggccctcgaagcgctcgagcacgaggcgcagaaagcctgattccgccagtggtgtggttaggtgttgatttgggtaatgcccgggtcggactggcactgtccgacccggagcttacctttgcacaccctgctggcaacattcatgttgccggcgactatttctttgctattgacgaggtcctgaacgtcatcgaagacgaacatgtggaccatgtaatcgtcggactgcccctgcagatggacggtacagaaggcaaaagcgccaaaaaagcgcgcaggtgggcggccaatctggagaagaggctgcaagcagagagtgaagacagtgattctacggagtatcagattccgcaggtgtcattgatagatgagagattgacaacagtcagtgcgcatcgtcaactgttcgaggcccataaagcttcgaacaagcacaggccggtggttgaccagcagtcggcagtggtgattttgcagacggcactcgaccgtacccgggagcagtgaggtatcggttatgaccgatgattttaacgagttctttgatgacaacacgcattgggtcgaacaggggtcagaaccaatgcgcgggaccgagccgccagaaccgccgaaatcccgcaaggagatgcgcaagcgacgtgcacagcgcaagcgcaagcgcgtcagtggcattatcatcgccatcgccatcgtcgccctgcttatcggcggcggctatttcggcgtaaccaagctcatcgcatggcgcgacagccggagcaaccagtcgacggccatcgcggactatcggggaccgggctatggcgaggtcgaattcaccgtgagcgagggccaaggcgcggcggagatcgccgataatctgctcaaggccgaagtcatcaagtctactgccgcgttcaccagcgtggtcaacgccaatagcgcgacactctatccgggaacgttcacattgaagaagcatatggccgcatccgatgtgatcgccgttctctccgacaccaaccaggcggcgggcttccttgaggttcatcccggtgaacgtgccaccgatgtgttcgccgacgccgcgaagctttccggcgttgcccaaagcgaattcgacacgattatcaagaacaagggtaaggatattctgcccaatgaagcgggcggtagctttgagggatggctggagccgggaacctacaacgtcaagagcatgaagagcgcttcggaaatcctcaaggccatggtcgataagcgtatcgccaagttggatgaattgggcgtgccgaccggcagtgaccgcgaacgggtgatgatcatcgcctctatcgccgaggccgaggtcaacaaagccgattactacggcaaagtgacgcgagtcatcgagaaccgtttggagcagggcatgtcgttgggcatggattccaccgtggcctatggcaataacgtcaagcccgcgcaggtgaccaccgagatgacccaagacgagtccaacccgtacaacacgtacaagatctccggcctgccgcctacgccgatcagcaatcccggcgatagcgccattcaagcggcactgcaccccgaaagcggcaattggctgtacttctgcacggtcaatctggacaccggcgaaaccaagttcgccg

SEQ ID NO: 943 - DNA, 39992 bp, Unknown
  R117_24m  MAG No. k141_12509
agtcgctggtcaccggcccccggcaggcccgggtaatgaacggacttgaccagcggatgcgcgagcaggtaccgcgcgatggcattcgcattctcctgctgccggtccatgcgcagggccaatgtctggatgccgcggcgcaccgaatcgcattcagtgggcgccagtacccctccaagacggttctgggcgaagtacacgcgattggccaaatcctcaccggagacgaccacgagaccggcgttgacgtcggagtgaccggccaggtacttggtggcggagtggattaccacatccgcgccaagggaaagcggctgctgcaggtacggggtcacgaacgtgttgtccacgatggacagcgcaccgtaacggcgggctgttgcggagatggcgcgtacgtcgttgaccttgagcagcggattggtcagggtttcaaagtaaacggcttgcgcaggcgcgatgccgttcgcgcggtcgcccttgacggcggcatccaacgctgcaatgtcctgggtattgactgactcgaccacgacgccccaacgggtaaagaactcattgagctgcgaatacgacccaccgtaaatgttgtcccctacaataatacggtcgccgggcttgaaaatgctgagcacggcatgaatcgccgccaagccggaggcgaacgcaaaaccgcgcgttccctgctcaagctgggcgatctgctgttccaggaagtcacgtgtgggattgccgctgcgcgcgtaatcgtagcggggcatcgcgtcgaccctctcaaaggcatatgtcgtcgaattgtagatcggcgggttcacggctccggtgtcattgtcgtcaaccggcagtccgtggacgagctgagtattgaatctggtcattgcgcacccccttacgtgtcgcgtcatccgtgcgcgggactcccccgcgccacatctatgactgtaatgcagaacgccggcccgaaggccggcgttgctatatgcgttggttatgagaagctatagcgacacgataatcagcaagcgactgcgtagtaccatggtcaccattttgccggactccgagacggcgtacggcaatcgccgcgcatcggcattctgcgcaggtacgtgggataacgcgatgccaaaataacccgaattcgcacggagccggattcctcgccaggtaaatatttcacaggaacggaacatatcgagacagccaatatgaagacgagtccacgctcatcgccccggaacggcatcaacaagacgctgggcacactcggaatgcggtgcggatagcacctggtggacattcccaaattccacgacgcgaccatgttccatcacagccacacaatgagcgctttgcgccactaccgcaagatcatgggtgacgaacacatacgtcaatcccagctccgcctgcaattcgtcgagtaaatcgagaatttggctttgcacagatacgtccaatgcggatactggttcgtctagcatgatgatttgcggattaagggccaaggctcgagctatggccacacgctgacattgacctcccgataattcacgtggttttgcgtcaagcagacgctgaggcaattcgacccgatccagcaattccgccacacgcagcttgcgctccttcctgcttcctttgccgaaaatagccaacggctcggcaatggattgaacgatggatcgacgcgggtccaaagaatcaaaaggattctgctgcaccagctgcatttgtcgcctcgctcgacgcatttccgcttgcgacacagacgacagatcttttccattaatcagcacatgccctttcgtgggacgagtcagctgcaacgccatccgaagcaaagtcgtcttgccggaaccggattcaccgacaatcgccagcgtcttatgtcggtgagcgcacaaactcacatcatgcaatgcccaaaacgcttcctcctttttgctcctattcacggggaaccgcttgctcaccgatacccactgcaccgcacaatccaacccaacctgatcatcggcggcaaccgcaatctcccgttctttggagaaggcgaaggccggtgccacttcgatcaaactcttcgtataatcctctcgtggggaggtcaatacctgattcgtatccccttgttcgacgattttgccatcgtgcatcaccacaatccaggaggcacggtccgaggccacagccaaatcatgcgtgaccataatcagggcaataccacgttcacgcacgagagccgacagcttatccaacaccgttttctgcactgtgacatcaagagcgctggtcggttcatccgcgatgatcagatccgggtctcccacaagcgcctgtgcgataagtacacgctgcttaagacctccagacaattcaaatgggtattgacgatatctcatatgggggtcgtcaaacccgacctccttgagcaaagaaagcgcacgccgtttcgcctgctcgtgtgatacgcccacattgagccgcaccaactgcatgatctggtcgcctatacgcattgtcggatccaagttggtattgggatcttgcgggatataaccgatgcgacggcggcgcacctccacccactgcctgtaatcggtttgctgatattcatgcccaaatagcctgattgtccccgtttgatacgcagaagccggcagaatcccaagcaaactctgaaccatagtggatttacccgaaccggattcaccgacaatcgccacgctccgtcctgcatcgatacgcagatcgacaccacgcagtgccggaatctcacgatctcgccggagatacgtcacactcaggtcacgaacctctaccagtggatgtatgtcctcattggtggttcgtacagatgaaccactgtcgatacgctccgtcatcctcgttgcctctcttcaataatctgcgcaatcaccgtcatggaaagtgcgcacagcaccactaccaggcccgggagcagtgacagccaaggagccgtgagcagatagtcccgtcctgcattgatcagcgagccccattccgctgcggggggttgagcaccgaatcccaagaaactcaatgtcgccaccgacatgatcacaccgccgaagttcagtatggccagcactccgaccgggcctgacgaattcggcaaaacatgacttaccataatcctgaacgaactcgctccattgacgcgtgcggcatcaatgaaggcgcgctcccttactctcagtacctgcgaccgagttgtacgcacaaaactcggagtcaatcccacgccaatggccaacgccactggaatcgtaccgaatcctatggcggtgataatggtgatagccagcaacaagtaagggatggataggagcacatccaccgtcctcatcagaatggcatccacccatccgcctgcatatccggcgataaccccgatgatcaatccccccaccaccgcgatgaccaatgcaagcagactggccacgatcgtctctcgacctccgtagagtactcgcgtatatacatcacgtcccaactgatcagtgccaaaccaatgcagcgccgacggggcaagcaacttctcagaaggagatgtcgccgttggatcgtgatgggtgaacgcagcaggaaacagcgacgcaaggatgacgaacaacaaataaatcccggccatgcatcccgcggcgcgcctacgcataacatcaccgaccatagctaggttcctcatgatctgcctccccaagtttgcgcaatacgaggatccagaagtggatatatcagatccacgatcaaattgatcacgacgaaagcagcggcagccagtatcaccactccctgcaccactggaatatcctgttgcgtcacggcctgctgaatcaacatgccaagcccttgacgagaaaaaaccgtttcggccacaatcgctccggtcaccgtatctcctacggcgatgcccaaaatggtcaacgacggcaaggacgcgttctttgccacatggcgcacaatgacactgccgcgttccataccatgagccaaagccgtatgcacataaggttcagccatcacttcgtcaaatccgttcatcaacaaccgccccaaagtggcagccggagcaacggacatcgtgatggtggggagaatagcgctttgccatccttcaatgccgcgagccggcaaccatcccaatgtgaaacagaacacctgcatcaacagcaatcccagccagaacgacggaatggacatgccgacggacggtaccgccgacaataccctgcgcaccacgccattacgggtgaccgcggcaagaaacgccaatccgaacgccagcacggcagccagaacaatggccaacaaaccaatgaccaacgtgcttgcaattcgatcgatgatcaatgaggtcacaggaacaccataagtgtacgaactgcccaaatcgccgtgcaatgccttgaacaacatggcgaaatacgcatggatgggacccttgtccaacccatacaaatgttccagttgagagatctcctcaccactcaacgaactgatatccgtgcctttcgccttgaccattaacgccactggatctgagggcagcatattaagaatgcagtacgtcagcgtgtaggccgcccatagtacgaggatggcctgcgcaatacgaccgagcacataccgcaatgcggtgatgcggttaccgatcatgtcgaaatctcacctctcccgttatcatttagcaatccaagcgccgctgaagtcgccaaatgcctctgcagtaaatcggataccctgcactcgggaagacgccgcgtaatcctgtagacgctcgtatacaggaataagaatgtagttgtcgctgaggaactgctgcacctgacggtatgtttccctgcgtttcacggggtcaagctcataggtccctcgatcgaacaattgggccagctgtgcatgctgttcctcggtagcgatgttcctggtctcatccttccaagatgaatagcgaagatccaaaactcgattcaacgccgataaatcgttacgcgtgaacgtgtcaccgaggaaatcgtagtccccggatatcatgcgggcgttttcctcagccgcggtagtaacgtcaattcgataatctatgccgattttcttaagctgatcttgaatgagttcatgtccttcgttcttggtgaaggtcagcaaatgcagcgtcagtcgcttgccatctttgtaccgatatccatcatccttcaatttccatccggactcatccagcaactcaccggctttcttgggatcgtaagtggtattggcgggagttttcagcattcccgtcgtggtcgaatccaaaaaaccgctaacgaccggataatcgtctcgcaacagtgtggcggcataagtcgcgcgatcgatgcccaagatcaccgccttgcgtacattgatgtcattcaatggcctgccgtaacgaatattcgggaaaaggttatacgccgtaccaggtagcgatcgactttccacacgaccaccagcttgttcgatctgagctttgtcgttctgcgtcaaagcatgatcggagtcaggccataacacgtcgacggaaccactggacaaactccctacacggacagaattctcgccggaataactgaattcaatgccatcaagatacgcatcacctttctgagactggaatggcgaggaccacgtatgccctttacgccgaatcaactgcgcggccgttttcggattgaacttcttcagcacgaatgcaccggttccagatagtgccgctgtgcaacgctcttcaggaggaagttccagtgatttcggagagatgacggcaagattcgttgtggaaagtccttgtaggaaagacgcattaggcgcggaaaacacaaagttcacggtatcgtcgtcgactttttgcacctcttcaagattctgcgtatacaattggccatacgttccgggaatttctttggccgtttgcagatctgtggtgaaattcttcaccacggcatccgcattaaacggctccccgtccgaaaacgtgatgccatgcttgaggtcgacggtcaacgtcttaccatcctcgctctgccgccaacctgaagccaaccaaggtttgatttctccggtcttcggatcctgatcggtaagcgactcggcgaattgacgcacaatcgtgcgagtgcccgtccaatacgcttggaacggatcgatgcatccgaccggatccggtacttgaatgaccttgagcgttccgccctgctgtggcgcatccgcattcaccgcgccttgatgagaagtgttgccgcaagccgccatgccggtcagcagtcccgccgacaagcaagcgaccagtactttattcacgatggcattcatgatttttctcccgtttttcgcactgctgtttcagattgccgaaatccttgaatccggcaccgccctgcatcgtgccggtaatgttttcgggaaagggtcctcaagatggcgattcacctgcagatgacccgcattccattgatacatctgcaataacgtggccacgatgccaccaactccgtcgaaatacccgatcggcctagtgatgttctccgggcgaacacgctcccacgcctcaggccagtcggaagccccatcatccaaccgttcctcaccgccaagtacaacggccgcggatctctcggcaagatcacgccaacgttcattaccatcatgcaaatacagtccgataaagaactggatcaggcccgcatggccacagcacaagcacaggttgttccacagccctgcggactgggtttccggagcgcccaatgactccatgccatcgacaagttccacaacctgatcggcgtaatgcgtgtcaccggtgatgtcatacagcaggctgaataaccgcgctgtaccaccagggccgctgcatacattgaggcacagtatcgtcggctgcccctcccccacacgctgtggaatgagatatccctgggtctgacgaacggcgacatgctccacatatgccgcggcatccttggcgccctgcagatactgatcatcttctaggaattgatagagccgggccagaaccaggccggagccagcagatccataggtgaaattgggatagctgtaatccaaatgaccttcgaacccatggtacagcaaaccaccatccacagttcgatggcctcgagcaaggtattcccgcgccgcagatacgatcactcgtcttacatcgtcaccgccaaatgccaggtaagcctcgatgagaaacaggatgacaccaccgtcaaacgcaatacccgtattggtccaatgcactcctccatgttctccgggttttgctgcatccaaatagtagtggacaatatcctcgacggtccgacgatatgattcctctccaaattcacgatataaatccagcaacaccacaccgacgcctgcagcaccgaactgatatccgcagttatacaactccaccagatcatcggtcaaccacggttgtgcagcagtcagcacttctttccaatggcgggtcagataccgtgcggattcactggcgatatcggcgaagcgatcttcaccggtcgccctataaagctgcgcatacaaagaagataatcccgcgacaccgctataccatgacggccccacggattggccacgatctggatcaacccagtacaaaccatcttcggaatgtcgctggtagcgtgcgatatatcgctccccccgaagtgcgctatccaaatattctttaggatttcgtgccacgcgcagcgcataccggctacccgaatgaaaagcgaaccggttatcatcatcgtgcgtcatttcagctccttgcaacttacaataggcttgcttcaccgtgcccccacggatcatcgcctgcaccagcaaacggatattgttcattcaacagaacatcatcagccgccacaccatcatccttatatgaatgttttatagaacgctccaacgccgaccaaaagaaccgcttattgggaatgccgaataagcccttataaaacctttcgatagcatcgccgcggccggcaagaagaaacatccgtaagattcatcgaaaacacaacatcacaatgcaaggaacagcagccatgaacaccgtgccacagccattgctcgacttcattatccgaacgaggcagcatctgcaccgcaatcccgaactttcatttcaggagtatgccaccacgaattatcttgccgatatactgcatgcgcacaacatacgattgctcgacacatcaatggatacgggaattatcgcaattatcgaaggatcgtcgtcaggaccgcatatcgcgttgcgcgcggatatcgatggactgcccgtcaacgaggatccctctcatgatgtcatctcccgaacagatggcgtcatgcatgcctgcggtcacgacttgcatatgtccagcctgcttggcgcctcattgatgctgtcggagttgtccgacacattttccggatccatcacccttgtgttccagcctgcggaagagcaaggtgccggcgcgaaccaagtgatgcagacccatgccctcgatgacgtctggccatcatcggatatcacaacgatccccgatacgcgccaggaaccatcgcaataagcgaccagcccatgatggccgcagccggaagcttcgacatcaccctgaccggagaaagcacccacggcgcttaccccgagaacggtcgaagccccatcgaagccgcggcaactcttgtcacagcacttcagaccattgtcagccgaaacatttcaccacttgatgcgacagtcgtttccatcacccaagttcatgccggcaacacctataacgtcattcccgaatccgcgaccatcgccggaaccgttcgaacactcaatcaaaaaacaagccagctggttgaacggcgtatgcgctctctggccgaatccatcgccaccggatttggcttgacctcacgactaagatggtcattccccggagctccgctcgtcagcgatgcatctttagtggatctggcaaaacgcagtgtcccgcattatgcgaatctcatcaacccgacaccctccatgggcggcgaggacttcctattgtatttgcgcaacatgccgggactgtttgcattcatcggttcaaatgggcgtcctaatgccgcaagctggcatagcccccaataccttggattcgatgacatgttgagcactgccgtgctctattatgtcaacacggcattggatgtgctcaaacactgagcacagcacgtccacgcccctacagataagcgcccatgacgcaagtgtcatcatcttcacgtcatgggcgcccattcacgaaagtcagacctcaccgccttcgaccacgatctcgtcgggattgacctcatcgccgtagaccggctccagagtctcctggtaatccttgtggaagaagtcgtccttgccgagcttgacgatctcgtcgttcacgaagttcagcagttcggtgttgcccttctgcacggcgggcgcgatggtgtcgtcgtcaccaaggtgggtgatgccgaccttgaatcccttgttggacttggcccaggcgagcacctcggtgttgtcggtggagaaggcgtcgccgcggccgtccaacagcgcgttgtaggcatcggcgtactggtcgtacttctgcagcttgacgttcggcgcgttcttctcgaaccaggtttcggccgtggtgcccttggcgatgatcagggtcttgccgttcagctggccgacgtcggtgatcggcgcgttctgcggggagaccacgccgagcgccaccttcatgtacggcttggcgaagtcgaccttctccttgcgctcctcggtgacggtgaagttggcgagcaccagatcgaccttgttggaggtgagcacatccacgcgggcggccggatcgaccgacgtgtattccggcttcacacccagatccttggccaatcgttcggcgaagtacacgtcatagccctggtacttgccgtccttgtccacgtagccgaacggtgccttgtcggagaagacggcaatcctgatcttgccgctcttcctgatctcgtcgaggctgcgggccttggcgttggcgctggagctggtgcctgtgtcagaggacttcgcttcgctcggggtgcctgtggacggaccgcatgcggccatggatgccgccattaccaatgccgcacctgcggcaatcagtgctttgaacgatctcccaaccttgatactcattgagttctccttctcttgttgttattgatatttcttctcaaatacgtcgatatggcacaatcgaatcactcgaattcgaaggtgtgcaggaactgctgcgcacgttcggtttgcgggtgttcgaagaacgcctgcgcatcatacgattcctcgacgatgtgcccgccgtccagcaagatgatgtggtcggcgatggctcgcgcgaactgcatttcgtgggtgacgataagcatcgtctgcccggacttggccagttcgagcaccacgtcgagtacctcacgcaccatctcggggtcgagagccgccgtaatctcatcgagcagcagtacttccgggtgcagaatcagcgcacggcaaatggccacacgctggcgctgaccgccggacaattcgtgcggccaggagtccttgcgatcggcaagtcccacacggccaagcaaccggattgcttcagcctccacctcggccttgtctcgcttctgcacgagcaccggtgccatggtgatgttgccgagcaccgttttgttcgggaacaaatcgtagctttggaacaccatgccgatacgagtgcgcagttcactggaccggtcggatcgtccggctcgttccgtgccgggttttccggtatcgatcacctgatcgttgatggagatcgtgccgctctgaatcggttccagaccggcgatggtgcgcagcagcgtcgacttgcccgagccggaaggacccagcaccacgagcaccgaaccatgctccaccttgaaggagatgtcgtccagcaccggcttgtcggcattcgcatactgtttgaccagataatccacctcgaaacccttgcaggtcgtttcgggttcagtcattcgaccacctcttttccagtcggcgggccacaatggacagcggccaacacacgatgaagtacataaagaaaatcacgccataaatccacaaggttccggtcgggaattggaatcggttcgcgtcgataatctgctggccgaccttgatgacctcgaccacgccgagcagcacggccaacgatgttgttttgacgatacgtgtcgccaagttcacggatgccggcagcatacggcgaactgcctgcggcagaatcacccgggagaaagtctgccacgggctcaaccccagtacgtagctcgattcgtattgcactttgggaatcgactgcaatgcgccacgcaccagatcgcccagctcggcacctccccacaggatgaacaccagcacgcaggcaccggtggcatcaagattccaatcgaaccatcgagcaaaaccgtagtaggcaaggaacagcaacgccagctgaggcataatgcggatgaagtcaaggtagatgcgcatcgcggcccgaatcacgggattcttcagcgtcatcagccagcccaccaacaggccgaccgggatggacgcgcctacggatacgccggctatccacacggtgacccataggccttgcaacagacgtgggaatacgcccggctggagcagtatttcagcgccgttcataatcgaacctcctctccagccatgtgccaaagatggaaatcggcagcagaatcaccagatacgccacaatcagcatgaacagcgactcataggtgctgtaatacatgccgatcagatccttggccatatacatcacatccgcgagcgcgatggcggagacgacgctcgattccttgaacaggaagatcacattggccactacgcctggaatggcggtggacaccgcctgcggcagaatgactcgggtgatggtttgcgtggaggtcagtcccagtacgtacgcggtttcgcgctgcacgttgggcaccgcttccaatccgccgcgcattgcctcggccatgtaggaaccgcccaggaatccgaggccgactatcgcgcaggtttcggcggaccatactacgccgagtttgggcaggccgaagtacagaaagtacagctgtaccagcaatggcgtattgcggctgagttcgatgtagattctcacgatttgccgggcgaccgggatacgcgcgatttccacgccagcgcagaccagacccaccgcgatggcaagcagtatgccaaacacggatatgaataaggtcatcaatgtgccgttgacgaagaaaggcgcgtaacgctgcacgaacgaccaatcgaatgtcatcgggcgcgctccttcctttgcttctcgtttctcctcctgcgcataaacggtcttagccgctcatgtacgatttcgggggccgaacatacctgccccggccccctgccgtgtcatcgtagagtatcagaacacgtggcatagccgctgcgctatatgcattacttatgggacgttactcgatgggcgaacatcagggcaatattgtcgcctaaacagcggatacactgaggctatgaagattaccgaagctttgacccgcctgaccggtcctgaaaccaccccggtgttcgtgctgttgcacggctggggttccaatgaatacgatttgcccgatctgctgaactattgcggtgccggttcggctgattatgccagtttgcaggcacccatcgcctatggcatgggatatacatggttcggtgcgtgggcgcatgaaggtgtgccggagggcgaatcattggacaagcaggcggctgaggccgcccaagccattgatgcatgggttgcggagcatattcccgccactcggccggtggttgccatgggattctcgcagggcggcctcttggccgcgcatctgctgcgtttcaatccgaagcgatatgccgcagccgtctcctgctctggatggctggcaccggggtccgttgcgggcgatgccgaattggcttcgttgaagccgcccgtgttctacgggcatggtgctgcggacgacatcttcccgaaagccgatgtgacggcgatgggtgagttctggcgcgagcacggcacgttgaccgaacaggtgtatccgggcatggcccattcgatcaatatgccggaaatgcgcgatattcaacggttcttggaggccaacggattcattcggccgcagatttggtagtcaccacctcacatggcgtagtctacatgggcgaattcggggactttgtaccatttgacggggtagccggcaccgtgggcgcagaagaccgagtcgggggtgttgtccagatcggcttcgggatcgtaggcggcggctgcgatgacctgttcggcgtcatggcatggcttgtagccgccgaaggtggcggagaaacggccatggccgtgcgtgtactggttcacgtccatcgcatagtcgcgcatttcggacaccggtgcctcgccttcgatcacggcgtattcgtcatcggtgaccggggattcgaagctgccggccatgcgctggatgtcgctcatggcacggccgatcatgtctgcgggcacttcgagccggaaccggtaccacggttccagcagtcggcagttgccctcccctgtggtgtccggccggctctcgaccggcgtctcgggccggccactgactcctgccctggcttccatcagcccttggcgaatcgcccggtacgtggcttgacggaagtcgccgccttcggtgtgcttcagatgcgcgcggccggccaccaaagtcatcttgatatcggtgagcggtgcgccaacgagcacaccgagatgctcacgctcggtcaggtgggtcagaatcagccgttgccaattgcggtccaaatcattttcggacagggccgaggccacagtgactccgctgcccggctcccctggttccagcaggatatgtgcttcggcataatgacggagcggctcgaaatgacctgcgccttcgatcggcgcagtgatggtctcacggtacaggatggagccggggccaaaggacacatccagaccgaaccggtcgtgcagggtctgctgtatgatttccagctggaccgcgcccatcaattgcacatgaatctcggccagccgttccacccacaccacatgcaacaacgggtcttcgtcttccagctcacgcaatgcggtgatgaccttgtgcaaggtcagatcatcgaactggggacgggccggcgagctattgtccgccgcggtctggccggcggtgtcgttctcctcattgcggccggttcccgacttggcggcatcatgctcggcatcgtcctgattcgcgctgtcatggccggctcccccacgtttggccgctcccgaggtgccggccgtatcggattccgctccggcgggcaacaccgtgtaggtcaacacgggttgcaacgacggcgattcggcgtccggttccgttcccagcccttcgccggggaaggtctgcgtcagcccggtcaccgcgcataccaagccggccggcacttcggtgaccgtctcgaatttggcgccattgtagatgcgcacctgatcgactttctcggaccacgccatgtcatcatcctcctgcgctggcgacggtgtcgacgccgcggcgcacgaggatgaggagacgatctccttggctttgagcgcaccgccggtgacgcgcagccacgtcatacggttgtgctgaccgtcgtgggcgattttgaacacgcgtgcggcgaaggcggccggccattcacgttcgcgggtgaacgtctccagcccgtccaggaattcctcgaccccttcgagtttcaatgccgagccgaaatatacggggaacagctcgcgtacggcgatcatcgatcgcaatctgcccacggacagcgcgccatgttccaaatagtcgttcatcgcctcctcgtccagggtggcgatgtcttcggcgaacgcgtccaacggtagcgcgctgccctcagcggactgttccattgccggcaacggatatatcgcatcgctcagacgcctgcgcaactgagccaacacggcctcgcgggcaaatccggcggcgtcgcacttgttgacgaagatgaacgtcggcacaccgtatctggccagcagacgccatagtgtctcggtatggccttgcacgccatccgtgccggagaccacaagaatcgcgtagtcaagcacacgcagcacacgttcggtttcggctgcgaagtccacgtgccccggcgtatccagcaaggtcaggcgcaggtcgccgtgttctaccaatgcctggtgcgcgaaaatcgtgatgcctcgcgccttctccaaggaattggtgtccagaaacgcatcgccgtgatccactcgccccaatttgcggatctcaccggtacggtagagcagcgcctcggacagcgtggtcttgcccgcgtccacatgcgccacgatgcctgccactatctgtttcatcagctgtgctcccttcccgatgcgccgcatgttgccggccgcctaaccaatatatccgagaaaatccgggagggaaaaattttaccgtcagaccgggctgccggtacaataagtcaccgaacaccgactgatatgaggagcctccgtgaccacttccggcattaccgttttcggccaaccatcccagcccaatcatggtgccggcgggcgaatcgccatggacgatgccctctttcccaccgattatgtggcgctggatctggagaccaccggcttttacccgaacagttgcgccatcacggaaatcggtgccgtgcgcgtgcgggaggggcatatcgtcgatcaattccagcagctggtgaatcccttgcggccgattccgcgtcagatcaccacgctgaccggcatcaccgatgcgatggtggccgacctcgatccgattgacgaggtgcttccccgattcatcgcatggctcgctaccccggctgccggtcccaccgttgagccgattgtcggtcataacgtcagcttcgatctgcgattcctggattacaacacccggcatatcgccggctgcggctttgcctgcgcggattatgacacgatgcaaatcagccgcgccctgttccccgcgcagcggcatcaccgtctggctgacctgatcgtgcgcttcggcatcgcggacaatgaggaacaccgcgcattaagcgatgccatccagacccagcagtgcttcgaatggatgcggcattatgtcaccgagcatcacgaatccgaagcaatccgttggaagcaggcgccggccagaaacagcaccgaaatcctccaccagcagctagtggtaaagcggtagttacagcccgtattattcgcacatagaggaaaactattagtcgctgggctagagaccttatagtggacggattcctctcgcatatcggagaaattcgggataccacacggttagcggccaatttggggccggcgtcccgcaaccgtgcgggacgccacgcacgtcaaacgatgcacacggctggcatcccacaccccattccacagaaccattggaattctgccaatcccacaaaccggtgacgacaccgtacatcaggttctgtgggacgccagaggaaaaacacccgaaatccgctggcatcccacaccatgtcacaccgcacctgcagcatcgcaccacaccacatcacgccgacacctattcgtgcccccatttgcataattcgacgtttttggaagatggcgcacacatgcatgtgcccccatttgcatatcaaacggttgacgcaacaatggtggcgcatgcccctttgtatcggtatgaatcagtccctgccgtcaggctctccccctattgtgagggccgactggcagggactgaacacgcataatcacatgagcacgccatgccaagcatggacatctcagtacgaacagaacctattcgcacacgttacagcccgtattccttggcgatgacggaccagaggtcggcggcggcctgatcgacggtttcgttgacgatggtgacgtcgaattcgctttcggcggcgagctccactttggcggtttccaagcgtcgggcctgctgttcggcggtttcggtgccgcggccgatcagacggcgcttgagctcttcgaagctcggcggcgcgatgaacacgtacaccacttccaagtcgagttcggcggcgcgctgcttgacgcggcgagcaccctgcaaatcgatttccagaatcgttggcatgccggcagccagatgctcctcaacaggcttgagcaatgtaccgtagtgggccatgccgtgcaccacggcggtttccaggaactcccccgccgcttcgcgggtcaggaactcgtcttcggtgaggaaccagtagttgacgccatcaacctcgccggggcgcggggcacgcgtggtggcggagacggacacccacacttcggggtggtcggcgcgcagcttggcttccacggtgcccttacctactgcggtagggccagtcaggacgattagacggccggcatgggtgttttcagtcatgggttcctccggagatgatgtggtgtgcagcgattatgaatccaatgtggtaacggctcaccggcgagatgaccggtaactgttacagccccgacgaacagggaagaatatgaatcgtgatgcgacgtatgcaatgagatagatacgtacgcatgccgcgacatctgattccgttctgattactggttttctgcgccttcggcagtggcttccatcagcgactgacgtacgtcaagcgcaatcgactcggtagcttggctcagtgcggcgatatccggcccatgcgaggcgataaagcgggacacggtaaccagcacgttgccgcgcgtaccgcggaacacggttttcagatccttggcctcggcaccctgccaaccgtaaccgggggaaagaatcggaccggtgaacttggaggggtccacgccggaatcctgcatccattggccgatggtggcaccgatgatcagacccaccgagcccatgccttcgatatccacgttatgcttctgcgcggtggaggcgatgccgtaggccacggtacgtcccttgtaatcgccgctctggcgcaacgcggtctgcagactcatgccttccggattggaagtcagggaggcgatgaacacgccgcgtccgttttccaacgcttcggtaatcaagccgttcaacgagcgcgcgccatagtacggcagcagcgtgatggcgtcggccagcaacggtgcaccgggcttgaaataggcgtccgcgatggcggaaatcgtggtggacaggccgccgtgcaggcagtccacgatggtgatgacgcccatttgtcgtgccgcgtagagcacgcgctcgagcgcttcgaaacctttggctccgtagcgctcgaacatcgacgtctggaatttgactgctgcggcgcgcccgttggcggcctgcagcatacgcatggagaagagttcggcgccttcggcgtcgacgttgtatccccagtcggtgaggagcttgcgatgtgggtcaatgcccacacacagcggtccgtatttggccattgaattgctcagtcgcagaccgaaatccgaacgttgtgcctgcaattcctcactgctgggtgtagtcatcagaactcccgtcgctccaattcgaacagctgcttcgaatgctcctgaatgctcatgatctgataatcattatgcttcacggcctcgatagccagcagtgcggcttggaactcggtgatggtggtaaactgcggcagatcggctgcaatagcggcagcacggatggagtagccgtcggaacgggagccgcgcgagttcggcgtgttgaggatcatgtcgatcttgccttcctcaatgagctgaaccacgttcttgcccacggagccggcggcgtgatgcacctcgaccggggcttccggatcggtgtccacgcgggtgctgatcttgtccacgatgttcgactcgatgccgtaacggcgaagcacggaggcggtgccctcggtggcccagagcttgaatccaagctcttcgaggcgcacggcgagcagcggcagctgacgcttgtcggtgtcgttcacggaaatgaacacgttgccgtgggtcggcaggccaccatcgtaggcggcgagctggctcttggcgaaggcgtgcgggaagtcgcggtcgaagcccatgacctcgccggtggagcgcatctcaggtccgagcaggatgtcgacggtcttgcccaccggggtgcggaagcgcttgaacggcagcacggattccttgaccgcgacctgctggccggggtggatgtcgccgccgtcgcccttgggcagcagcagaccgttggcgcgctggtcggcgatggtttcgccggccatgatgcgggcggcggccttggccagcgccacgccggtggccttggaggcgaacggcacggtacgggaggcacgcgggttggcttcgatcacgtacagcgtgttggccatgaaggcgtactgcacgttgatcaggccctgcacatggcagcccttggcgatggcgtaggtgccttcacgcaggcggcggatctggtcgtcggacagggtggacgggggcagggtgcaggcggcgtcaccggagtggacgccggcctcctcgacgtgctccataatgccgccgatgtacagttcctcgccgtcgaacagggcgtcgacgtcgatttcgatggcgtcctgcaggaacttgtcgatgagcagcggggagggcaggcggccggagaccacggtatcggccttggcctcggcaagcgcgcggtccacgtacttggtgagctgcttgtcgtcgtagacgatttccatgccgcggccgccaagcacgtagctcgggcgcacgagcaccgggtatccgatgcggtgggcagcgtccatggcctcttcgaggctcagggcggtgccgtaacgcggggcgttcatctccgccttcttgagcacctcgccgaacagctcgcggttctcggccagatcgatggattccggggtggtgccgagaatcggcacgccggcggccttcagacgcgcggccaaggacagcggggtctggccgccgagctggacgatgacgcccttgaccgggcccatcctcttctcggcctcgtagatctcgagcacatcctcgaaggtgagcggctcgaagtagaggcggtcggacatgtcgtaatcggtggagacggtctccgggttgcagttgaccatgatggtgtcatagtccttgccaagctcctgcacggcgtgcacgcacgtgtagtcgaactcgatgccctggccgatgcgattcgggccggagccgaggatgatcacggcctcgcgctcgcgcgggcgcagctcggtttcgtcggcgtagcagctgtagtagtacggcgtggcggcgtcgaactcggcggcgcaggtgtcgacggtcttgtagaccgggcgcaggccgtaggtccagcgcagctcgcggatggtgttctcgccttcatcgcccaagccacgcaggtgggccacctgcacgtcggacagaccggcgagcttggccttcttgagcagcttcggggtcagggtctcggcctcgcgcaccgtcatggcggtctcgttgatgaggaagatctgcttcaggaaccacgggtcgatcttggtggccgcgaacacctgctccagcgtggcgccgccccagatggcgcgcatgagctgcaggtaacggtgttcggtcggggtgtggatggcctcaagcagttcggccacttcctcggcggacggcttctcgccatcccagttgaagcccatgtggcgcttgtcgatggaacgcatggccttgccgagggactcctggaagttgccggccagggccatggcttcgcccacggacttcatggaggtggtcagggtggggtcggcgcccgggaacttctcgaaggcgaagcgcggcaccttggtgaccacatagtcgatggtcggctcgaatgaggccggcgtggactgggtgatgtcgttgcgaatctcgtcgagcgtgtagccgagggccagcttggtggcgatcttggcgatcgggaagccggtggccttggaggccagtgcggaggaacgggagacgcgcgggttcatctcgatgacgatgatgcggccggtcttcggatgaacggcgaactggatgttgcagccgccggtgtccacgcccacgccgcggatgatggcgatgccgatgtcacgcagcttctggtattcgcggtcggtcagggtgaagcagggggccacggtgatggagtcaccggtgtgcacgccgaccgggtcgacgttctcgatcgggcagacgaccacgacgttgtcgttgcggtcgcgcataagctcgagctcgaattccttccagccctcgatgccctcttcgatcaggacttcgtcggtgggcgagtaatggatgccggcgccggcgatgcggtgcagctcctcctcgttgtgggcgatgccggagcccaggccgcccatggtgaagctcgggcgcacaaccagcgggtagccgaacttctcggcgatcttgtcgacttcctcgatgctgtgggcgatgtcggagcgggcggattcggcgccggcctcgtcgacgaccttcttgaacagttcacggtcctcgccacggtcgatggcttccagagaggcaccgatcagttcgacgttgtacttcttcaggacgccggcctcgcccagcgccatggcggcgttgagtgcggtctggccgcccagggtgggcagaagcgcgtcggggcgttccttggcgatgatctgctcgaggatcggagtggcgatcggctcgatgtaggtggcgtcagccatctccgggtcggtcatgatggtggccgggttggagttgacgaggatgacgcggatgccttcctcacgaaggacgcggcatgcctgggtgcccgagtaatcgaactccgcagcctgaccgatcacgatcgggccggagccgatgaccatcacggatttgatgtcggtgcgcttcggcatatcacttaccttccttggagttgttcttcataagttcgcagaaacggtcgaacaggtaggccgcatcgtgcgggcctgctgcggcctccgggtggtactgcacggagaatgcggggatgtccacgcactgcaggccttcgaccacgtcgtcgttcagatcgatgtgggagacgaacaccttgccgtacttgccgttttcaaacggcgcgtcgacctgcttgccgatcggagcgtcgaccgcgaagccgtggttgtgggcggtgacctcgaccttgccggtggtcagatccttgaccggctggttgatgccgcggtggccgaacttgagcttgtaggtgccgaagccgagcgcgcggccaagcagctggttgccgaagcagatgccgaagaacgggtagccggcgtcgagcacctggcgcagcagctcgatttcggggccggcctgttccgggtcgcccgggccgttggagaagaagacgccgtccgggttcaggttctcgatttcggcgaaggtgatggtggagggcaccacgtgcacgcggcagccgcgttcggccatgcggtgcggggtcatgcccttgatgccgaggtccacggcggccacggtgtacagcggctccttgccttcgtactcgccgcatggctcgatggtgtaggcctgcttggtggacacttcgtcgtacaggctcaggccctgcatctgtggggtgttcttgacgtcttcgagcagctgctcgatggtcttgagcgcgccggtggcctggtcggtcagggcgtcgccggagaagatgccggcgcgcatcacgcctgcggaacgcaggtgacgcaccagcttgcgggtgtcgatgtggctcaggccgacgatgccgttcttggcgaggtcgtcatcaaggctgccttcggcacgccagttgctcacgttcggagaaggatcacgcacaatgtatccggcaacccagatgcgggaggactcaaggtcttcgctgttgacgccggtatcgccgatgtgcgggaacgtctgcacgacgatctggcgatcgtagctcggatcggtgagcgtctcctggtatccggtcataccggtggcgaagacgatctcaccggtcgtctcaccgagggcgccgtacggctcccccacatatacctgtccgtcttccaaaacgaggactgcatcatccttgtcatacatcggaattgcgatggtcccggactcgttctggctcaccaaaacccccttatgtttttcgggtattcgtaccaaggttaacggccagcgcagactcacacgccgttgggcgcaaagtctcaccccgctggcggggctgtcggcaaggtgccgacttgagaatgtgtggcgacacaagtgtccgcccatgaaaaagcctcccgaatggggaggctgaacaacaaatgactaatcgaccgtcggctgaatctcagcggacggggcagcgggctcgtcggatgcaccggacgaatcgggcgaatcggaaacatcgccctcatcggtcggctcggatgcggcggcatcggaatcggacgattcctcatcggcctcttctgccgcggactccggtgccggtgctgcgttcttggcggtgcacactgcagacagcaggccatggatgaaagcgggcgaatcgtcatcgcacagggtcttggccaatgccagagcctcgtcgatggcgaccttgtccggcacatcatcgttgaacagaatctcccaagcggcgatacgcagaatgttgcgatcgaccacgcccatacggcggaccttccaacccgtggagtgttcgtccagggtcatgtcgatctgacgacggtgctcggccacgcccttgacgatttcaatggcatagtcgggaagcggggtctgggcaccgggatgtgcgatgcgctcgtcaagcagggcgagaatatcctgacttttttcgtcggcttcgtacagggtgttcagagcccttttgcgcgcggtggaacgtgccatactgctgctgtcctagtcctttatacggtcggtcgtctgttgaggatgcggagatcagttgttctcgcggccggtgtaggaaccatcctcggtgttgatcttgacgcggtcgccctcattgatgaacagcgggacctgaatctcggctccggtctcaacggtggccggcttggtgccggcgttggagcggttgccctgcaggcccggctcggtgtgggtgatggtcaggaccacggagcccggcaggtcaacgctcagcggggtgccgtcgtggaaggagaccaggcagtcggtgccttcgagcatgaacttggccttgtcgcccacgagggtcttcggaaccatgatctggtcgtaggtggtcatgtccatgaacacgaagttgtcgccgtcctcgtaggagtactggagggtgcggttgtcgacggtctcgaattccatcttcatgcctgcgttgaaggtcttgtcgacgatcttgccggagagcacgttcttgatggtggtgcgtacgaaggcggggcccttgcccggcttgacgtgctggaacttcatgacggtccacagctgtccgtcgaggttcaggacggatccgttcttgatgtcgttagtagtctgtgccacgttattcacctatttcaaattcaaactagcttaggcaaagcccaaaaattgcctcggctattatgccacaccgggtatacaggaagtgaacgctggggtttcccacgtgacccccgactagactggatgaatatgcgatccttcttcgaagccatatccgtatcctgcgtcgtccccgcgcaatcgccggcagacgacgaacgcacggtgttcgacaacctgtccttcagcatggaacgcggcgacatcatcgacctggtgggcccgtccggctccggcaaatcgagtctgctgaccgcatgcgcccgactcaacccgcacgcacacggcacgttcgtcctcgacggcgtgggcagtgacgaattcagcgcacagcagtggcggcgggacgtctcctacctgccgcaaaaaccgatactgaccggcaaggacgtggccgagacgatccggctaccctggacgctcgcgattcgaggcaaggggggcagggccgagcagctgctgcccgacgagcgcatccgcacgacgttggacgcgatgggatgcgaggacatcgacctggcgcgcgcgccacatgacctgtcgggcggtcaggcggcacgcgtggcgttggcccgcacgctgctcaccgacccgaaggtgctgctggccgatgaggcggacgccggactcgacgacgacaacgcatccaaagtggccgcgatcatggcggacgcggccgcacacggcatggcgatcatccgcatccgacaccgtccgccggacggacgcgccacccgcacgctgatgctcgatgcgggacggctcaccgatctgacgcgggataaggaggtgcgcccatgaacggcgcctacgacatcgacacctggggtcttgttctggcgttgggcatggtggccgtggcggccatcgtcagcgaactcatgcacatgggcatcggcaggaccctgatgtggtcggcatgccgcgccctcgtgcagctgtgcgccatgggattcatcatcagctacgtgattcgttcgaacagcgtgtggatggtgttcgctctgatgacggtcatgctggtcgcggcggtgcagatcgtgatatcccgcgcgcgcggcatccccaaaggtcttgccggaccgatcttcctgagcctggtcatcacgatgctgctcatgctggcgttggtcaccgaactcatcgtgcgcccacacccatggtatgcgccccagctggtggtgcccctgaccggcatgctgctgggcaacaccgtttccgcgctcgctgtcgggctgagccgattctatgaaagcatggaggaacgccgcgacgaggtggatatgatgctggccttgggggcgacggcatgggagtccgcccgtccatccgtcatctcgtcgattcggctgggactgctgcccaccaccgcttcgctggcctccagcggcatcgtgaccatcccgggcatgatggcgggccaggtgatagccggcggagatccgctgaacgccgccaaataccagttcgtggtcttcggtgccatcgccgcgctgaccttgctggccgacggtctgatcatggccatggtctatcgcacctgcttcactaccgacgaccaatatcagacgcctaaagcacgatagcctcagtatcgatctcaggccaagcctcaggcgatggtgaccggcgtgccttccggaatttggttgtagaaccattcggcatcggccacagtgagtcgcacgcaaccatgtgaggccggctgaccgagcttgttgccttcctcttccatatactcgccggagttcgccccggtcggcaccgagtggaagaggaacgggccgttgaatcgcacccaataatcagcacccatgccttctgcgggattgtagaagtgatcgcctctcatcccgataacatagttgccgcgcggggtcgtatcgttgagcccggtgctggcgatcatcgtgtagatggtctcaccgccggattgcacatacacttcctgcttggcgatactgactttcacgctgagatcggagtattgcgacaaatcaggctgcttgccggtgggattcgtccatcgcgcacgttgcgcttccttgtcacgctgctcctgaatcgcctggttaaagaccggtacctgctggcggtccaaggatgaggccgatgcagacactcgcgatgccgactgttgcgcggattgactcaccttctgcgcctgcccctgaacctctgcctgcccctgtgcgaccgactcaccgcggggccacacccgttgggcgtcaatcgtcgagaagacggcaagaacgcagcacaacaatgcgcataccgcaaccacaatgcgccgtacaacgtaaattcgttgacgacgaatcctcatccgtgctcgacgccgctcagtcatgtcttccttctcgttgcaaagactttttccgtaagcattgtagccgcttttacgatacgtcgcgtaccaatatcacgcgcgctattccgctgtcactattcctattccgttgccgtccacttacgtctcagcaacatccacaggccgatgatcacggccaccacgccgagcccgatgccgaacagtcccgaggattgcgccgcgtgcgcggttccctgggattccaacagcacgtcctgcgtgaccaccagcgacagcatcgcatcgagaaggtcacgaatttgaccgacgaatcgatggggttgtgcgtcttatgcgaaatcaccataccgcgaatcgcaatcaagaagaacccgcaacttacgcagcagacggtcaatcgccttaaggaggcgttctggaagctgtatgaaaccaagccgatcgagaagatctcggtgcgtcagatcaccgaactcgccggctacaatcacgccacgttctacctgtatttctcgtccgtgcgcgacgtgcgtgaccagatcgaagacgacctcatcgcccagcgagacctcatattgaagcagtgcatgcatgacggcacactccccagcatcgcaccgcatatgcaaatgccatcgcaatcggaagcagcgcagcagccagcggcatcaccgcaagcccagtagcgaggtcaacccacagctggcggcgcgggaaacaggtcgcgccgcccagtacacgaatccggcgagcttctaccgagtcgcgaggaagaagaaacgcgggaaggggaagatgatgctgccgtccgactgtgtggggtattcctcgcggacttgggagaacacttcggcctcgaacttcttgcggccggcgtcgtcaagcgcctgcagatacggacgcatgccggtgccgcgataccagtccataatcgcctcatgcgagggcagcgtgtgctcccgtttgaatcgcagatactgttccgaatcccgggtaaccatgctccccacgctaatcagccgttcacatatcggccgatattatctcacaattcagccaagcagggcgtcgcggcgggcgatgagcccgtcaatcgcggcctcgccttcgatgacggtgaaggtcagggacttacgttcgctggtctgcggggcgatggtgtgcaggtcgccgcgctgctcgtgccagccgcggccgtggacgctggagttcgagggttcgaggccgaccacgtagtcgcccgcacccatcgacttccattccatgaagtatgggaagaggctggcgtcgaagtcgatgacgactccaagtccgagcttgcggttgaccacggcggcgaagctgcggccgttcttgtcggcggcgagctcgtgcaggtacacgctttcggggcggttcgcctcgggtgcttggatttcgttccacggcgtggtgtcggctgcggtggtctcgtcacgcggggtggccttgcggctggggatcacgacttcggcgccttcggcgagcaacggccagccgaagttgcagtggtacatccacatcagcggctcgtcgcggaaggattcgttggtcacctcatcctcgaccgtgatcgacggctggccgtacacgctggtgatcttgcggcgcatcaccagattctcgccgaacagttcggcctcgcgcatttcgccggagacctcgagcacgtagtcgccttcggcggtccagtgggcgtcggagcccacatgctcggccggcgtggtgcggatgcggccgtgcatcgggaagctgccggccgggtacttgccgccctcaggcgtgacgtacggcgcgcagatgttctcgaagccgcaggtgaagaacaggccgcccatgatggagcgctgcgcctccagcccgttggtgtcgaactggttgcggccgttcaggcccggcttggacaggaaggtgaggttctcgccgcggtattcgaactggcagacgtcgagggcgcggtcggccatggatacgaagcgtagcgggccgttcttcacctcgatggccttgaggccgtgggcacggccctcctggtactcgatcgggcgcacataggcggcctgctgaaggctgcccatgtgggccaacatgtcggctcgcgtattgtgttctgtggatgtcatcgtcgtcaccgctccttgcaatcatcggcttgttgtccgtgtgcacatcatactgtaagcgttttccgcaattgtcgctatcaacaacgtatacgcatgtcgaaaagttggaccgaagaacaacgcaagcacaacgaaggctccccgaagggagccttccatcgtagcacacgttacgcgagaattcgtcgctcgcgctttacgcttccgcggcatcgtccttcagcgcacgcagcagggccttgttgcgggtttcgatgatgcgcttgccgtcctcgccctgccaagagaagaagccctgaccggtcttggcaccgaggttgccttccttgaccttttcggcgagcagcgggctcgggccggtgccgttgtccatgtcgtcgaacaggtaggtgctgatgttgtagaacacgtcgagtccgccgaggtcgatgctggcgatcgggccgaccaggttccagcggcggccgaggctgtacttcatcacgtcgtccacggtggccgcgtccgctatgccctgctggacgatgtagaacgcctcgcgcaacacggccagctgcaggcggttgcccacaaagcccagcgattccttcttgatctttgccggcttcttgccgatcttggccatgaggtcgaaggtgatgtccaccaccttcggatcggtcttttcacccggcaccacttcgaccagcggcatcaactgcgcggggttccagaagtgcgccaccacgaagcgctcggggtgccccatcaccgactgcagcgcggtggggctcaggccggaggtgttcgtggacagaatcgcgtccttgggggcggcgtgctccacttcggcccagacggacttcttgacgtcaaggttctcggccacggattcgatgacgaagtccacgtccgccacgccgctcgcatagtcggcgtaaccggtgatgcgggccagcaccgtgtccacggtgtcgccggccttgagcagtccggcttcggcgaagtcctcggcatcagaacggatcgccttcatcgccttctccagcgaggcctcgctgcggccgaccagatgcaccggatatccggccagcgcgaactgcaacgtgatcgcatggcccattgttcccgtgccgacgttcgcaatcgtcttgatatcgtccgctgtctcaatcatggagaccccttctttccggcggttcgcctggcgttggtgtacgcaggaacagcaccgtgccgttatgcgtttgctcgcattctatgccgatttcgctacgtgaacatttactgaacatttcgcggattcgactagcacaaatccctatatcagcacaaaagcgtggtgccgcaacaccgaagtgttacagcaccacatgcaccacgcacgtcacgcacagcacgcgtcacagcatcacgctgccatccggaacgtcgacgatatcgccagacgcgcccaaacgtgcacggaacggacggccatcggagctcgcgacctcgatgccagccggcgtacggcgcgcggtgaaggttacggcggaaccgtcgatttccgtaataacggcttcggcggtctccacatcatccacgaacacggagaccagcgcgttctcaccgtacacgcggtctggcttggtttcgccggggttggtgacgatgacgctgccatcgcgcgcccacagcggaatcgaatcgtagccgtgggtttccttgcgccaaccaccctgcgccttctcgccggtcagccagttggtccacacgccgtccggcagatagtaggaaacctcaccggagtaggtgaacacgggggcgaccagcatggacggaccgaacatgtactggcggtccagcgtgcggcatgccgggtcatcggggaactccacgaacatggaacgcatgaccggggtgccgttcacatgaggctgcaggccaagctggtagacatacggcatgagttcaagcttgagcttggtgaactcgcgcaccacatccacggcggtctggccgggcaccaatgcgacgccgttcttctcgtcttcctcgtcgaacagccacggcacacggtacacggtggaaccgtgcagtcgcgagtgggagccgagcatgccgaacgccacccaacgcttgtagacggccggatccgggaacgcaccttcgaagccaccgatgtcgtggctccagaagccgaagccggaggaggtcagcgacaggccggcacgcaaggactgggccatgccgttgaaggtggactcgcagtcaccgccccaatgcacgggctgctgctggccgccgacggtggcggagcgcgcatacagacaggcgttgcccttgccgtaggtttcttcgatggcttcgaacacggcctggttgtacagctgggtgtaccagttgtgcatggagagcttcggagagccgtcataccagacgacgtcgcgcgggatgcgctcgccgaaatcggtcttgatggcgtccacgccctgattcagtaggaccttgaccttgtccttgaaccattcacaggcggccgggttggtgaagtccaccaagcccatgccggcctgccagaagtcggtctgccagacttcgccattgggcttgcgcaccagatagcccttgtctcggccttccttgaacatttcgccgcgttggccgatgtacgggttgatccaagcgcagatgtgcaggcccttgtcttcgtgcaggcgcttcagcgtggattcgatgtcgccgaagaaacgcttgtcccactcgaaatcgcaccagtggaactcgcgcatccagtagcagtcgtagtggaaggcggccagtggaatatcacgctcggccataccgtcgatgaaggagttgatggtggcctcgtcgtatttggtggtgaacgaggtggtcagccacagaccgtagctccatgcgggcacattcgccgggcgtccgacgagcttggtgtagcggtcgagaatctgcttgggggtggggccatagatcacgcagaagtcgatggcctcgccgggcacggagaactgcacggcctcggtgttctcggaaccgatctcaaaggagacgtggccgcggttgttgaccagtacgccatacccattggaggtcatgtagaacgggatgtccttgtagccctgttcggaagcggtgccgccgtcctcattccagatgtcgacgctctggccgttcttgacgtacgcgccgaagcgttcgcccaggccatatacgtcttcgccgaccgacagatgcagctggatggcggtgaacacgtcggactcgtcatgggcggagccgtccatgctcacaccgaattcgccgaccggctgggcggtgacgttcgccccggcaccaagattgaaccgggccagcgacttgcctgctgactcggtgagcaccttgccgtccccatcaaggaaggcaaggttccaaggcgcgcccttgacgaccttcgccgtgagcccgccggtggtcagcgtgacgtccgcgccattgacgccgacttcgccgtcgccattgccgtcagccctgacagtcacgtaatcccggctgccgggcttgtcggcgttgagcgggaatccggggtattcggtggcaccctgccagtgttcggcacgcacacgaatcacgccttccgcaggtgtggtgatgtccacattgaatgtgggcaggttcagggtatcgtatcggccgcgcaccacggaggtcggggcgaggacgttgaggctttcggtggtggcatccgccgccagttcgtaggcttcacgagcgtagagggcgtcgacgccgtcacgaatcatccagtagccgttggtgaacttcattgttgctgctccttggtggagaggtggtttcgacccccagggaacaaggcggccgaaaccaaaatcaatatgtactgcttgttgattgaattgcctgttgtgcgaatgaccttacttcaccgcgccggtggtgatgccgttcgacagcgtcctctggaagaggaggaagaaaatcaaggtcggcacgatactgatcagcgaggcggaggccgtggtcgtcacatccatcagacggtcgccggacagcgaggcgatggcgatcgggacggtctgcgaggagttgtcgatcaggaaggccatcggaatcatgtagtcgttccaagtccagatgaagaagaacaccagcatgacggccagggtcggcttcgaaatcgggaagacgatatccttgagaatcttccagcggcttgcgccatcgatggtggccgcttccagaatcgccttcgggaaggtgccgtacaccgacgacaacaggtatgtgccgaatgcgctttggatcacggtgaagatgatgacgatggaccacgggttgttgtacaggccgattttcttgaacatgatgtacagcgggtacaggagggcttcctgcggcagcatgttcgcgagcatgatcaacagaatgatccagcgacggcccttgactcggccgatgccgagggcgaaggagttgaacacggacagcaccacggcaaagattgccaccaggccggaggtccagatcgagttccacaccttttcggggaagttgacgcgggtccagaacttgatgaagccatcaagcgtgaacgaggcaggccaggacagcgggccgttggcgttgtagtcggccgaagtcttgaaggcgttcaggcaaagaacgacgaacgggaacagcatcaccaagccgccgataatcagcagtacgatgatcagccagtcgccggcggtgcggttcttcttgactttggcgattttcttcaattcagctgcgctcatagtgctcattttttcaatcactctccgtcctcagcttcgaccttctgctgaaggttggtgaacacgatggccacgataatgatgacgactgtcagagcggtcgcaatcgcggcgccgtagccgacctgctgtacctggaagaactgggtgtaggagtagtaggacggcacgatggtggtagtgccggggccacccttggtcagcatgtacaccggggcgaacaccttcagtgccgcgatggtgcaggtgagggccaccacgaagatctccggcttgatggacggcagggtgatggccctgaagcgctgccaccagttggcgccgtcgaggctggcggcctcgtacagttccggatcgacgcgctgcaggccggacatgaagatgaccaacggatagccgacctgaatccagaccatgatgagcatcaggaagatcagggccgtatccggtttgccaagccagtcatgttgcaggcttccaaggcctatggcactgagcaatgagttcagagcaccgttctcagctcggaaaatccaacccatgaccagggagccgatggcgataggcagcagctgcgggaagtagtagacggcgcgcatcgtggacgcggccttggggctgaacttcttctgcacaacgtcgaagatcagcgaggagaggatcagaccgagcagaatcgggatcaccaccatggcgatgatcatccagatcgagttgcggaaggaaatccagaaggtatcgtccttcatcagtcggacccagttcttgaggccggcccagaccggcggcctaatgccgcgatagttagtgaaactcagatagatgttccagatgcccggaacgatgatgatccaggtgagcattgccacaccgggaatcaggtacaaccagaaacgattcgaagggctgcccgggatgcgcgacattgcggtttcttccgggtgcttggctttattggtctttgttttcatcagacacttctaaacgtagagcatgcaagattgttgggacacgaacggagacgcgtggcggcaagggaaggagaaaccgaccacacgccttcgttcgcctattggaggaagggaagaggaaagaatcgaatgctaatcgacgacgatgccggaagattcaaggcccttgtcgtagttgtccttcatctggttcagcgcggtcttcacgtcggcggtgccgttgaccagctcctgcagggaggcattgagctcatcgtagaaggtggaggtcggccaatccgggtagaagccgagctggtcttccttgacggcgtcatcgaactgggccacgaattccttggtgccctcatccttgatggaatcgacgtcggagttgatggccaggccaccctgctcggccatgtaattctggacttccttgctcagggtgatgttgatgaacttggcagccagatccttcttggcggagttctgaggaatgacccagacgttaccggaggagccgacaatcttcttggtgtcagggaacttggagtaggaaacattcagaccggcggcctcttccttgaagcgagcgtgccaccaggtgccggagaagaagatcggattggtgccggtcatgaagttctggccggcgtcctcagccttgaggttggtggaatccttggagatgtagcccttgtcgacccattccttgatcttctcggttgcgtaggtgagcggttcggaattccaatcgaccttgccgtcgtacatctcgtaggccttgatgaacttgtcatcggccttggagagcaccagctgccaccacaggtgctgggtcgggtactcggcggagccgacggacagtgcggtgatgccgttctccttgaacttggccatcgcgctttccagctcgtcgaaggtggtcggaatcgcgatgccgtatttgtcgaacatgtcctggttgaagtagagcaggcagtcctcaccgtagttggtgatgccgtaccagtcgccggagcccatcacgccttgctcatcgtacttgccggtgtcggccaaggaaccggtaatgatcttgtcccagccatattcggacacgtaatcgttgagattggtgagcaggccttggctggcgagcaggccggacgtggcgttgcccttgttgtattccataacgtccggagcgtcgtcggagttgaggatctgggaggcgttctggcgaatctgttcgaaggccttcttctcgaattcgaccttgacaccggtctccttttcgaagatttcgatagccttgtcccacgccttgccttgcgctgtggtcgattcctcgtagtgccagatcttgatggaggtggggttctcctcctgtgcgacttcaccgctgccaccacagccagcaacaccgatcatggtcgcaactgcaagtccagcggcgataaatttgcgagtcgacttcatcgttttctccttttcagcttctttactgatgagagaacatttcgacgattattgaaaccagtcgaaatgccatccactggaaatataacggattggcaacgacgttctcaaattatttcgataaatttcgacgttaatttcaacgacttttcgatgtgagcgctctcattcttaacgctgttaattcatgttcggaatactgcataaaatgtgactattcacataaggcgaatagccataaacacccgagctcctgtcagctgcgcgagcatttcgccatggtgccacgtgcgatataacgcgaaggaagcatctccacacggccgacatcgtcacggtcgccgttgagcacctccatcatgagatccactgcacgcgagcaggtttcggtcggcatcatcggcatctcatccacaccacgcggcaaagatcccagcccatgcgtgcatgcggccatcaccgaaacgtcatcgggcacgcgcaatccacgatcctgcagaccgttgagcacgttggccacatgcgccgcattcgtctggcaaatgatcatggaaatcgccgggtcttcaaggaatgtctcatccaacatcagattgacgtcgtcacgcccattgccggtagagggcttgaagatcacggatatgccgagatcatcgccctttttctttgcggcgtcaagaaaacggaccaggtaattggagccgtcttcatacgcgctgctgtccacgccggacaccagcacatggcgatgccccagcgcatacgccttctccatcgcctcgcgacccatacgctcgaaatccaaatccaccgaatacaccgcatcggaattgctcgggtacccgaccgccaccacaggcatgtcgagagcgcgagccacatcggcacgggcatcgcacatcagcacatccaacagcaggatgccatcgaccatgccttcggcggcgacccgggtcagttcctgatcgccgtattcgtgcatgagcagcagaaggtcatacccatatcgcttggcgcgtatggcgagcgcaaagaagaacacggcgtaattcgagtaatcggtgtattcatggagcggcgaactcaacgccagaaccttggtcgggccgctatgccgcagctcctgagtgcgactcggcatatatcccagctctttcgccgctttcagcacctttcgtttggtctcttctttgatggagcgctttccgctcatcacatacgacaccgtgctaatcgatacgccggcacgtgccgccacatctttgatacctgccaccaccacacccccttaatggacccaccacaccacgaatgttgactctttatcatacgttatatacgccggtctcacacattttcatgctttatgcaaaaaatgtgaggcatacgcacatttcccatcaaacgcacaggtgcaagaatggcagcaattcgccattttttgaaatcaccatgtgcgtttgacggcgcgtaagcctcaccttgttctcagcaggaccgaatttctgtgagctccctatagcgctcccctacgcaatatgtccgcaaacgaccacaccacatgggcgatacgcgccaattcggcgtagcggccgatggacagccactgcacacggtaccgttcgaaccacaactccagatcggcggcaagacgggcgcggcgcgaggcatccagcgcacggccggtcacatccttggtgtcacaggcgtcctcgccgccagccagtaccagcagttcctcgcccagtctattgaacaaccgctgcccatccagcatcacccacagcagttccgggttcaatcctcctcgtgccgagccatcgagcaccgcaacaaccgcactgccgcaatcgatcaacgcccggtcgcaatcccggcgtcgttcgagtcgggcatggttccgcaggagcagccggcggcgcgcatcggcgcatcccagcgtacggtcaaacacgagctctcccccgcacgaccgttccacatacgatgccacatccgtattcagcatgccggtgccggaaccgtattccagctccagcacctgcacggcaaggtcccaggggaatgacaccccatcggagtcgatgcggacgaggcaatccatgatgcgaccggactcgtcgccatacaccagaacggagatccgacggttcatctcatgctcatcgatctcaatcggattccacgcgttctgagcgccataacacaggcccggcacgctcagacgcggatcgttgacgtggccgtaatcgccccaatcggtgaccaccatgccttccgcgccatacttgacacccgccaatgccatgtgatacgtgttcagccaggcacccgcataatcggggaagaaccggctccaagcccgcaccgcggggcacacgaactggcgacggccctgcgcggcgatggtctggatgttgctctcgtcgatctgcggctcgtacatccagttgagcatcgtgatgtcgccgggcagcagatccatcgtgcgcgggctttcgagcgcgatgtccgcccacaacatcggctgccgaccatggcgggcgagcgtttcgcacaaatccctgacgaaaccggcatacagttcatcgcggccggcttccggcgcgtcctgcgcggacctgccacgtcccaagtcgaacgtctcatcgccgccgatattgaaggacttcgaacggaacagcggcgcgtattcctcaatcaggcgcgaggcgaaatcatgggccttgggatcggcggcgttcagcgtgtgatgctccatgcgttcgataaagctgaacgggcggtcggcgtcttcggggaactcacccagcccgcgatgctcacgggtgcgcagattcatgtacatgtgcccgaacgtggccaacgacggcaccaactcgatgccgcgacgcgcgcagtactcgtccagatacgtgatgtcggcggccgtgagcggatcggtgccacgccacgcctcgctgagctcgacgaacgcgaaggcatgctcgacatacagctggaactgattgtatttatataaggccagctggtcgacgaaccaggtgaggaactccatcgtcggcactcgtccgcgtgtcacgtcgagactgtaggcgcgcaccgcgaacgcgggcttgtcttggatatgcaggcagggaatggcacgcgaggtctgcccgatgatctgccgcagcgtctgcagaccgtaccgcagcccgctttcgccgccgccacgcacggcgatggtatctgaggcgaacacatccagcgtgtattcgtcatgcgccaatcgtgaatccaggcccagggatatgacggtgccgttcatcgctgccggcgcacccgcacgcgtatctcgcgcatcttcggcggcattggcgctggcgtcgtcttcacctgtggctgcacggacacggcgcgtacggacggtgacgccgcagtaacgctcgagctcgctggacagctgctcaatcggcagcgtttcccaagtctcatcggcaccttcggtggcggcatattcgggaattcgtttctcgatcgtcaccagggacccgatcatagccgtgccatgcgtgtattccaatgtcaccggagcgggaatcagggtgagacacagcgttgcg

SEQ ID NO: 944 - DNA, 5683 bp, Unknown
  R117_24m  MAG No. k141_13859
acgactaagaaccgtcgtaatacgcccgaccgtcttgagctcaagaagttctgcccgcgctgcggcaagcagaccgtgcaccgcgagactcgttgatcgcaagcatcacagctttacaaaacccggcccattcggccgggtttttgcgtattgactccagagccgagtggtagggtgcggaatcagtatccgcatcgcgtgagaaacggcagaaatcccgcgtctgaacgaacccctcgcgggcgttctgccgtttcagccgatgattgccccgatatcgcacctgcgccactaagataggaagtcatgacaagctttgcagacatcaccaccatgggcgtgggcggccccatcgcccatttcatcgagccgaccacgcgcgtggggctcatcgaagccgtggaggatgccgattccaaaggcctgcccttggtcgttatcggtggcggctccaacctgcttgtttccgataagccttttgacggcgtggtggttcgagacgcccgacgcctcatcactgtgccggacgaggctgcaccggtagagggcgaggatcgcaccgtgcatgtcaatgccgaggccggtgccaattgggatgatttcgtggccttcaccgtagagctcgggctcgagggcgtcgagggactgtccggcattcccggcacagtcggcgcttccgtggtgcagaacatcggtgcctacggacaggaagtcgccacttcggtcgaatcggtggaagtctgggatcgagacaccaaaacaacgcgcgacctcacacccgccgatcttcgattcggctatcgatactccgcactgaaggccagcatgtacgccggtcccggccagccggccgaccgattcttcccgacgccacgttacgtggtgctctccgtcacctttgccctgacccactcggccgaaggcacggtaggttacggacagcttgccaaagcgcttggcgtcgaagtgggcgaccgtatggccaccgccgacatccgcaaagccgtgctcgcagtacgtgccgccaagggcatgcttgaggatcccactcgctacgccttgcccgacatggccaccgccaagcgcgaggccaatatcctgaccgatctggagcgtctggcctccctcaatgaggccgccggcgttcccgttggcgatgacggcctgcctgctcccgactacaatcgccacagctgcggctcgttctttatgaatccgattctgaccgccggccaagcggcggccctgcccgaagatgcgccgaagttcgacgcgactctgcctgacggcactcccggcaccaagacgtccgctgcctggctcatcgaccatgccggctgccataagggatataaggtcgatgcggacgcgccggccagtctatccacgcagcacacgctggccttgaccaatcgtgggggagcgagcgcagccgatatcgcagctttggcgcgcgcggttcagcaggcggtcaagagcgcgttcggagtggacttggtgcccgaaccggtctgcgtcggtgtgctgtaatcgcgctattgatcgatggagtggggtattaatcccatatattgcggactctaagtcttattaatagacaagacacgcgggctcttctatactcgattgtcggtattgtgcgcattcggtgcgcaaacaacagagaaaaagaagagcactatgcaactgttccgtacgaaatccgtcgaacagaccattgccgaaacgggtgaagagggccgcaagctcaagcgcaacctgacttggtgggatctgtcaatcatgggcgtggccgtagccgtgggtgccggcatcttctcggtgggcgcgcaggccgccgccttccacgccggcccggccgtgatcatcagcttcctgatcgccggcatcgtgtgcggcgcagccgtgatgtgctacgccgaattcgcttcgatgattccggtggccggctccgcctacaccttcacctacaccacggtcggcgagatcatggcctggatcatcggctgggatctgattctggaaatgctgatggccggctccgtgatttccaaatattggggcgtatacctcaacgatttcatgcgcctgatgggctggaacgccaacaccaacctggcgttcggctccttccatatcgatatcgccccgatcatcatcgtggcgttctttaccacgctgctcgtattcggcaccaagatcggcgcccgcgtggacggtgctatgaccgtgctcaagatcgccatcgtgttctttgtggtgatcgtcggcttcttctacgtcaaggcctccaacttcaccccgttcattccgccgagccagccggcctccaccgtggaaggttcctccgccgtcaccggcgtgatgacccagccgctgtggcagttcgccaccggcatgaccccatccgtgtacggcgttcccggcatcctttcgggcgcggcgctcgtgttcttcgcgttcatcggcttcgacgtggtggccaccgcctccgaggagaccaagaacccgcacaagaacgtgccgctcggcatcggcgtgggcatgctgctcatcatcgtcatgtacatgctcgtggccgtggtgaccaccggcatggtctcctatgccgatctcgccaagcaagacagcccctcgctggccaccgccttcgaactggtgggtgccgactgggccgccaagatcatcagcttcggcatcgtgctgggcctggccaccgtggtcatggtgctgttgctcggcctgacccgtatcgtcttcgccatgagccgcgatggtctgctgccgcgcggcctgtccaagaccggcaagcatggcaccccggccgctctgcagatcgtcgtcggcgcggtggtggcgctcgtggccgccttcttcgacatcggcgtgctctccgacatggtcaacatcggcaccctgtccgccttcacgctggtggccatctccatcccgattatgcgcaagaagcgccccgacctgccgcgcgccttcaagatgcccggcgacccgtggattccgatcctcatcgccgtggccaacttctggttgatgctcaacctgtccgtgctcacctggattcgtttcgtggtgtggctcgtggtcggcgtcgccatctacttcggctacggctactggcatgcgcgcctcggcaagggcgacctgaccgaaacgctgtccgccgaaaccgataaggccgttaacggctgagagcgaggagcgtcccaacgggcgcgtaccctcgtaccagtatctgttaaggaggattccatgccatatgtgatcgctcagccttgcgtggatgtcaaggacaaggcttgcgtggacgagtgccccgtcgactgcatctacgagggttcccgctcgctgtacatcaaccccaacgagtgcgtcgattgcggtgcatgcgaaccggtgtgccccaccgaggccatcttctatgaggatgatctgccggacgagtgggcttggtacaaggatgccgctgtcaacttcttcgctgaagtcggcgatttgggcggcgcttccgccaatggcccaatcggcaaagacccggaacaggtcgccgcgctgccgccgcagaaccagtaagctgatttgcggataagcgctgcacacagcgcatagttcggattgaaccctcggtctatcacggccgagggttcgtcgtatcttaggaacataccgtccaagaaaggggttctcatgggcttccacgcatattcgtcgccatacgactggtctcgtatcgccggcttcaaagccaccgccaaaaccgtgccgggtggcatgatcgacctgtccgtaggctcgcccgtggacccggtgccgagcagtgtccagcaggcgctggttgccggcgcagacgcccccaacgcccatggatacccggtcaccgccggcagcgccgaccttaaggccgctatcgatacatggttccgcgaactgcgcggtgtggatctgaagtccatcaacgctgccgccgtacccaccgtgggttccaaggaggccgtggcgctgatggccagcctgctgcaccttggcgaaggcgatgtggtcgtccaaccggctgtctcctacccgacttacgaaatcggtacccaacttgccggcgccaccgtggtcaaagtcgatgatgtgaccgacgtcgattcctgggtgaatattccgaacgtcaaggccatctggatcaactcgccgtgtaatccctccggcgaggtcatctccgctgactggctgaccgacatcgtggctgctgcccgtcgcatcggtgccgtggtgctctccgacgaatgctatgcgttgatggactggcgttcggtgcgccgcaatacagccgcgtcctctgcgcctgccgcgtctgcatctgctgcgtctgtgcctgccgcaccggtggccgaatccaacgagcccgcctccgataccgcattcagtctctccgccacgccatgtgccctgaattcacatgtgtgtgaaggttcggcagctggcatcctggtgctctactcgctgtccaagcagtccaatatggccggctaccgtacggctctggttgccggcgattaccggctggtcaaggaaatggccgaataccgcaagcagatcggccagattatccccggaccggtgcaggccgccatggctgcgggtctgaaggacacagccgccgtgcacgagcaatggggtcgttaccgtcgccgtctatccgcgctggttgacgcgctgaaggcatatggctattcggcgcaaatgccctccggcgcgctgtacgtatgggtcaaggccaagtccggcgactgctgggccgatatggccgagctcgccaaaatcggcatcatccccagccccggcgaattctacggcgctcccgcctacctgcgtttctccgccaccgccaccgacgaggccatccgctccgcctgcgaacgtctcacggcgtaatgagatcgtaagtggcgttgagccgttcacgccccaaactgggcggccttgcagccgaatttgcggcgtacggcatccagcgcggcctcggcatcatgcaagcgtgcctgtgaggtctggccgcgagcattgtcggcctcttcgagcatgtcatccagtgaaggctgcacggccgtagccgccgccttactgagcgaagacgtgctcatgccggccaagcgaatagttttgggcaggggagtggcagactccgccgaggccggtagccccagcatgactttcagctgccgcacgcattccgggtacagcacgccggccgtatcggtcggccgctccatcgtaaaagaccgggtctgatagctcaggtcggcgaaccgcaacttcaccgtcagcgtgcgcgccaccagccccttgcgccgcagcgtgctggctacttcgtcgcaggccgaacgcagtagcccacacaccacgcgcatatcgcgtgtatcctcggccagggtttcctcggacccaatggatttctcctcgcgcaccgtggtaatttcgcgggaatccaacccgtgcgaggccgcccataatccacgtgccgcagccggggagccagtggcacgagtcaatgcagcctcatccagctgagccaattcagccaccgaatgcacgccccaagcattaagccgcttctccaaagacggcccgatgcccggaatgccacgcaatggcatcatctgcacgaactcagccgagc

SEQ ID NO: 945 - DNA, 37839 bp, Unknown
  R117_24m  MAG No. k141_14092
agcctgttcgttccctgcatcgtcggcgatggcgaggccgagaccggcccgctggccaccggctggcagtccaacaagctcgtgaacccgcgcaccgacggtatcgtgctgccgattctgcacctcaacggctccaagatcgccaacccgaccatcctgtcccgcatctccgacgaagagctccacgagttcttccacggcatgggttacgagccctacgagttcgtcgctggcttcgatgatgaggaccacatgtccatccaccgtcgcttcgccgagctgtgggagaccatctgggacgagatctgcgacatcaaggccaccgctcagaccgacaacgtgcaccgtccgttctacccgatgctgatcttccgcaccccgaagggctggacctgcccgaagtacatcgacggcaagaagaccgagggctcctggcgcgctcaccaggtgccgctggcttccgcccgcgacaccgaggcccacttcgaggtcctcaagaactggctcgagtcctacaagccggaagagctgttcgacgccaacggcgctgtcaaggacgacgtccttgccttcatgccgaagggtgagctgcgtatcggtgccaacccgaacgccaacggtggtgtgattcgcgacgacctgaagctgccgaacctcgaggactacgaggtcaaggaagtggctgagtacggccacggctggggccagctcgaggccacccgtaccctgggtgcctacactcgcgacatcatcaagaacaacccgcgcgacttccgcatcttcggaccggatgagaccgcttccaaccgtctgcaggcttcctacgaagtcaccaacaagcagtgggatgccggctacatctccgacgaggtcgacgagcacatgcacgtctccggccaggtcgttgagcagctgtccgagcaccagatggaaggcttcctcgaggcctacctgctgaccggtcgtcacggcatctggagctcctacgagtccttcgtccacgtgatcgactccatgctgaaccagcacgccaagtggcttgaggctaccgtccgcgagattccgtggcgcaagccgatcgcctccatgaacctgctggtctcctcccacgtttggcgtcaggaccacaacggcttctcccaccaggacccgggtgtcacctccgtcctgctgaacaagtgcttccacaatgaccacgtcatcggcatctacttcgccaccgatgcgaacatgctgctggccatcgccgagaagtgctacaagtccaccaacaagatcaacgccatcatcgccggcaagcagcctgctgccacctggctgaccctggacgaggctcgtgccgagctcgagaagggtgccgccgcttgggattgggcttccaccgccaagaacaacgatgaggccgaggtcgtgcttgccgccgccggcgatgttccgactcaggagatcatggctgcttccgacaagctgaaggaactgggcgtcaagttcaaggttgtgaacgttgccgacctgctctccctgcagtccgccaaggagaacgacgaggctctgaccgacgaggagttcgccgacatcttcaccgccgacaagccggtgctgttcgcgtaccactcctacgctcacgacgtgcgcggcctgatctacgaccgtccgaaccacgacaacttcaacgtccacggctacgaggaggagggctccaccaccaccccgtacgacatggttcgtgtcaaccgcatcgaccgctacgagctgaccgctgaggccctgcgcatgatcgacgccgacaagtacgccgacaagatcgacgagctcgagaagttccgtgatgaggccttccagttcgccgtcgacaagggctacgaccacccggactacaccgactgggtgtactccggcgtgaacaccgacaagaagggtgccgtcaccgctaccgccgctaccgctggcgacaacgagtgataacacctccacggtgttgttagttcgctaacgccaaagggctcgggattcgtcccgagccctttgcttattcataagccccctctgacgaggaggctgtcatgcgaagcatgactgggggagagaaaagcggaagcgaaggcgagagccaagactgaaaacagcccataaattccccaccccaactaatccttaaggatgacaactccccatcaattcaatcctgcgcatgatggaaaccacgccattcctccataggcttggaaccagtatccgggcgcgaggctcggagccagccatgggggagagcacatgcagaaggatcagcagcagaccgcaatcatacaaccgttggacgctaccgacacagtggaatcaagtgtcgacgcccttgcccaaggcgaggcggagaacgcggaagtcgccgaattcaaccgattaatgcgcgaacgtgagacgcgcaagaaaaagcgcgtggtgcatcgcatcatcgccgtcgccgtcgtggcggtactgattatcggctttatggtggtgcacgcgattattaccccgtcagatgggggcgtgtctccggtatccacggcaacggtggaacgtggccatttcgtcgaccaagtcagctccaccggttccatagaacccatcaactccaccgtcgtcgccccgcagatcgacggcaccatcggcgaagtcaaggtgcaggaaggcgcaaccgtcaacgccggcgacgtactgtttaccatcaacaacgacaagctcgatagcgacgtgaatcaggccgatctggctctgcgagcagcgaactcaaaccttaatgccgcccagcagcaggtgaaccaaatcaatgcgaccataggtcaggcacgtaatcaggatggtgaggaaggccaagccgctgccgatgatgcggccggacagctgcccgctgcacaaagcggcgtggagagcgcgcaggtcgccgttcagcaagcacaagccacctatgacgaggcggtcgcccaagccaacaagcgtacggtcactgctccggtctcgggcacggtgctgaccatgagcgcggtgcccggtgccgccatcggagcttcctccgatggctcatccacttccgccggcgcagacggtaaaccattgtgtcagatcgccgacctgagtcagatgaaggtcaatgtcaacatcaatgagctggatatcactaaagtggccaaggaccagagcgccaaagtcacgttctccgcggtgccgggactgacgctcgatgccaaggtggataccatcgccagcaccacgtcgcagttggctgattcctcggcaggcgggcagagtggcaacggcggcgtgggatacgccgtgcgtctcatcattcccgcccctgatccgaaactgaagccgggcatgacggccagtgtgaaaatcaccatgcagagcattgacaacgctttgatggtgccgctcgccgccatcgtggatgagggtaaggagagcagcgcggtcatgctcgagaccaacgccgaaacccatgagttcaagcgggtgcgagtcacggtcaaagccaagaacaacaccaaagccgttgtggaaggcaatgtgagcaagggcgatgtcatcatgcttgatggcgcttcggctgccgacaatactggcgatgctgcttcttccacctcgcaaaccgcggcttcggacgaaagggcacgctgatatgttcccgtttcgttccgacgcgagccgggcaaatcgcggcaaacggcgtaatgagaccattgccgtgcccaccgccacagccaacgtcatcgaggttgaaaacatcaaccgcatcttcgagacaggcgacacctacacccatgtgctcaaaggcatcaccatgaacgtgcgccaaggcgagttcctcgccatcatgggaccatccggttccggcaaatccacgctgatgaacacgctgggcctgctcgaccgcccatcatccggcacctaccgcctgtgcggcatggacgtgcagaatctgagtgatgacgaacgctccgaactgcgcgggtggctcatcggcttcgtgttccaatccttcaatctgctgccgcgcaccagcgtgctgcgcaacgtgatgctgcccctggcctattccgactgcccggtgcgtgaacgggaagggcgtgccatcaaagcactccaatcagtggcgttgagtccggaactgttcgaccgcaaaaccaatgaactctccggtggtcagatgcagcgcgtggccatcgccagagcgttggtacaggacccgccgctgattctcggcgacgagccgaccggcaacctggactccaaaaccggcgatgcggtgatgcacacgttcgaacagctcaagcagcaaggcaaaaccatcgtgctcatcacccacagccccgaagtggccgaacgcgccgaccgatgcctgcacatgcgtgacggcgtactgcgtgaagggatgtaccgatgagaacacgggatctgctggcggaaaccggctccgcactgagggcgaacaaaggcaaaagcgcactgaccattctcggcatcgtcatcggcattgccgcggtgattaccatgacctcactgatcggtggcattcgagactctctggtcggcgaactgggtatgaacgcggcgcgcacgatttcgatttacacggacgtcggcacccttgacgacgaacagatcactgcgatgcgcgaggaactgaccgactacgagtacttctcgccgacgaactatggtgccgcctcgtcaatcgccgcgcccggtaccaccgacaaggtgtcggcgagcatcaccggtgtcgacgagcatttcttcgatgtatccggagtgacgattggtcgtggacgggccttcacatcgagtgaagcaacgagtggtgcaatggtggtgattctcgacgggcagggcgtgcagaagctgttcggcagcgcggacattgacgccatcggcagaaccgtcacgcttgacggcaatgaagcaaccgttgtgggtgtggtcgagtcgtctggattgatgggcggcatgggcggcgacagcgtgaatatctatatgcctgccaccactgtggcgctgcggtttgcgtcctcgaacatgggatacatgcagatctacggactggccaaggacggggttgatatcgaccagctcacggaacagacgaagaccgttgtcgctcgcatcatgcgtatcccaaccgaacagatcgaccagaatctgtcggtcgtaagcgcccaatcctccatcgaccagctttccagcttcatgagcgcattccaggtgctggcgggttcggtggccggggtctcgttgctggtgggcggcatcggcattatgaacatgatgctcaccaacgttaccgaacgcatccgcgaaattggcctgcgccgggcattgggtgccactcggcgtgacgtaaccgcgcagttcctcgccgaatccattgcaatcacagtgcttggaggtcttatcggcacgttgatcggctacttgctgtcgttgggcgccgctggattggtgtccggcatcgccggtggcatgagtatcgcgccagcagtttccgtgcagtccatcggactggcagtgggcatctgcatcgctgtcggcgtgattttcggctactatccagctagacgcgcggcaaagctcgacccggtcgaggcgctacggcatcaataatcgcgtagcaccccgaaatgcagtagggcattgcgcacaccgtcgtggtccacgtcgtcggtgatgtaatcggcggcggcctttggctcggcggtcgcattgcccatcgcgaccccgatgccggcgtaggcgagcatatccgtgtcattgccgccatcgccgaaggccatggtctgcccgcgcgtgatgccgtaatgcgccatgaaccgctggatgccgcgcggcttgccgccatcggccggaatcagatccgtgaaatccggatgccaacgcaccccgcgcacattgctgcacagtcccaccagttcggcctccaactcgggtccgacaaagggactgatctggaaagtctcatgatccagcgcgcgggtgcgcgggtcctcaaaataccgggtcggtgcggttttgcccagtttgctccacgtggcgcgaagcagatcattggactggttgaagtacacgtaatccttctcgccgaaattgcacaccacatcggggtgacggtccagccagtcgagaatcacctcaatatcagcagtatccaaggcctgcgaggcaaagaagccggtgtcatcaaagcaatactgcccattgaacgccaccacgccatcgaacgtcaccggcatggtatccagcaccacgtgcatctgtgaaggcgcgcggcccgtgcaaatcagcaccttgacgcctgcggcctgcagccggtgaatcgcctcgattgtggaatccggcaccgtatgggtcgtgaaactggtgagcgtgccatcgatatcgaagaatacggctcggatatcggcattggcagtatcggtagtcatagcttccattgtcaaagcccctctcgacgtgctttccggcgtgttcggcacgcctatagcgggttatcaaacgcacgaatcccggccattgcatgcgcgccataaaagacacctatacggcaatcggccattttccgtcactttcgcggttcaagcgcgttatggtgttacccgacatcaattttggagagaggaaatccaatgacagcagcaacccagtcggcaactccggtcgctcctaacaataacgagccggtgcgtgtgaaccacaccgtccgcaacgtcatcatcaccatcgtggtcgtggcgattatcgccgtggccgcgttcttcggctaccgcgcgtttgccggtgccaacgagtcgtccgccaagggcagcaagggcaacccggtcaagatcggcgtggtcggcgctaccaaccccgaatgggtcaagttcaagcaggacgccgagaaggccggcatctacgtcgacatcgtcgacttccaggactacacctccgaaaacccggcccttgactccggcgagctggacctcaacgaattccagcacctgctctacttggccaactacaacgtgagcaacaagaaggacctgcagcccatcggcggcaccgccatctacccgctcggcgtgtactccaccaaggtcaaggacatcaaggacctgaagcagggcgacaccgtcaccattccgaacgacgaaaccaaccaggcccgcgctatcggcgtgctcaaggccgccggtctcgtgacgctcaagggcgactggaccgccttctccactccggccgacatcgacgaagccaagagcaaggtcaaggtcaccccgctcaaggccgaacaggtggccaccaccctgaaggacccgaccatcgccgctggtgtgatcaacaacgactacgtggccgacgccggtctcaacccgaaggacgccatctaccaggatgacgccgaatccgaagaagctcgcccctacatcaacgtgtgggtggcccgcaaggcggacgtgaacaacgagacctacaagaagctcgtttccatctaccagcagaaggatgtgctcgacgccctgcaggagaactccggcggtaccgcggtgttcgccgacaagttcagcgccagcgagctgcaaggcttcctgtccgacattgagaaggacgccaaagcccagcagtgagccgtggctgatacgagtgcacgactaacctgtccatagccattgccaccaagcggagcgagtacccgagccaacaatcgggattcgctccgcttccgtgaccggacatcaacaaccagcatcagggagcactatgagcgaccccatcatcaccttcgaccatgtcgtgaaggaattcaaaacacgcggacgcggcgcgaacatcgcacgagccgtggatgacgtcagcctgaccatcgatcgcggcgacatcttcggcatcatcggctattccggtgcaggcaaatccacactggtccggcttatcaacgcgctcgaacgacccacctccggcaccgtgaccgtgctcggcaccgatatcacctctttgagtgagaccaagctgcggcccatccgccagaaaatcggcatgattttccagcagttcaacctgttctccaccaaaaccgtggcgcagaacattgcctacccgctgcaactcgatcactggcgcaaggactatcaggatcgtcgcgtcaacgaacttctcgaattcgtgggccttagtgagcacgcaaacaaatacccctcgcagctgtccggcggccagaagcagcgcgtcggcatcgcccgcgcactggccactaatccggagattctgctcgccgacgaagccaccagcgcgctcgacccggaaaccaccaccgaagtgctggccttgctcaagcgtgtgaacgaggaattcggcatcaccattgtgcttatcacccatcagatgaacgtggtccagcagattgccggccgcgtggccgtaatgagcgccggacgcgtggtcgaatccggcgacgtatacgacgtgttcgccgcgccccagcagccggtgaccaagcgattcatcgccaccgccctgtccggcctgcccgaggaagaccgggtcgagcgattgcaccacgaatggtcgggccgcatcgtcaccgtgctcatccgccaaaaggacgtttccggcagccatggccacgaactcaaggcatccggacagaacatctccgaactcatcgccaaatacggcgtcgaatccagcctgctctacggcggcatcgacacggtcaaggggaccgccatcggtgccatcacctacgaattcaacgggcccggctggcacgtggacgaattcctgcgcgagctcgccgccaatagcgacgtcattgacttcggcaccgccgcaaagcccgtggcttacgccgacgcagttgccggacatgcctcctacgccgaagaccgcgcccatgacccactggcggccgatactgccaccgcgcccgctgtatccgccgccgcacatgaaggagacaacgcatgatcatcctcgccaactcgcgtagcgactggaacgtgctgcgcccactattgttcgaatccatcggccagaccctgaccatggtgctcgtcacccttgtcatcggcggattcctcggcctgatcctcggcgtggtgctctatggcacccgccccggcaacctgttcgagaacgcggtcgtctaccgcatccttgacatcatcgtcaacatcgtgcgcccgattccgttcatcattttcctggcagccatgcagccgctcaccatcgtcgtggtcggcacgtccatcggcaccgtggccgccatcttcccgatggtggtcatgtgcaccttcgccacttctcgtctggtcgaacagaatctcgtgccggtcgacccgggagtaatcgaggccgcgcgttcgatgggtgccggcaagctcaccatcatccgcaccgtactcatccccgaagccctggcaccgctgatcctggcctacgccttcctgttcatcggcgtgcttgacatgtctgccatggccggctacatcggcggtggcggtctcggtaacttcgccatcgcctacggctaccagaagttcgaccagaccgtcacctggacggccgtgatcatcatgatcgtactggtccaggtggtgcagggcatcgccaacgccatcgccaaacgactgctcaaacgccagcaataacaaggcatactgaccccatagatcgcggccctcgtcaatatgaagcgagggccgcaatatattcttcgcgctactagaatcgggaaccatgagtgaacatatcgacatcgaccacgaactcatcaccatccgccactacctgcacgcccatccggagcgtagtttccgtgaattcgacaccagcatctatctgaccgaccagctcaaggcgcacggcatcgagatcctgcacaacccgctggagactggtgttgtggggctcattcagggcgaggccggtcccgggccgcgtatcgggctgcgcgccgacatcgacggcctgcccatcgtggaagactccggactggagttcagctccgtcaatgaaggcgtgatgcacggctgcggccacgacctgcacatgaccggtctgctcggtgccgccttctggctcgccgagcaccgtgacaagttcgccggctcaatcaagattctgttccagccgagtgaggagaccggccaaggcgctcgcgccatgatcgacgccggactcgtggatgacgtcgaagccattatcggcacgcacaacaaccccaactatgcgtccggccagctggccatcggcgtcgagccgatgatggccggctgcgtgaaattccgcgtgaccctccacgcccaaggcacccacgccggctacccgtacaagggcaccgggcccatcgaagcgctcgccagtattattctgagcctgcagaccatcgtgagccgcaacgtcacgcccttccacccgctggtgctgtccgttaccgaagtgcacggcggccatgtgtggaacgtggtgcccgccgaagccggattccaagggactgtgcgctatttccacaagtcggatggcaatctggtcggccgccgattcaaggaagtggtggaacacaccgccgaggcatacggtatcagcgccgatgtggtctgggatgatttccaagacccgctggtctccgatccaggtcttgccaaggccgtggcggcggatgtcaacgactacgcgcagctcgaaccgatacgtcagtcgatggcgggggaggacttctgcgaattcgccaaggtgacgttgccggtgttcgcgttcgtcgggtcaaacggccaggaaggttgcgccgactggcatagcccgcatttcgtgggtctcgacgaatccattcccaccttcgtcaacttctacgtcaacgccgccctgcgcgtgctcaacgagctgaggtaaatccttttttggctcccctctggaggctgaggcgttaggcagacagcccaatgggctgtctgcagccgaaggtgaggcgacagccgaaccagatatgcgcgggcctcgcccgtccataagtgcaggacgagctatcagcgaagctgactgaggggagtggcattcgttcattaggtcgattcatcgtccattaggtcggtgaacggcgatactggttgttggaatcgcgccattgcaacgactgatatcgcattgcagtgacctaatgaacgcaaaaacgacctaatgaatgacgccaagccggaagagcaggcaatccgacgccatacgcggctacactaagaagctatgacacagcttcgcttcgcactcgcccagatcgacacctgcgtcggcgcgctcgatgccaacgccgccaaagtgctcgactactcccgtaaagccgccgcagggaatgcccaagtggttgttttcccggaaatgaccctcaccggataccccatcgaagatctggccctgcgccgcaccttccgccaagccgcatgggacaaggccaacgaactcgccgcccagctcaacgacgacggcctcggcaatctgttcgtggtggttggcaccgtgggcactgatcgtaagacctccaagccgcgcaaccgactggtggtattgcatcagggcgtggtctgggccggctacgacaagcacttcctgcccaactacggcgtgttcgacgaattccgtatcttctccgccggcgaccgttccgtgaccctcgacgtggatggtgccaccatcggcgtggccatctgcgaggacatctggcaggatggtggcccggtggccgacctggccaccaagaacatcgacctgctgctcaccatcaacggctcgccgtatgaggaaggcaagaccaacacccgtttcgagctcgcccagcgtcgtgccgccgaagtcaacgccccggtcatctacctgaatcaggtcggcggtcaggacgacctggtcttcgacggtggcagcttcgtggtcgatgccgacggcacgcttatcgaacgcggcccgatgttcatggaaaacctgacgttctgggacttcgattccaccgccgaacatcaggtcaaggccgagatcgttccggaactcgacccggacgaagaggtatacactgcctgcgtgctcggcctcaaggactacatggccaagaaccacttcaccggcgtgacgctgggcctctcaggaggcatcgactccgcactggtagccgccatggcggccgacgcatgcggcggcgagaacgtctggggcatctccatgccctccatgtactcctccgatggttccaaagacgacgccgctgacctggcctccaacatcggtgcccattacgaggtccagcctattgagccattgttcaacgcctaccaacagcaacttgaccttgatggcgtctccgccgagaacctgcaggcccgcatccgcggtgtgatcgtgatggccagttccaattctcgcggcctgctcgccgtggccaccggcaacaagtcagagctcgcctgcggctactcaaccatctacggcgatgcggtcggcggctacgcacccatcaaggacctgctcaagacccgtgtctgggagatcagccgttggcgtaacaaggccgcggccgcaggcgtcggtatcggcgggctcaagatcgtgggcaacgaggacggcaacgccggcatcccgttgaaggacggcgtgatgattccggtctcatccatcgagaaggctccctcggccgagttgcgccccgggcagaaggactccgactccctgcccgaatacgcgctgctcgacaaggtgctcgctgcatacatcgagcacgcgcacggccgcgccgacctgttggccgacggcttcgaccaggacaccgtggacactgtgatgcgattggtggaccgcgccgaatggaagcgccgccaatacccgttgggaccgaaggtcacggccctcgcgttcggccgcgaccgccgactgcccgtcaccaacgcgttcagggaataaacatatattgctcccgccagcgggagcaagtaataccgttgaggaggtaccaatgacagacgataacaagaagcagtggtatttcaacaccgtcaagaagcaggccgagctgggcatggtctcaccgattgaacagcgcatgggtccgtacaagaccaaggaagatgccgaacacgcctgggacatcgtggtggaccgcaacgccagatgggaggaggagaactggcgctggaagaactacggtgtgaaatccgcgcaagcgaacgatgaagactgacggccaaaacagacggatacggttctgctgtcaatctcaagaccgaaccgctcaccaagccgctcatacgaacatcacagtatgagcggtttcccatatctggagacgtgcaatagccccatcaatacctagaaaccattggaatggtagcgttcacaaaaaacaatgtgagatagctcactcccaatttcggcttttcccaagcaagtgccaactacactgttgaaccaagggttccgtgaagatgcgaaacctacaaccccatttaaggagtgacatgaccgcagtagaaaatgcagctgtctcccaagaggagctcgacgccaaggcatgggccggcttcaccgagggcaactggcagaaggatattgacgtccgcgacttcatccagaagaactacaccccgtacgagggcgacgagacattcctggctcctgccaccgagaagaccaagcacctgtggaagtacctcgacgacaactacctggccgtggagcgcaagcagcgcgtctacgacgtggacacccacaccccggctggcatcgatgccttcccggccggctacatcgactccccggaagtcgacaacgtgatcgtcggcttgcagaccgacgtgccctgcaagcgcgccatgatgccgaacggcggctggcgtatggtcgagcaggccatcaaggaagccggcaaggagccggatccggagatcaagaagatcttcaccaagtaccgcaagacccacaatgacggcgtgttcggcgtctacaccaagaacatcaaggtcgcccgccacaacaagatcctcaccggtctgccggatgcctacggccgtggccgcatcatcggcgactaccgtcgtgttgccctgtacggtgtcaacaagctgatcgccttcaagaagcgcgacaaggactccatcccgtaccgcaacgacttcaccgagccggagatcgagcactggatccgcttccgcgaggagcacgacgagcagatcaaggctctgaagcagctcatcaacctcggcaacgagtacggcctggacctgtcccgccctgctcagaccgcccaggaagccgtgcagtggacctacatgggctacctggcctccatcaagtcccaggacggcgccgccatgtccttcggccgtaactccgccttcctcgactgcttcatcgagcgcgacctcgaggccggcaagatcaccgagaccgacgcccaggagctcatcgacaacatcgtcatgaagctgcgtatcgtccgcttcctgcgcaccaaggactacgacaacatcttctccggcgacccgtactgggcgacctggtccgacgccggcttcggcgacgatggccgtccgatggtcaccaagacctccttccgtctgctcaacaccctgacccttgagcacctcggacctggccctgagccgaacatcaccatcttctgggatccgaagctgccggaaggctacaagcgcttctgcgccaagatctccatcgacacctcggccatccagtacgagtccgacaaggaaatccgttcccactggggcgacgacgccgccatcgcatgctgcgtctccccgatgcgcgtgggcaagcagatgcagttcttcgccgctcgcgtgaactccgccaaggccctgctgtacgccatcaacggcggccgcgatgagatgaccggcatgcaggtcatcgacaagggcgtcatcgacccgatcgccccggaggccgacggcaccttggactacgagaaggtcaagaacaactacgagaaggcgctcgagtggctgtccgaaacctacgtcgaagcgctgaacatcatccactacatgcacgataagtacgcctacgagtccatcgagatggccctacacgacaaggaggtgtaccgcaccctcggttgcggcatgtccggtctgtccatcgccgccgactccctgtccgccatcaagtacgccaaggtgtacccgatcaccaacaaggaagccaagaacctcgaaggccacgagtacgagtacgtcgaaggcgccgacgacgatctggtcgtcggctaccgcaccgagggcgagttcccggtctacggcaacgacgacgaccgcgccgacgacatcgccaagtgggtcgtctccaccgtgatgggccaggtcaagcgcctgcccgtctaccgtggcgccgtcccgacccagtccatcctgaccatcacctccaacgtggagtacggcaagaacaccggttccttcccgtcccgccataagaagggcaccccgtacgccccgggtgccaacccggagaacggcatggactcgcacggcatgctgccgtccatgttctccgtcggcaagatcgactacaacgacgccctcgacggcatctcgctgaccaacaccatcacccccgatggcctgggccgcgatgaagccgagcgcatcggcaacctggtcggcatcctggacgcgggcaacggccacggcctctaccacgcgaacatcaacgttctgcgccgcgagaccatggaggacgccgtcgagcaccccgaaaagtacccgcacctgaccgtgcgtgtctccggctacgcggtgaacttcgtcaagctcaccaaggagcagcagctcgacgtcatctcccgtaccttccaccaaggtgccgtcgtcgactgatgaccaaccccgcgaaccgcggcaatgactaactgaaggggtggggcacggctccaccccttccttattttccacagactttcgcatcatttggaacaggaggacaactatgcccgcaacacccacgttccgcaccacgaccaggcatatgctcaaggaatcgaagacctatgcctcgcagactttgatgggcggcctgtccggctttgaatccccaatcggactcgaccgacgtgaccgcctttccgccctgaaatccggcgatatcggcttcgtccactcttgggacatcaacacctccgtggatggaccgggcacccgcatgaccgtattcatgtccggctgcccgctgcgctgccagtactgccagaacccggacacttggaagatgcgcgacggcaagcccgtctaccttgacgccatgatcaagaaggtcgatcgttacaaggacctgttcaaggccacgcatggcggtatcaccttctccggcggcgaatccatgatgcagcccgccttcgtctcgcgtgtgttccatgccgccaaggagatgggcgtgcacacctgcctcgatacgtccggcttcctcaacacgagctacaccgacgagatgctcgaggacatcgacctgtgtctgctcgacgtcaaatccggcgacgaggagacctatcacaaggtcaccggcggcaccttgcagcccaccatcgattttggccagcgactggccaaggccggcaagaagatctgggtacgatttgtgctcgtgccgggcctgaccgactccgaagagaacgtcgaaaacgtggcgaagatctgcgagtccttcggtgatgccgtcgaacacatcgacgtgctgggattccaccagcttggccgcccgaagtggcacgaactgcgcatcccatacccgctggagaaccagaagggacccaacgccgccacccgttcgcgggtggccaaccagttcaaggaccacggcttcaccgtgttttaaattgcagggccgaaccgcgcgtaaataccacgattcggcccgttcgcccataccctagagatatggccgacatctacgcatttcctatgggagcgtccaacgacggacgccccgtacgccctcagggtgtgccggatgaagtatgggcagctgtcgaatccgtcagcaccatgaagcgcatccatgacgtgcgctatcgggagattcccgtgccttccaccttggccgattatggtatcggcgtggaattcgaagcgggagagcgtgccctcggcgatgccttttccgccggtcttggcaacgatgccgaatcacgaatcgccacaggctggatcatgatgctttatgctcatgagctgcgcattgaccgggattccaactggcgttgcgtggcgttcgcgcggctgccgctggaaaccgccgaaaacgattctctgacccccggcatgtactgggatgacatgtgcgactatttcgacggcatcgagccggattcggtatccggcacagtcaccgtgacccaaaacacggcttttggttcgatggccggctccaccagcgccgggtgtgagattcgcgtctcatggaccccgcttgacgggaccggaccggacggtactatggacgccggcgcacaaatccgctcgtgggccgcattcatcagatccaccatccgttttgaggaggatgacgccagttgagtgacgtccgtgacaccgaaccccgactgctgaaagagcctcgcgggggagtgcccgatgtcacttcgtcgctggatggctatcatcgagcctgcgatgcgctggccgaggcgacgggctcgctggccgccgacgccgaacgggcgtccggattccgctatggacatgaggattggctgattcagttcaaacgtgaaggtgcgggcatcgccttgcttgatcccgtcgccctgacacgggccggagctgactggaatgaattcaatgacgccgtgggcgatgctacatggattctgcatgattctctgatggacttgcccggattcgccgaaatcggactcaaacccaaggccttgttcgacacggaaatagcggcgcgattgctcggcctgcaccgcttcggtctggccgccgtcaccgaacactacctcggcatcacgctggccaaagagcattccgccgccgattggtcctaccgtccgctgccgcgcgactggcgcaactatgcggcgctcgacgtggaggtgcttatcgaactcgaaaccttgatgcgtcgtgacctgaaagccacaggcaaggacgagtgggccgctgaagagttttctcacgctttggttgcgggccttgccccgcgcaaacctcatccgattccttggctgcgtatctcgcgcatcacccagctgagtcgtgatccgaggggcttggccatcgccaaatccctatgggaggagcgcgaccggctcgcccggcgatacgacatcgctcccagcctgttattgaccgattcgtcaatcatcgatgccgcgaccaacaagccgcacaatgccgcccaattccgcgcactccgatccctgaacgagcgtgtgcgcattcataccggcaccgagcaggacaaaatgttcgagcggtacgcgccgattcagcgtacggtcaagccgaaggtctggaagcaggccatcgaccgcgccatggccctgaagcccacccaatggcctaccatgcccgcccccgaacaggacgaaaacggtgtggtgaacgcgccccgatccatgcgactgtggcaacagcgccatccggagcgttatgaccgtctgcagcgggtacggcgtgtgatcaaccgcatcgccgaagacacccgcacgccggccgagatgatcatcaagccacagatcctacgcaacctgtgctgggtggaagacccggtggaagtggacgtcgagacgttcctgatcgagcagggcgcaagaaactggcaggtgaaactcattgcaccgtccgtaagtggcgttatcatgtagaggttgccttacggcagaactgtaagaaataacgacttttgaggagtcattagcgtgaagatcagcgttcgtaacctcgagcccaccaaggtgaagctcaccgtcactgttgaaccggaagagctcaacccgtatctggatgcggcccgtaaggaaatcgccaagcaggtgaacgttcccggcttccgtaagggccacgttcccggcaagatcatcgaccagcgcatcggtttcgccgccgtcgccggtgaggccgtgaacgacgcggtcccggagctgtactccaaggccctggatgagaagaagattcgtccgatggctcagccggagttcgacgtgcaggatgttccgcagtccgccaacgacgagaccaagctgaagttcaccgccaccgtcgagcgtcgtcctgacatcgaactgccggaaatcgacggtcttgagatcgccatctccaagccggaagtcaaggatgaggacgtcgacaagcgcctcgagaccctgcgtcagcgcttcggcaccttggtcggcgtggaccgcccggccgccaagggcgacttcgccaacatcgacctgactgctgagattgacggcgagaccgtcgactcccaggaaggcgtgagctacgagctcggctccaacaccatgctcgacggtctggacgaggctcttgacggcctgtccgccggcgaggagaccaccttcgaaggcacgctggaagccggcgagcacgagggccagaaggccaccgtgaaggtcaaggtcaactccgtcaaggctgaggaactgccggagctgaacgatgagttcgcttccgaagcttccgagttcgacactctggacgagctcaaggctgacatccgcaaggctgccgctcaggacgccgaaggtcgtcaggccaccgaggctcgcgatgccttcatcgccaagctgcaggaaggcctcgagatcccggtgccgaagggtgtcaaggccaacatggtcgaagagcagctcaagggcatgaccccggacccggagaaggccaccaaggagcagaaggctcaggccgaggagaccgtggagaaggatctgcgcgatcagatggtgctcgacgctctggccgagaagctggacgttcaggtgtcccagtccgacgtgttcaacttcctcgcttccatcgcccagcagtacggcatggacccgaacaacttcatccaggccatcatcaagaatggccagcttggctccgctgtgcaggaagtcggccgttccaagggtctgctcgccggcatgcgcgccgtcaagttcaccgctgatggcgaggttgtggacctctccggcttcctgggcgaggccgctgaggacgaagagtccgagtccgtcgaggccgcttccgctgctgccgccgtggccgacgaactgtccgccaaggatgacgccaaggacgctgagtgagcatagcctcatcgcgttagcgtgattgtttgagcccggaatcgtgtttcacggttccgggctcttcctattctggtaaaaggactatttctttggctcccctttggggggagctgtcgggcgtagcgagactgaggggagttcccaaggcatactcgttgcatagcgtgcggaggttgacatgcagccaacggttactatcaaacgccttggttggctcgctgcggcgaccattgtgctcggcgtgctcatcggtgtgggagcaggtctgctgaccctgttgctctacggcgttgaacatgtgctgctcggctacatcgaaggcccagaattgtctggtccattcggcgtgcccgctgcacgccgtgtgatatcggtgaccgtgggactcggcatcgcgggcattatctggtatctgctacgacacaaaacgactgtggtgccctcagtcaagaaggccgtggcgggaaagcgaatgcctttctggcaaaccattgtgcatgtggtgttgcagattttcatcgtcggctccggtgcctcgatcggccgagaagtcgccccacgcgaactcggcgccatgatcgcgcaacgtttttgcgacctgttccatatcgagggcgttgatggtatcgaccggcgcatggtggtggcagtggctgccggtgccggtctaggaggcgtctatgacgcgccgctggccggcatgttcttcgccgtcgaaatcctgttggtggatgtgacgatcgaaaaggttgcgtttggactgggcgtgtctgccattgccgcattcgtggcggttgcgatcaaagggcattgcctgttctacgacatcaccgccatgcaaccggaatccacgccaacgttaatgctgttcgctctgatctgcggtgcggcatgtggagtgggcggcgcattgttccgaaaaggttcgcaatgggcggaagcgcacaagccgaccggcaaggccattctgtggcagatgccgctggctggtctcatcaccggtttggtggcgattgttgtgccgcaggtgatgggcaacggccgtgccgcagcgcaacttggattcagcacgttcattcctgaaaccgccggcactgctggtgccatgcagtcggcatcttcagcggccgcctctccatggaacttgctgacgggcggcggtaatgtatccgattcggcctctggcgggggagcgggctctggaatggcctcgttttgggccatgcttcagggtgggagcggctcttctggatccgtgatgaacgccggtttcccgctgtcccagtccaatatctggatgttgctgggtgtgttggcactcacctttgtcgccaaggcgctggtgacgctgatgaccattcgctccggtgcatcgggcggtgtgctgcagcccggcatcgcattaggttccacgctgggtgcgatgctcggcctcgtatggatactgatgtttccgactgattcggtaaccgcgtgtgccttgatcggtgcggcttcgttgctttcggcctcacagcaggcaccgcttatggccatgtgcttggtgatggagctgaccgaagcgccgattaccttcttcgtgccagtcggcatggccgtggccacgtcgtcgttgatatcaaagtggttgctgagtcgtaagtaagtagatgcatatattctggctcccctctctgaggggagctgtcgaacacagtgagactgaggggagccgaggtaaagaaagctatgtcagaaaacaccgaagtccgtgcggcacttgaatcgcttgccgctgagccgctcactgagcagattgactactatcgaaagccattcatggtgttgtgggccgccattcaggaggccgccagcgatgtggccgaagactacgacttgcctgcggatatggcccaattatgggtggccgaacagatgcgccaagtcgccgattcactggtcgatcggctcgcggaaaaagccgtggcccatggtgccagcaagtccaacgtggcgcgagccgccggtgccagccccgccaatgccgcccgtcgcttcccgcgtctgggcgacgatgccgcctcccagacccgcctcctcattgacgacgtcctcgacaccttggaataacccgaaatccctacgctacccgccaaaaagcacgcgaaaagccgccttcagtcgcttcaaggcggtagtctgaacaatgttcgagtaattagaaggagaatcaaggtgagcaatacctttgcgaccttgccggtcatggcgggcgatgacgtcccggccggccccgtcgacccgattttcaaccgtctgctcaaagaccgcatcatctggatgggtgaagaggtcaaggacgatatggccaaccgcatctgcgctcagctgctgatgctggccgccgaggacccgaagaaggacatctggctgtacatcaactcgccgggcggctccatcaccgcaggcatggccatctacgacaccatgcagctcatcgagcctgacgtggcgaccgtgggcctgggcatgtgcgcttccatgggccagttcctgctgagctccggcaccaagggcaagcgttacctgacctcgcacgcccgtgtgctcatgcaccagccttccggcggcatcggcggcaccgccactgacgtgcgcatcaacgccgagctcatcatggacatgaagaaaaccatgagcgagctgaccgctgagcagaccggccacaccctcgaggagatctaccgcgacaacgaatacgaccactggttcaccgcccaggaagccctcgactatggcttcgtggacaagctcgtgaccacgccggacaccatcggcaacaaccagcagggggagtgagactcatggcaagtgaagaagcaaagttcgccgcccgtgccgaccgcttggccggccgtcatggcgtagccggtttcatgccggccgccgcccgcgcagcccagcccgcgccgaccaaccgttacatcatgccgcagttcgtggagaagaccccgtatggcatgaagacccaggacgcctactcccgcctgttcgaggatcgcatcatcttcctcggcgtgcaggtggacgacgcctccgccgacgacgtgatggcccagctgctggtccttgaatcccaggatccgaaccgtgacgtgatgatgtacatcaactcacccggcggttcgatgacggccatgaccgccatctacgacaccatgcagtacatcaagcccgacgtgcagaccgtgtgtctcggccaggccgcctccgccgccgccattctgctggcctccggcaccaagggcaagcgcctgatgctgccgaacgcccgtgtgctcatccaccagccggccatcgaccaaggattcggcaaggccacggagatcgagattcaggccaaggaaatgctgcgtatgcgcgaatggctggaggagaccctcgccaagcacaccggccaggatgtcgagaagattcgccgcgacatcgaagtggacactttcctgaccgctcctgaagccaaggaatacggcatcgtggacgaggtgctggaacaccgccagtaaaacttccgaacattgcaataccctcggtcggcaacgaccgggggtattgtatttcaaggatgacaatgataatgcgcagcgtggcggttcgacggtgcggcgcggtcggcaaaggagaatcatgggacgtgtggtgagctacaacgaggacgtaccccgttgcacgttctgcggcaaaaccgaacgtcaggtcagaaaactggtggccggtcccaacgcctccatctgcgatgaatgcatcgccctgtgcgtggacatcatctccgaggagcgtgtcaaagatgccgaggtcaattcgctgagcctgcccaagcccgctcagatcttcgattatctcaaccgctacgtcatcggtcaggagaacgccaagcgcgcattgtccgtggccgtatacaatcattacaaacgcgtcaatatggagcttcaggagtccgctgagcagcttgacgggaataacgggcacggtggccagaccggcaaacaagccaagcaatccgctcccgcccagacgcgtgctacccgccgcaacagtgaccctttggctgacgttgaggtcgccaaatcaaacattctgttgctcggccccaccggtgtgggcaaaacctatcttgcgcaggcgttggcccgcgtaatgaacgtgccattcgtcatcaccgacgccaccaccctgaccgaggccggctatgtaggcgacgatgtggaaaccgtgctccaacgtcttctccaagccgcggatggcgacgtaagccgagcccagcacggcatcatctacattgacgaaatcgataagatcgcgcgcaaatcaggtgagaacacctccatcacccgtgacgtgtccggtgagggcgttcagcaggcgttgctgaagattttggaaggcaccatcgcctccgtgccgttggagggcacgcgcaagcataaggagcaggacactgcgcagatggacacacgcggcatcctattcatctgcggcggtgcgttcgtgggactgacggatattgttcgcaagcgattgggccgtcgagagaccggcttcggcgcgaattggcacgacgccgacatgaaagacgaggaattgctcgaacaggtcaatgccgatgatctggccgagttcgggctgttgcctgagttcatcggacgtttgccggtcaccagtgtgctgaaggaacttaccgtagacgatctgacggcgattctcacccagccagccaacgcgctgatcaagcagtaccgtaagctgttcgccgtcgacggcgtcgacctgcagttcaccgaacaggccattcgggtgattgctgatatcgccatcaagcaggggaccggcgcacgcgggttgcgttcgattatcgaacgtacgttgcaggacacgatgttccagttgccgagtttggatgatgtgaagcaggtgattgtggacaaggcgtccgtagagggttccagtacgcccaaactcttgcgcgaagccgtggatgtgccgcagggacgcctcaaagttgcgtagtcggttttgcttgaccgagtccgtacacatgcggcgtgaggccagtaaatacgccgttgcggtggcgattaggatggtgcgactcgccgcaacacgccgagttgcattcatctgaacggcgtgtattatatatcgagttgtctgaaaagacaacatgcgccagtagcccagcggattagagcagctgactacggatcagcaggtcgcaggttcgaatcctgtctggcgcactcccgaaccacggggacaacagtggtatgcgccagtagcccagcggattagagcagctgactacggatcagcaggtcgcaggttcgaatcctgtctggcgcacagtaagcctcgaaagcgaaatgcttccgaggcttttccaattgtattggcccgtttgagtcggccacacaggggtggggtaaggttgcccttcgcgactcagcccggagcggaacgtcctgagatattccgtactattacatacggttcatccaagagagtacagcaaggagacgcgatggccacgaccgccggcgcgaagaagggactttggtccaccatcaggcgaatcgccgcctcagaccgtatttccggactcatcatgctcggcttcgcgctcaccggcctggtgctcgcgaacctgcccgccaccgcgcatgcgttcgagaccgtagcggaaacgcatctgttcatcccctacaccaatctcgacctgccgattggccattgggcccaggatggtctgcttaccatcttcttcctgaccgtgggcctcgaactgaagcaggaactcaccaccggctcgctcgccaatccgaaggcggccgccgtgccgatgctgtgcgcggtgggcggcatgatcgccccgcccatcctgttcctggccgtcacggcattgttctctcagatcgggcctggtgaacccggcacgctgattctgaccaccaccggcagcagcattccgttctcggagatgtcgcacggctgggcagtgcccaccgccacggatatcgcgttctcactggccgtgctcgcactgtttgccaaggccctgcccggttcgatccgcgcgttcctgatgacgcttgccaccgtcgatgacttgctggccattattctgatcgccgtattcttctcctcgatcaacgcctggtattggttcatcggcatcgtcgtgtgcgccgtcatctgggcatacctcgtacgactgaaaaaagtgccgtggattgcggtcggcatcgtcggcgtcctcgcttggatcatgatgttcgaggcaggcgtgcatcccacactggccggcgtgctggttggcctgctgactccctcccgtgaaatgcacggcgaactttcaccgcgtgccgaacgctatgccaacaagcttcagccattctccgcactgctggccctgcccatcttcgccctgttcgccaccggcgtgcacttcgagtcggtgagcccgctgttgctggcttcgccgttggttatcgcactgattgtggctttggtggtcggcaaacctttgggcatcatcaccaccgcatggctggccacgcatgtgggcgggctcaagatggccaaggggctgcgcgtgcgcgacatgattcccgctgccgtcgcctgcggcattggcttcactgtgtccttcctcatcgcctcgctggcgtacaagaatgcggaactttccgctgaggcgcgcttcggcgtgctggtggcctccctgatcgccgccgcgatttccggtgtgctgctgagccgtcagtccaagagattcgagaaggccgcagccgcagcagcggccgatgcggaggatgacgaatcgattgatggcgatggcgctggtcagaccggtcgcaccacaaagtccaccacgcccacggaacaccccggcaccctcgccgacggcaccgccagtgtggagattgacttccgccactgatggcttagacgatccctactccattgttggccttgtttcgtgaaaaccgtacgctgaggcgcgctcaccgtacgttcttcacgagatgaggccttatttcgtgaaaaccgtacgctgagtgtcactcaccgtacgttcttcacgaagtcaaggatgatttcgcggaaaacgtatgcagagcttcaggcgctagaatgcgaagagtcgatagcaccgtacaggaggatattggatggcaaagaagcagaagaaatccaagaagaacgacggcaaaaaggccgctgaagcaaagaatccagctgaggccgcatccaagtccacagtcgtggacgatatggaaccattggaagccacagccgcgaatgatgcggcaacgttggaggccgagacggcaaccgaggctgccgcaacgccggtgaacccggtcgacttggaggacgtctcgccgctgggcgacacctatcatcgcggcccggtgattctacgcggccagatgattccctcggacaataccaccgccaatctgctgaaacccgaccaggacaccgactggctgcacatggacccatggcgtgtgctgcgcatccaatcggaattcgtggacggtttcggggcgctcgccgagctcggacctgcggtctctattttcggctccgcacgcacccagcgcaccgaatcgatctacaaggcggcccggcgcatgggtagccagatagccaagcgcaacatcgccgtcatcaccggcggtggtcccggcatcatggaagccgcgaataggggagcggcactggctggcggcaaatccgtgggactcggcatcgaattgccgcacgagcaggggttgaaccagtgggtgaacctcggcatgagcttccggtacttctttgtgcggaaaaccatgttcgtcaagtattcctccggcgtgatcgtgtgcccgggcggcttcggcacactggatgagatgttcgagctgctgaccttggtccagacccacaaggtggcgaatattccggtggtgctctacggcaaggaatactggcaggggctctttgactggctcaacggtccggtggccgagcacggcatgatttcggcaatcgacccgaaactggtcaccgtgaccgatgacgccgacgaagccgtggaggtggccgtcagtgcaattgtgaggtaagcgagatagagtggctcccctctccgaggggagccaagggcagagttactttttgtaggcgatgagcaggcctgtgccgtcaggggtaagcgtggactcgaaaccttcgtcatcttcgacggtggtgagcagctcacgcatggcgatggccttgtcgctgcggtcggccggattaatcatgccgccctgaccgtcctccaacgccagcacatcggtgaacacgatcacgccgtgcgcgcgcagcagacgggaggcctgggcgaacgtggcggcatagttctcggcgtcgcccgccaccacgatcagatcgtaatcattggcgttgaggcgcggcagaaacacgctggccggggcgttcaccgcacgcaacgtggtgtcggtctcatcctgcagttcggcgaacgccttgcgaatcagcgcgatgccctgagcggtggaatcgaccgcagtcagcaggcccttgttatccaacgcatgggcgagctgcaaggtctccaccagcgagccggtgcctacggcgatgaccgaagcggcgccggtgatgcgcaccagcatgcccagcagacgggcctgcgcggccgaaccctgcaactggccggacttgtcggcggccgtacgggcgtcggtcaacgcattggattcacgttcgcgcgcgtgttcctcggtgaattcccatgccttggcgaggttggtgtactgtgttctgtccataattcgttcctttatgtcttctctcgtgcgggcacccggtggatgtatcgactacgtgttgcagcgattgccgtagctggtcgtggcgcggcttagcgctcgcggaccttggccacgatctgccacatctcctcgcccacatcgatgccgcgcgggcagtggcgggagcaggcgcgcacggactggcaggcggccacgccgtcggcggtgtcgatggcgtccatacgctccatggccttggtgtcgcgcgaatcgttgacgaaacgggaggcccaaatcagcgaggccgggccgatgaaagcgtcgccgccggcgtacaccgggcaggcgccttcgcacacgccgcaggcgatgcagttgctcagcagctcgtatttggcgagttgttcggggttctgcaggtattcgaacacgtccaccttgccttcggcggtggtggcgagcacgccgtccgcctgaagatatggggtgagcttccttatttggttgagcatcgggtcgatgtcggcgatgaggtcgcgctgcggcgggaagccgggcagggatgccagttcgatgactcccagcgagccgtttgcggccgagtcctggtcggctgccgcgtttgcgtcgttttccgcggaatcgtcggattcttcggactcggtgccggtgtgccggaacccttcgtcatcgacttcggggatggcgccgggctgcttggcccaatcgcggatggtggccgtgcacagcagggtgggggtgccgttgatggccacggcgtccgaaccgcacatgccgtgaccgcacgaatagcggaaggccagcgtcgggtcgacggtgcgtttgatggtcagcaggcagtcgagcacggtgtccgaggggcgcgcgggaatcgtgtattcctgcacccactgcttgccgcgcggacgacggcgtgccgccgaatccgagccgccgccgaatggggagcttttcttggcgaacgggctgccgccgcgtgcacgttcggcgcgctcgggtcgcggcgtgaaacgatgcacttgcagggtaaccgtcgtgttgctcgcctcagccatgttctgcctccatgaaacagtgggatgtcaagtccaatatcagccaacctattgtgccacaagccctaggcggcttggtattaccaccagcggatcagtactcgcgcttcttgggtggatagtcggtgatgtgcaccggcttgaaacttgccggaccatcatcggcgaccatcgagtgagcaaggaaatgctcatcgtcgcgttcggggaaatcaagtcgttgcatggatccgcgggattcctgacgggattcggaagcgtgcagcatggcctcggccagttcgattagatgacggacttcccagatggcggtgacctcctgattgaaagcggcggtcttgtcatgggcccgcaaggtatcggcaaccggtgtgatgtcgttgttgatctgagtcaacgccgtatcgatggtctgagcggtgcaacgtacggccagagcctgctccatcactgatccgagttgggccatgagctgataaggattggcggtgggcccgccatcgtctgaatcgtccatcggcccggcgagcagttcgtcaagctctgccttgcgggaatcggcagcctgatcggcggcatcggtcagcatgtcatcggtcgaatcatcggccatgggggagtcaaccgggttctcgacgatgcgtgcggccatcgtctgaccagcacgtgtaccgaacaggcaggcgtcgagcagagaattgccgcccagacgattcgcaccatgtacggagacacaagagcattcgccagcggagaacagtccatcgactacctgcacggcaccgtcggcccaacggtacacctcgccattggtggtgatggggatgccgcccatcgtgtaatgcgcagtgggcttgataggcaccaggtccttggccggatcgaggttcgcgtactgctcgatggtttcgaccacctgcggtagcacttccttcatacgttcggggtcgatgccggtcatgtccagccagacgcagtccttcggaccatccgggtccttcgggtcggcgacgccgcggccggcgtcgatctccgccatgatggagcgggagaccacgtctcgcgcggccagatccctatgctccggggcgtagcgttccataaacggctcaccgtcggcgttcctcaggatgccgccctcggcgcgggccgcctcggacagcaggatgccggtgtgcgcgagcccggtggggtggaactgcacaaattcgatgtcctccagctgcaggccggcggccaaggccaatgccatgccgtcgccggtcaggtcccaggaattcgatgtggtatggaacagtcggcccgcgccaccggtggcaagaagcacgttgcgcgcgtggatggcctgaatcttgcccgaatgcgtgtcaaatgccacgatgccggccgcctgcttgccgtcgtcggcgagcaccaggtcggtcacataccattcctcggcgaactcgacgccggcggccacgcactgctgccacaaggtgtgcagaatctggtggccgatgcggtcggccgcataggcggcgcgcttgaccggggcaccgccgaactcgcgcgtgtggccgccgaaccggcgctgggcgatatgcccgtcatcggtacgggagaaggccacgccctgacgctccagattgatcacggtctgcggcgcgtattcggcgagcagtttggccgcgtcctggtcgacgagccagtcgccgcccttgatggtgtcgtagtaatgccagtgccagtcatcggactccacattgcccaggctcgcggcgatgccgccctcggccgaaccggtgtgcgaacgcagcggctgcagtttggagaccacgaggatcttcgggtccacgccttgttccttgagctcggtgattttgggggagcgcagcagtcccaacgccgccgacaggccggccgctccggcgccgacgatcaccgcatcatacatatcttccaaacgtttcggactcatgggttcgattctcgcacacccgccgaacagtcttcgagccgtgtcatggaagccgattagccgacacggctgctcagcttgagtatgccggcatcccgctcgatcactcccttcagctccaatgcgccgagtagctcaagtatggtgccgatattgggaatctcgtcgggtaccgtctctcgcgccacacgcaatagtgcgtccggggtgacgatgagatgtcgtttacggcattcacgaatcaatgccactaatgtgcgttccatttccggcagcttggcgataatgatacgttgttgggcttccttctcgggatcgagcttcggcttgacacgaagatccggcatctgatgcgacgagggcggctcttcacccttgctcttgttggcaccggcctcggtagttgcgctcgccggcccatccttggattgaacgagtgtaggctgagtatgcttggtcctaagacgtttcgaatgacctgaatcttgtgacgactcctgtgacgccgatgattccgaggatgctggcgataacggagtcgttgccggcacttccatggcctcctcgttttcggacgagtcctgacctgtggatttcggtatgcctgggcatgccgccataacgggcttatgccgttcatggcatatatcctcagtggatgtggcggcacacagaatcatcgcccggtggtcgccgatcatcttattgcacccggcgttgcaaggctgattgatgtcaccgggaaccgcatacacttcgcgcagcaattcgcatgcccatcccgcggtgttgagcgctccggaacgcaaccgggcttgcgtcacaatcaatgtggaagacatggccgcgataatgcggttgcggagtagaaaacgacgggcttcgggaatcgtccctgggcacagttcactgatcagtgcaccaccctgcgcctcgatacgttcgaacagcgtgcggttacgcatcggtccgatatggttgagcccgccggcgaatacggcaacggttctgcccacattggcgggcattctgccgtgcagcgcattcaacgctccccaatgtgccgccgcatccgtgcccattgcgcctccggacacgaccagatgcccggcaacgactgcctgttcggctacggtgtgtgccacataccggccgtattcggtcacgtcccgtgaaccgacgatgccgaccggtttggcgcaactggtcaatgcgcgtggatcgcctttgatccacaaacacagcggtggcgcccaatcggagcgaatggacaggtcggccaactgcgagggccaacatggatggccggggccgataatccattgcgtgccatccatagtgaaccagtcgcccagttggatgatgtcttgcgagggcaggtccatcatgcggttatgccagccggccagtgcattgcggaaggagcacatcgcattcgccgacgccttgcggccccatcgggtgaggccatccacgaacatgcggtcaatgcgtgacagcgccgggccgcagattccagatggctggcttggatgggattgcgccaacgcgtgccagagggattcggcgctttccgcgcctttgagcgcggcgtacatcatcacatccgccccatcaagacagaacgtgagcgcggcgcggtacaacgtatccgtgggaggcatgggaatggtgcgcgaaacagcgaggcccgtatcggtgtgatccacactgcctgcggtgccgccagattgtcggatatcagtagcgttactcatgtcatcctcgttctcatttcgatgccctgatggacgtcctgctcggtgggggacacgcggccggccagatcggcgagcgtccaagacagacgcatggcgcgatcggccccgcgcaatgtgagttgatgattggacagggcccgattgaccaattccatcgctttcagcgacgtattggcgtgcagccatttgcccgaagcttgcgcgttgcacacccatccatactgtctgaaccggtccttggccacttgacgggcgcgaatcacacgagcttgtatcccggcactggactcgccgatcgtctcgctctgcgcggcaatgcgcgagaccggtggcaccgccatctgaatatccacacgatccaatatcggtccggacaatcgcgagaaataacgtatacggtctttttcccggcaagcgcaacgttcgccggtaccgtaatagtatccgcacgggcaggggttggccgccatgatgagttggaatgaggccgggtaataggtgctgccttttgaacgggaaagcgccacatacccggattccaatggttcgcgcaacgtctgcagggcgcgtgcgctgaattccggtgcctcgtccaggaacagaatgcctcgatgcgcgcgcgtgatcgcgccgggaacggcgatgccgctgccaccacccaccaaggccgccgtgctggcggtgtggtgcggtgcctcgaacggcggcatgtcggtgatgccgtactgaggcagtatgccgcacagcgaccgtatcgacgccacctccagttgttccgcctcgttcaacgggcacatgatgccgggcatacgtgaggccagcatggttttgccgctgcctggcggtccggtcatgatgagattatgtccgcctgccgccgccacttgcagcgcccatttggcatgttcctgacccagaacctcgttcatatcgccacaatcgttgggatggcttgtgggcgattgatccgtggtggtctcgtcggcaaccggtgtatcagtaatcgtataggtggcatcgccgcccatcagttcgatgagctcacccacatgcctcacgcccactacatccagtccatccaccatcgaagcctcgtcaagattgcgatggggaacaatcattttgcgcacgccacgttcctcggcatgcagcatgatcgggagcagcccatgaatcggcagcaccgagccgtcaagattcacttcgccgagcacaatggtatcttccaagcaatcatgccctatggcacccgccgcgcataggacgctggccgcgatggccagatcatgcgacgaaccacgtttgggcatggccgcagggctcatgttcacggtcacgcgggtttgcggccaaccgaatccagtggcttgacacgccgatttcacgcgctcgcgggcttcggacaacgatgcatccggcaatccgatgatgctgaagtatggcaagccagggctgatgaaagcctgcacttggacgatgaaggccttaaggccgatcagtccgactgagagagtgctgccgatagccatgtctactcctttcgcaatgtgtttcgcaacgtggctgttttttgggggacgaattcagaaggcgttttcgatgtgatgcacgagcggtctgcccgcccgaagcacgatggtgacgacatcgaaacggactgccgtatgcggcacacgattacgccggtcaagcagccaatcgcaggcggctttcctgagattgtgctgtttcgccggcgtgacggcctcttgcggatatccgtaatgcatggaccggcgtgatttcacttcgacgaacaccaccgtgtactcgggattgagcattacgatgtccaattcgccataacgggtatgccaattgcggctcaaggtcgtccaaccgtgttcctccagccacgcggcggcatactgctcgccgagcgcaccgaactgtttgggcgtcagattgcggtcgcccatcgtggccgcaatccgttccgaaggcagcgttgcctgcggatcaggtgaagccagcatgggctggtgaaaggcaagaccggcgtcgatgccggacttcgtcgtcggctgggtaagtggtaaagcgttcatgattccactgtgcgggttacttatgtaagagcacaagcgcaaccggcaaatgtggatactatgacgcggtttggcgtgttgtggataacgtgtggatgaaaacctggttatccaccattagttcagaaggtttaccaaggctccccagtcggcttccctgtgacgacagacaacccgccgagttgttcgctgaatacgtcagacccagtgagcggagaggggagccaaggtgcggtcacttcaccaaatcggtgagttcgccgaggttcagttcgaagctgacgccacgatcctcgaaatgcggctggttacgggtgctgaccatggcgtggcgcacgaactcaccggcgatttcggccgactcggccaggccgcggccggccatcaccgcgccgcacagggcagatgcgaaggcgtcacccgtgccgtgaatcatgtatggcagcttttcatgagccagctcgatcttgccggcaacaccggtggaagcgctgaccatatagttgacgattttgccatcgccatggtcgatgcccttcaacaccacgttcttcgcgccaagctccagcagcgcgcccaacagctcgtcaaccgtggcttcatcgatatcctgaccggggtagtcacgcttggtcagaatgctcgcttcggtgaggttcggcatcagcacatcggcgccgtcggccagcgcacccatcgcctcgcacagttccggcgtatacgtgggatacatttcaccggcgtcgcccatcaccgggtcgaccagacgtagcgcattcggatattcgcggtagagacgctgaatgatcgccacctgatcgggggagcccaggaatcccgagtacacgccgtcaagctcaacgtcttccttctgccaggcatccagatagccggagaggatatccgtggtgtcatggaacgtgaacaccgcgtacttcgtgtgtgcggagaacagggcggtcggcaccgggcagacatcgcagccggctgccgaaagaatcggaatcgcggcggtcagcgagcacttgccatagccacacatgtcatgcacggcggccacgcgcgggatgtacttcggatcgcggtcgtacaacgtaacgtcggacactagaaaactccaatcaatcagacggatgtcacataatcacagttgacattagtctgtagggatacggacacgctaaccggtattcatctggtgaggttccgtcgccgaattcaacagatcgctcaaactcctagcgacagaaatcttggaaataaaaccatccaccccaaaattccgttgctggttccatctgagcgacagaaatttcggaaatcatcccattcgtcctgaaattctgtcgctgacgtcacctcagtgacaggatttcaggaaattgaggatgatttcctagatttctgtcgcgaagagacgtggaagtgtctcggcgtgtcgtgagatttttgatgactattttgcccgacgtaaccgcctcatatcccaatgattccaagggtttataagggtctataggcaaccccgataacgctcagcttgcgacatgcaccttgagcgtcgtaacttcataaccaacacctcgccaaccgcccgaacacggcaggcgggtggcaaggaaaaatcctcgcgacctagcacaaccaaggagaaagacccatgtccgagaacaacaagaagtaccgttttgagaccctgcagctgcatgtgggccaggagcaggccgacccggccaccgactcccgtgcagtcccgatctacgccaccaccagctacgtcttccacaacttcgaccacgccgagg

SEQ ID NO: 946 - DNA, 3653 bp, Unknown
  R117_24m  MAG No. k141_14169
aaacttgcgcagcttgtcaagcgagtccttggagacgccaagcaccgtaacgtttttcgacgccaatcgggcgagattgtcgcggaaatcgcaagcctcggtggtgcaaccgggcgtcatcgcggccgggtagaaatacagtacaaccctgcggccggcatcaagcacgtcagacaggttgattgatccgctctctgtaaacccaggtataaccgccggcagagtgaaatcgggcgccgcgctcccctcttgcagacgttccggcattgaatcagagctatcaacagtagtggtcatgattcccatcatagaacccttatcaacagcgctagtaaagttattcagaggtcagtcacacaactgcggatcggcaaaacggcgattctgcaacaccggcaatgttcgacgcgcggaatcaagacactcacgactcagctcagcagtaatgagatcggcttccctatcgcccgccgcagcatcacgcgcaaatccgtcaatcgcagcatcacgcgcaaatccgtcaataatctccagattccgttccggctcctccgccaccgtaaattgcgcaaccgcgacggacagatgaccactatcttcgcatgatgaacaaaccattttgaattcacaattctctatgctcggcacagcatacgttgtgccacatcgatataaatattgcaatcgaaaatgacacatacggcggagctcatcagctctccagaagttgcttcaaataagctgaatcatgcacccgcactggtcgagtatcctcatcaaagcctccattggtgtctacctgctgcttgatgaaatcaaaaacctgctgaggagtgacacgaatgctgacttccatctgttctttcattatcgtcggcataagatcgttccctccttccccgttcagtatatattcaacttatttctcactactacagcacgaaaggatccttcgtctgagagcaaacgacatagcctcacaccagttccaacgtcttgaaggcgttggccaggccgttctggtgaatgtcggtggtggtgaagtcacagaaggcttggatgccgtgaatggcgttgcccatggctacggatgtgccggcggccttgagcatggcagtgtcgttgtcggagtctccgatggcgatggtgtcggcaatagcatagcccagcaaagaagccacgtcgcgcacagcggtacctttgtcgatgccattaatcagcaactcgccattgttcggggaaatcttgtcatacgaaccatgcacgagctcaaaccatgggctcaaatcatgttgggtctcctcgaaagtcacgtcaggattcggcgaggtgaagtatgaccccttgctcacacgaatcgtctgtcccaaagtcgagccagccggcacctccacctcatccaacaggtgccagaatcgcgcgaattcgccacgattccaggtcttgcctttcgattccagatgttgacggtagccttccgagatgtacatgccatccgcaccttgccattggtagctctcgatatgatgcttggcaaaatacgccatcgccgcatcgaccgcttcaggagggacgagatgctggaacagcagcctgtctccgatattcgcctgagcgcccgccacggaaaccacgccatcgaaaccgaggtcgaggatgctgcgttcgattttcggcacggaacgcccggtgcagatgaagagcttgtggccgttggcctgggcttgtttgcaagcgattttggcagattcgggtacgacgtggttttcgtcggctagggtgccgtcgatatcgatgaatacgagtttgctattggttgtcatggttgccttcgtaactggttggacctcccccagtcagcttacgctgacagcccctccagagggggcgaagaaaatcccgcctaaaaacctacaagcatcacacggcgtaggcggcccagcggccgtgggtgtgctggacttcgatgggcataccgaacaattccgacaagcgttcgtcggtcaggccattctccaacgaaccggtgtagacgatggtgccagcaccgggattacccattgaatccacgcccgcttcggtggcgtcctcagcgggaatcggcttgcgtcccatgatagcgatgtggtcgaaaccagccggaatctcctccaagcgatgggtgaccagcaccacggcacgctcggagctttcctcgccgattcggctcaatgtgcgcatcacctgctcacgaccacccaagtcgaggccagtagtcggctcatccatgatcagcagctcgggatcgcccatcagcgcacgggcgatcaacacgcgggtgcgttcgccttcggacagtcgccacatctccttgccttccagataggagacgcgaaaatcgcgcagcagctggcgggcgcgggcgtattcctcttgcgtgtaggtgtcgcgccagcgcccggtcacggcggacaggccggtgaccacggcgtccagcgggtcctcgaactcggggaactgccggcccaggtcggccgaggcgagaccgatgcgggtgcgcagtttgaatacgtcgtatttgccgagttgatggccgaggatgaatacgcggccttccgaggggaacgtgcgggtggccagcatgtcgaccgcggtggatttgccgatgccgttcggaccgaacagcacccaacgctcccccgcgttgatggtgaggttcacgtcggtgatgatgacacgacggttacgccggaattcgacgttgtcgagttggaggacggtgtttgtcatgagtgaaatactaactatgattcgcggtctgagaactcccctcagtcacctgcgccagactgaggggagcactcgttgcagcgctacttacttcttctgctcgtcgagcacggactggtagacttccacggtcttgtcggcgatggtctcccagctgaacacgtcgcgggcgcgttcgtagccggcctgacccatcttcttggcgagctcggggtcggccatgatcttgtcgatggcggcggccatgtcgtgcacgaacttgtccggatcggtgggggtgccggtgccgtcgtgcagctggtcgatcggtaccagatagccggtctccccatcaaccacaacttccggaatgccgccggtggcggaggcgacgaccggcagaccgcaggccatggcctcaaggttcacgatgcccagcggctcgtagatgctcgggcagatgaaggcgtcgcagccgtgctccagcgcgttgagctcgggcttcgggagcatttcctcgatccacacgatgttgccgcgctcctcgtccagcttggcgaacgcgttcttgacttcctcggcaatctccggggtgtcgggcgcaccggcgcacagcaccacctgaatatccttggaaatcaggtgcaaagccttcaacagatacggcagacccttctgacgggtgatgcggcccacgaacagcagagtcggcttggaacggtcgatgttgtaacgctcaaacaccttccagcccggatcgtccggcgccggagcagcaaagtcagacatggtgatgccgttgtagaccacaaccaccttgtctggatcaagattcggataggcggtcagaatatccttgcgcatgccaccggaaacggcgatcacacggtcggcgtgctcgtagg

SEQ ID NO: 947 - DNA, 42238 bp, Unknown
  R117_24m  MAG No. k141_14215
gccatccgtgcgcaaggcgccatcgacatccagcaccgcgggacggcctgcttcgccgatctcgcgcacttcgggttccagcggcagctgggccatcagcggcacgtcatagccaagcgccgcgcttaactgttcagacacgcgctgaccgccgccggcaccgaaaatctccagcttctcgcccttgtgctcgtagtagctcatgttctccaccacgccacgcaccttcatcggcacctgcagggccacgagtccggagcgcacggcgatgtcggaggcggagggctgcggggtggtgaccaccacgagttcggcgttgggcagcgcctgggccacggaaatcgccatgtcgccggtgccgggagccaagtcgagcaagaggacgtccggctcgccccaccatacgtcagacaggaactgttccaaggagcgctgcagtcgcggcccgcgccacagaatcgcccggtcggcaccggcgaacatgccgatggagatcagtttcacgccccacgcggtgaccggcataagcataccgttcagattggtaggctgcgtgtgcacgccgaacaggcgcggcagtgagaagccatagatgtccgcgtcgatggcggccgtgtcgaagccgagggccgcaaacgtggcggccaggttcgcggtaaccgaagacttgccgacgccgcccttgcccgaggcgatggcgaagatgcgggtcttgacgcccggcttgctgaaggggttccgcttgcgttcggccttgaggtcggcaaccagatcggccagcttgtcacgactcattgaaccgacttcgatatgaggcagcagctgtacgcccggataggagctgaccgcgccgttgatctggttggtgatggtctcgctcagtgggcatccgggaaccgtcagctcaacgtgcacggtgacgtcgtaagtgccggcgtccgacgatgcgggcgcggcttcgatagcggcaatcatgccgaggtcggtgaccgaacgaccgagctcggggtcgatgaccttgctcaggcgttcgtagatgtcggcttcgatctgacgtgcgtcgctcataaatccgtatcctcctttagggcctgttctaccctagcgtgtgatgcggcggcatgccagagggagtggagtaagtcacactggggcgggattcgctttttctctcccccagtcagcctaaaggctgacagccccctcatcagagggggttaatgaagcgtctgagggggctattttagatggtgccggtggctaggagctgggcgaattgggcttcgcccagcatggggatgccgagttcctcggccttggtggccttggagccggcgtttgcgccgatcaccacgtaatcggtcttcttgctcaccgaaccggccgccttgccgccgcgctcgataatcgcctctttggcggagtcgcgcgaatagccttccagagaaccggtgaccaccacggttttgccggccagcgtctgcggcaacgaactggtctcggcctcgtcgacgcccacgccggcggcctgccaagcacgcaaagtcgcgccgcgccagtcgccgggttcgcgggtggcggcgaaccagttcaccaccgattcggcgatttccgggcccaccccgtcgatggccgtcagatcttcaatcgtggcgttttcgatggctgccagcgagcccatcgccgaggcgatcaggcgtgcggtaggcggaccgagccggcgaatcgacaacgcgaccagcacacgccacaggtcggcgtgacgggccttgtccatttcgtcgaacatcttgcgcgtgttttcgccgggccgaatgatcaccggcacatccgtgacgccggtgcgcgtggtcttgtggtccacgcgcacgatgaccgcgtcggccggcacgtcatactcgggataggaggctgcggcaaagcccggcatagtaccaagtggagcctcagccccggtaggtgcgccggtcgtctcgctggcggcacctccctgtgttccggcggattcgactgcggcctcttcttgcgcgcgttcggccaactgcttggccgtgagcttcttggccggcgtgggcgcggtccagaaggcaggcacctgatgccacaggccagagccgccgacacgcttacgcacctttttcttcttaccgttcgcaccgaccgtctcatgcacctcgacgattgcggcctcacgccacacacgcacgtcgcgcagatcggcggcggtcaggtcgaacaacccggattcgttagacaacaccggcttctgcgcggctggcaattccagcccctccaccggctcgtacggttcgggctcttcgccgggcgcgaccagaacctcggtgatgttcggcgcgtaggtcgccaccgaatcaggccggttctcctccgggttggtcagagcgatggccgactgttcacccagatgctcgatgtcgaacgccttgcgtgaggccagcgaaatcacgcgctcggtcaactgggccgggcagctttccacattcgggcagcggatgtccttgtcaccctccttggcgggtgccagtttcgcgccgcatgaagggcagaactcgggcatgacgaattcgcgcagctggccctcacgccctttgcgccgttcaagcaccgggccgaccagttcgggaatcacatcgccggccttgcgcaccaccacggtgtcgccgatcaggatgcccttgcgtttgacttcaaatccgttgtgcagcgtggtacgagccacggtggagccggccacgtagacaggtttgagcacggcgaccggcgtcacacggccggtacgccccacctgcacggtgatgttgagcagttcggtgttgacctcttcgggcgggtatttgtaggcgatggcccagcgcggcgcgcgcgaggtggcaccgagggcgcgctgcaggcccaggtcatcgaccttgacgacaatgccgtcgagcgcgtgctcgatgtcgccgcgatgctcgccgtagtactcgatcatgtccagaatctcctggaatgaggtcaccgcacgattatgcggggagaccggcacgccccacctggtgtatagatcgtaggcctgcgactggtcggcgaccacgtcatgggtgccgcgcggatggtccggcccccaggtgagctgccccagaccatgcgcatagaaactcaggcgacgggtggcggtgatgcgagggtctttttgacgcagcgagccggcggcggcgttgcgcgggttggcaaagggcgctcgtccggcgtcctcctgctcgttgttcagggtgtggaagtcatcccagcgcatgaacacttcgcctcggatttccacgaagtccggaacgtcttccttggggccgccgaggttggcgggaatggagccgatggttcgcacattcagggtgatgtcttcgccggtaacgccgtcgccgcgcgtcaagccctgttcaagcacgccgttgcgatagatgaggttcagggcgaggccgtcgattttgacctcgcagctcatgggcaggggcttggattcgggccaatcgaggtcgcgaatcaccgaatcgtaccaatccttgagctcttcgatggagaagacgtcatcaaggctcatcatgcggctggggtggcgcacggaggcgaagtcgttggagaaggagccgccgacgcgatgggtgggcgactgtggattgtccaatgaggggaacgccgcttcgagtcgttcgaggcaacgcatgcgcgcgtcgtaggcggcgtcggagctgacgggtgagtcgtcgatgtagtaggcgatctgatcggattccacccatgcggccacgcgagcccacaggcgggcggcggcctcagcggtcatcgtgttcacgtcgaaacggtcgaggcgtatcgcgtcgtcgtcagtgggctgcagtgcggctatccattgttcggagccaggggcaaaacgtgcaataccggtatcaggccggacctcggccacatccccatcgtcgaaatcccatgccagttgttcgttcgtgctcatggttgtctatcctagcgggctcggctcccctcggccggctataccgtcaactcccctcaggcggctacgcggatagcgagcgcaggaactgggcttggatgatgtcgatgttgtcgccttcaccgtcattcatgcgggccacggccaccgagagcgtgcgggccggcacgaacatgccttcatccacgcacacgcgggcggcgtcacgcacgatgtcagccacttcgttatgcggccagaccggcagatcatgcgtggcaagcacatgggcggccgtctccaccgattcaggcaccggcatgcactgcgagtccgcacgggaaaccagttcctgcagttcgctttccaacgaaccaatggccccgggagcgatgtgatcgctcataatgtaggctgcggcggctgtgtcgaaccggtcaagcatccattcggcgtacgcgaaccggtagtaggcgaacgcggcatcgtcgcggtccaaggccacgcgcagagcattcaggcaggcggcgcgtgccgaatcccaatcctcattgcgggccagttggatggcgagcttcagatgtgagagcgggtaggcgggcgcgtacgccaccatacggttgaggtgcgggatggccgcctcggcacccttgatctggctcaacacgtcagccagctccatgtgtgcgtagaacagattgtccgggatgagcaccgtacgctcgtccaatgtggcgaacagtcggttgtagaccacgcgctcggcataggagttgaagtatcgaggtacgccatggcctgccgcatacacctgatccaaatgggccacagccgcttcggccgcttcgatggcctgatcggcttggcccgagaacagcatgtctcgggcgcgcagacgctccttgtcaagatcgtcggcaagcgtgaacgtgaagtccggggtgtccttgccatcgatcaacgcactggtgacctgagaggccaaaccggtcagttcgggatcgcatatcgattcgatgatctgcatggctcgctgggccttttccacggagccgagtgacgtgttcctggcgatatcgtggaattcgttgacgccatgctgcagtaagtccactcgctggatagccagtccggcactattctgtgcgcccagcacgtgagcggtcgccgggctgaattgacggtcggccagttcgggctcctcctgggatccggtgggagagaaccggctgtccgccaagtcgaagtcggcgctgatgggtttcaggccgccttcgccgtccacgtccatcacggcaccgaacatgcggtaggtttcctcgggattgtcaagcccatcggtgtccagtcgcttgaggaaggcatcacgggtgaaggtgacggtgaccatattgcgcacggtgggattgcggcgcagcacgctcatcggatcatcgtccatgccggcggccccatcagcatcgtcagtgccgacgccctcgccgccgataccgcccaggtcgtcgcctgcgccagtatcgtccggcatgccgaacgccatttcgtcgatatcgacgcccttcatcaggtcttcgaactgcgaatcgatggacgcggcgccatcggcgtcagcggattcggccgcggcctgatccgtagcatccgcagacggtccggtaccgttgcctgttcccccggccgtgccgcgttcgtcaccggacgccgcctgcccgaacgtctcctcatgggtgatggggcgggtcgggtcgccatggaaatcaccatctttggggtcggctttggaacccacacgccccaaatcgccactgcgcagatgttcgaaggcgcttagggcctcgctcatcatcgcctcgatggcggaatcctgttcggcaatcgcctcttcaagaccaatggaatcgatgtgcaacgacacctggcgcacggattcgctggtgccgaaactcagcgctgccatcatcaggccgacacgcaggttgtaggcggcgctcatcgacgcgcgttcggcgctgctcagcgcacgccacgtacggcgagtggtgtcataccggctatcgggcatcatcgaggtgccggcagtggtgaagccaatggccacttcacccgaatccaagcgcgaccggaactccacatcaaaccgatacggcaaccgtaaccggcgcaacagtgaggagagggtctgacgatacacccattcgtcgctcctcgccggcgaatacgaaggccgagcggcttgagtgttggtgtcgctcttattggtccgctctacagcgccctcaacactctcagtactttcagcgcccgcagcattcgtcacacccgaatccggcacgttctgctgggtcagcacatctcgaggatcagggaattcactgcgaatctgcccagccgtgcgtgcggcgatatcgaccaggctcagcacggcccgacgctcctgctcgccatcatacgggtcaagcgccataatcgcagggttctcaatgagtttcatgtcgatttgcgcggcctcggcacgggtcaccgtatcttccgtagggttgcgccccaaggaagcgttgcgctccagccaagcgctcaccgcagcgaatcggttgaggttgccttcgatcttcaaggatttcagcgcctgcccgaatgccaaggacttatcccacgtaaagaaatagccgctcgaatacgtcgaggtgtacaggtgcaacggttcggcgccatgcaccgcttccagtcccggcgtggtgtcgagggcgccggcttcgcgcatcagatcggcgaagtgatcctccagaccggaggcccgcatgccgtgggctcgtgccgccaaagtgtcacgcaccgaacggcgaatcgcaccgattggtgcctcacggttgagacggcggaagatattgccggaaccgaatccgatgagcagaccattgatctgcggcaacatatacgtggcgaagaacgcgatggtaatggcatcgcggtattccaaatcatgacgcatcacaggcggcagattggcacgcatctgctcaagcgtgtaccggttgccggccttgagccatgaggcgagccacgtcatgcgtccggtgtcgtcacgccccaccacgccaccggtaatggccttcacgccgtcagcaccatgaccaaggccacgccccaaaccacgcccatgatgcagcgcacttcccaggccatggcctgcacgggagaaaccggaacgtgaacgcggctcgtcgctttcgcccagccgctcaccgtccggcagagtcacttccttttccttgccgaacatgaatcgcgcctgcatatcctgcacgtccatgttggggtcggtgcccacgaatacgcggccatgcgtatcggcgaacgccacctgcgcaaaatgatcgcggtcggggaaaatgccaagcgaaaagccacggcctctggtggagggcagctgcgcccatccaagcaccagcccttccggcacgttctccaattcggggaaggtgcgtcgcttgattacaggactcagcgccactgcatggcgagtcagttcgtcgataatgccgcctttacgctcactggtctcccgcaaggcatcgccgaacggattcgtatcgtgcttcttcggcttggacagtcccagatcggccgcgagcgcgttcatcgaatccttcagcccgcccagcagtggcgtgcggttgtgcttcccatggtccgatgtacgttttggcatgattcacattgtctcttgtttgcccgacatcaagcccgaataaagcctatagaataaatgcgtgcattccatagaccacactcgcgcagaccgtccgatgccgtcgaatcatgaacggcacctgcccagccgcccggatacccggcaccggctgcgtttggtgcgcctgctgatcgccttgctggccgccgtcgccgccatcgccgccatggagtgcatcgtgttcaacctgccgttctggcgtacgctcggagcgagcacggatacgaacgccgtgcataacacgctgggttcgggtctcacgcgccggaatgatggaatgttgaccgtcaccgatccgaccaaggcctatcttgaactgaccgcggacggcacgtcggattacctacgcatcgataccgagagcagcaaggtcatcgataaggcccgcgagcaggccgaggccgaatccaaagcgaacgacgataaggaagtcttcaaaccgctggcgaccattcatgtgcgcgcggatgtcgatggcatcaccggcaaggcccagtcgatgaatcccgacgctattcgcagccattatgtcaaggtgccgggtgccggcatcgtgcgtatttggattcaggaagagcgcggcgcgatcgtaccggtcaccgacgcccgcgccaacgtgcgcgtaccgttcgtcatcaattggatgcgcgtgctcgccatggccttggtgttgctgatgattgccgtctggaggccgggatcgcgcctgtggcgtatcacgcttgacccgtccagcactcggcaacgacttgctttcgtggggcttctggcgattcctaccctgcttatcggcgtatccatcatccacgaactgtggtacgcgtcttcgctcgtcttccacgtttccggcgattacacctatgatttcgaccagtatgggcatgtggccgatgcgctggtcgccggccggccctggctcgacttgccggttcccgaacaactggccgccaccgagcacccctatgacgtagccacacgtgcccagctactcgccaatggagccagtccgctctactgggattacgcgtattatgacggtcactggtattcctattttggcgtgttgcccgcagtgctgctgttcgtcccctatcgtctgctggccggtcataatctgccgacatccgccgccgagtatattctcgtgctgctgttcatcatcttcttctccttgctggtgctgcgcgtcatccatcgtgtgatgccgaagacttcggtggcggccgcgtcgttagtagtggtctcatcgttggtgagcgcgcaagtggggtatttgctgtatcgcacgaacttctatcagataccgttcgccgcatcgctgacgttgacgtcgctgggactatggctatggctcggcgcggacacgtcccgccgtccgctgagaccatcggaccgatggcaggcgggcgatgccaagcctctctccctgccacgactggccttgggcgccttgtgcattgcggcgaatttcggatgccgaccgacgttcaccttggccgcattgcttgcgttccccctgttctggccgcagattcgcgcgctgggcaccggtctgcgcacacgccgcatcaagccgttgcaggcgttgcgcgcgccgctggcggtaatcattcccgccattctcgtcgtgacgcctctgatggcgtggaacatggttcggttcgattccccgttcaatttcggcaatgcgtatcagttctccatatccgatatgacccggtataccaccccgtccgcggatatgcccgccaacatctggtattacctgttcctgccgctgcgcttcatggatcgtttcccgtggctggcgggctctcccgccccgatgccgcaatggggttattacgaggtgatggtcggcgcgattttcacggccacgccactgaccttgatggctttggcgctgcccctgctgcgcagattggaaacacacggcatgcggccatggctgatgtcttgcttggccgtagcggcggtgctggtcgtattcgacagccgcgtcggcggtttgggatggcggtattccgccgatttcggctggctgatctcgctggcgtccataccggggctactgtggctggtcaatgggcgcgaaccgagccggtcattggcgggggccaacgacgccgcttcaggcgatggcatcgcccgcgtcactccgtggcgttggctgatgcgctgggtcgtggtgctggccgtattgtgggcgctgggcatagccatactgagctgcttcgtgcagtcgcgcagcgatgcgatgatcgacaacaatccgacgctctggcatcaggttcagtcttggttcacgatgctctagtctcgtatcggcgtcggatcaggtcctcataaaacgccacagcctcagccggcgctccgtcaaacacgaccgcgtgctcgtccagcaccagtatgcggtcgatggcgtattcgggccggcggatcatatccgtgtcatgcgtggcgaaaatcacctgcttgttgtagctgaacaacgccttggccacatgcgcggtgccaatctcatccaatcccttgctcggctcatccgccacaatcgcactcggctcaaagctcagcgcggccgcaatagccagcaggtgccgtttctcggagtccaattcgccggccttggccttggagacctgcgccaaatcaaaatgcgcgaacagattaccgatgcgcgcatgacgttctgactcgggcaccttgtgctttttcaacgcttcggaaacagcctcggaaatattcgccgcttggtagaaactgttcggaatctcctcgcggcgaactttgccgaccagattatcgatgcgcttcgcgtccttcttcacagccgggtcaagacgttcctcaccgcccgcaatggtcaccgtgccagcgttggccttcaacgaaccgtccagcagacccagcaatgtggatttgcctgcgccgttcagtccgatcacggccacccgccgctcgctgatggtgatgtccgtgggagcaagtcccacgtgcccatcatcatacgtatgcccggcctgttccaaagtgaacgtcagcgatgccgggtgtggcagttctttcggtctaaacaagaatcccatgccgccattgtacgtggagtacaggtgcggtgccggcaaacaccggcctatcgcagcaaagcggcgacggtattgagcacggcgcggatgccacgctcgaattcgtccggttcgggcagcagggaaacggccaggtatccattggaggtcatgtcgaagaagtagccgggctgtccggtgagttggtgctcgtcaatcagccgcaacaccagttcgttctcatcgatgacggaaggcactcgtaacagcacgttccagccgccttcggcccgtagcacgctgaccagcccgttgggatcggcgtcaagcaactcgtgcaacttggccaggttattgcgcacgcgctcccccacccgtctggtctgtgcgggcgcggcgttcaataatgcgggaatccgttcggcgatgatgtcgcccatcggcagataatcgtcggcgatgacgtccagtcgacgctgggcctcggcaacgtcctcggcaggtccggacacctgaatccacccgactttggcgtgcggcgcggccagcattttggagaatccgtctagggcgaaggtgagcacgccgcgctcccccgcgagccgtgcgtcgccggggaaaggttcgagagagtaatcgaagaacacttcatcggcgataagggcgatgccgtgctcacggcacaatgtcacgatacgtgcacgctcggttggttttacgtacgaaccggtcggattgttcgggttgatgagtaccaatgctctgacgcgttcgccaccgggctcgctgagtagccgctcgagttcggcgatgtcgatgaaccaggagccgtcgaattgcaactggtattcgaccgtatcgacgcattcaagccgtgcaatcgactcaatcagcggatagccgggtttgggtgccagcaccgcgtcgccggcatcgcaaagtaacttaatcagccacgaatacgcctcggacgtggagctcagcaggtacagggcgtccgggtcggcgccctcgatggcggtattcacattggtgaaagcggcatggcgctcgttcctgccctcgccggcggcgggcgaagccaactgagggctgcttgcgtctagcacgtttgccgtattgaggaatgcggccaatgattctcgtgccgcacgcggtccacgcgggtcggccgtatacacgctcggcaccaattcgggtgccaacccgtggcgagtcggattggaatcgttgagtttgctgagtgcgatgccgtttgccttggctgccgcctcggccgccgcaatgggattcggcgcagaaatatccacacgagaagagaaatgcacgctcataccctccacgataaaaccacccctgccgagccaggtatatcgaggcctcatatccaccagcatccagcactacgacaatcgtgcggcacggcagcggagtcgtcagacatactatgacttcaatccacatcgaataacggcctagctacattcattaggtcattttcgcgctcattaggtcactgctagtcgagcctcacaattgttgatgcttgaaacgccgccattccgagcccattgcaattcaggtttggaatgggagtgacctaatgaacacataatcgacctaatgaacgaattactcattaaaaaaggccgcccgaaatacttggacggccttacatatggtcaatacggctcctgcgccagcagaaataactcagctcactgctgcttggtgctggcgtagtaggcggcaccgacgatgccagcctggttacgcagcttggcgggcacaatcggggtcttgatatccacgtacggcaggaacttttcgctctgacggctcacgccgccgccgacggtgaacaggtccgggttgaagtacttttccataaggccgtagtacttggtcagacgcttggcccacttcttgtagcccagttcctcgttctcgcgaatcgcggaggaggcatacttctcggcgtccagatgcttggcgctcaggatgatgtgtccgagttcggtgttcgggatgagcacgccgttgtagatcaaggcggtgccgatgccggtgcccagtgtggtggcgatgaccagaccatcctggcccttggcggcaccgaactggacttcggccaggccggcggcgtcggcgtcgttcaccacgacgaccgggcggccgcaggcttcggagaacacttcagtaacgtccacgccaatccaagactggtcgaggttggccatgaagtcgagcttctggccgggcttgatcggcgcggggaaggcgatgccaacgggtgcggattcaggcacttcgaagtggtcgagctgctgcttgacgattttggccacggcctgaggcgtggagacctcgggagtgagaatcttcaatcgcggctcggcgaaatcgcccttggtcagatcgacaggtgcggccttgatgccggaaccgccaatgtcaacaccgaaagcctgtgcagtttcaatcatcgttgaccttcctttcctgatatgtcatcgatccacgatttcgcccaagtctaacgcgaccatcacgcggacgcgccggacgggccggggcaggaccgtcactcaagcgacggcatgggcttccaggtggggtcgtgcatcagcttgcgcgagtcccaccagcccttggcaatctgcaccaaaccggtcttgaggtgttcgcgatccaccatcaccaggcgaatgacttccttggccgcggtgagcacggtacccagtccaaacaccagcggacggaagtcaccataggtcatgaagtaccgggccatgtatccgcggttgcgcatgatgtgataccggttcatgtcggatgtggagttgagctggcgcacgccggcgatatcccaattgccgatttcgcgcgtacggcgcaaaatcacgtcgggcaccacaatcgggttggtgaccttgctggcgcggtagccatacatcgtgtcatcccagtagatgaagaagcgcgggtccggcagaccgatttccgtgaccacacggcggttgaacaggccgccttcgaagcacagcgtgtccatcactcggtatccggccgggccgaatgcggcgggcgcgatcgggttcgggatgcccagcggcacaatgaagtcgtactgccagtagaacgggccgccatcgtaatcgaatcgggatccctgaatcacctcgtgcttgtcggtccacttggacagcttggcaatggcgtccggcagcacggccacatcgtcatccatcacccagaaccatgcggcgcccagatcatacgccttggccacgccggcggagaaaccgcccgcgccacccaggttctcggtctgcggcgcatagaccacgcgctcttcgttgccggactggtcggccacggtggtgccccactggccggtcaccttgccggcaaacgcagcgaccatgtccgccgtctgatcggactgctcattgtccacgatgacaatgcgccacggtgcctgctcaagcgccagaatcgaatcgaacagtacctcgagcagctgctgacgtttgtaggtggtgacgatcagggcaagcttgtcaatggtgttgttgggtttcttcacttcagccatggctcccattgttgcacttgaccggcacaagacgaatttctgcacagtgaaacgcgggttgcgtacgtccggcgcatggcgtatgaataagcctgtcagtttcagggaaggtgcaattccttactggcggtaacctgtaccccgggtttcataacggggatggcgggaagcccgcgacccgcgcaagcggctgatccggtgagattccggagccaacggtatagtccggatggaagaaacgagggctcattatgagcgtatcttcgcgtatccgcatgcaagttgttcgttctgtggcgcccgaggccgagggttcggccagcgcgtccaccgccagcaccagcgccaaactcggctcgcacaccactggtgtggccgattccggccgctggtccacgcgccgtatcgccatgtatgcactgttcgtggcgctggcgatggtcaccagcttcattgaattcccgattacgccggtcacttggctgaagtacgacccgtccggcatcgtctgcttgatcgccggctttgcgtacggtccggccgccgccgcaatcgtgtctgtgctcggctttgtgccgcacatgttcgccgacccgtggggttcgctgatggctgtgctggtggcgctgttcctgtctgtgccggccgcgttcatctaccgtaagatccgtacgcgcaagggtgccgccatcggcattctggtgggtgcggtgctggccatcgtggtggcgctggtgggcaacctcatcatcacgccgatttacgcgcacatgccctaccaggctgtggccgcgatgattctgccgattctgctgccgttcaacgtggctaagatggcgattcacgccgtgatcaccttcctgatctacaagccggtctccaacctgctgtccaagcagcagtgaccggcctgagacgggcctatgcccgccacgactaacgaccactcaacgaccactcaaagaacaagaacgcagaactccggcccttgccgggattctgcgttttcgcctatcagttacggattgctgtttcatgaccgttgcaccccattccttcgacgccgacgagttccacgattccgccgagcccgctccccccgccgccgtactcaaggacattcgtttcagctatgaccgcggcacttcatgggctttggatggcgtttcgctcacggtccatgccggcgagcgcctatgcttggtcggtccgaatggatcgggcaagtccacgttggcccgtctgattgcgggattgaccgcgccggacggtggcgaagtgacgctactggaacagcgcgtgtacgcagccggcccgaatgccgacgcctatcgcgctgcccgccgcggcatcggtatggtgtttcagaatcccgaggatcagctggtcaccaccgtgttggaggatgacgtggcttttggcccggagaatctcgggctggagcgcgggctcatcggcgagcgcatcgttgattcattgcaggccgtggggttggcgaacttgcgtcagtccgacccgacccgtatgagcggcggacagcagcagcgcgccgccatcgccggcatgctggccatgaacccggcgatgctggtattggacgaaccgaccgccatgctggacgaatccgcacgcgccgaagttatgcgcattttggatgatttgcaggcgcgcggcaccactattgtgcatgtcacgcatcatccggatgagaccgttcatgccgatcgcatcgtgcacatggaggccgggcgaatcgttggtgtcactgcagccgccgataatcgacccccgctagcggaggctgtctcgcaaagcgagaccgagggtggtatcggcacagaagccgcccccagtcgtcctacgaacgacagaccccgccagcggaagcgcgaagacggctccgaactgccgctgctctccgacggcatcggtgatatgacgaaccccatcattcgcgtctcgcatctgacctatcgctatccttcggccaaacgggcggttatcgatgacctgtcgttcaccatcgcgcgcggtgaaaccgtggcactgatgggcgtgaacggttcgggcaagtcgacgctggtgcgcatgctgtgcgcgctggccgcgccgaccgccggcagcatcgaggtggccggcgttccggtggcctcgaccggcaaacgcggtagaaacgcacggccgaagccggcgaatcgcaggcaattggcgcaattgcgccggcatgtgggttacgtgatgcagcatccggagcaccagttgttcgcggacacggtggccgaggacgtggcgtacggcccgcgcaaccaggggctcgccgaggccgaggtggccgaccgtgtgcgcgaatcactggacctgttgcatattgggcatcttgccgaccgctcccctttcgacctgtccggcggacagcagcgattggtggccatcgccggcgtgctggcctgcaatcctgacgtgctcatcatggacgagccgaccgcgagcctggacgtccaggccaaggagcgcatccatgagctgttgcgcacgctcaaatcgcgcggcgtgaccgtgctcatcatcacccatgaccgagcggaggccaagcatatcgccgatcgcgtggtacgtatgccgattgccggcgcggctggtgctgagagcatctcggcaaccgagactgccttccccgccgagcccgtctcccctgacaaacccgcgcactcggtgatccaccgacttgacccgcgcgtgaagatggtgggcttcctggccgccatgttcacgatgttcgcggtgaacacacccctccagcttgcgctgggcatcgccatcaccctggccgttatcgcggcggcacgcctgaacccgttacgggtgctcgaatccattcatccgattctgattctgctggtgctgatgggcgtggtcaatctgtttgtggtgcgcaccggcacgccggtggtggcgctgggcccgctgagcatcaccgatcagggcgtggccatagccgtgctgtacgcctgccgtttcgcattggtgatcattctgggcgcggtgttcctcaccaccaccacgcctaccgccatgaccgacgccttcgacaccctgatcagcccgctcaaccggctcggcatccacgcccaggagatcgcgttggtcatgagtctggcattgcgattcattccaacgctgaccgacgagacccgtgccatcgtcgatgcccaatccgcgcgtggcggttccatcgaaaccggttcgctggcccagcgcatcaaggcgatgagcgcgattatcgtgccgattttcgccggcacgttgcgtcacgcggacaacctgagcctcgcacttgacgcccgctgctacgaggagagcatccgccgcacccactggcgtgccctgaccatcgccgcgcaagatctcgtgttcgccgtcgccgtcatcgcctacatcgccgccatcatcgcgctgtagggcggcaaacagcacagacagcaccggttgctatgctggtgtggttatacgaaagatgtaaggaaattcccatggcattgaccaagaagcaaatcaagcagctgcgcgcgatggcaaactcgctgaagcccctgttctatgtgggcaagaacgatttgaccgagtcggccgtcaatcaggccgatgaaaccattgagaagcacgagctcatcaagtgcgccgtgcaggacggttctggcctgaccgccaaggaagccgccgccgagcttgccgagcagctgaacgccgaagtggtgcagtccatcggcaatcgtttcgtgctgttccgtcgctcccggcgcgacgatgtggagcatatccgcttggtgcgcgagtagcgttcgctctgctcgatcccgtagcttgatatgagtaatggcggttggaatcagtccgattccaaccgccattattcatattcgcccagcgagcaccgtcactgatccaagatggacccgacgattcccgcaacaatggtcagaaccaaggaccccagtaccgaccaccagaaaccgtgtacgaagacgcccacgccgaacagactgaccgccagccagctggcgagtcgcatgaacagccaattgataatcaaggtgaccagcccgagagacagaatcgcaaacggcagtgcgatcagatgcacaatcggcttgattgacgcattaatcagcgccatgaacaaagcgaacgcggcgatgccgagaatcggaggctcccccaccggggtcatgccgggagtcaccgcgaccatgacggcggcggcgatagtcataatcaaccagctggtcaggaaacttttcatggcccaatcgtagcgcggcaggttttactattaggcaaaacgtgagatgatgttgtgcagaaacggtaagaaggtactgccgttcccgattgagaagggatagacccacatgactgataatcaacaacaaccgtacggttcggacagtgttccgcagccggcacaacctgcacagccggcacagccgtcgtacggccaagatgccgcacggcagcctcagggctatggcgccccacagcccgccgcatacgctcaacccgccgccggaagctacggccagcagcagccgcaatacggccagcccgccggcgcatacgttcagtctcagtacgctcagccgcagtatggccagcccgcacagcccgcagcgggctacggccagcagcccggctatggacaggcctaccagcagccgaatgcctacgcacagccgcaatacaccgccgctccgtatgccgccgccccggtgtggcaatcatccaagtccaagttggctgccggcctgttgggcatcttcctcggcggacttggtgtgcacaacttctatctcggcaacaccggcaaggccgtggcccagctgctgctgacgcttgtcggctggattctgctcggacttggcccaatcgcagccgccatctggggctttgttgaaggcatcatcattctgtgcagcaagcccggctcgccgtggcataaagacgccaacggctacgaactatcagactgagactgacctcgggccacgttcattgggcctctgatcaaccacgcctctgcaggtatcatctcgatgccgcagcctccgtgggatgcgacacgccggccgtgtacatgagttcatgtacacccgatacaggcgaatcagtatcgcacgagattcaacagttcctgctgtttggcatagcgggaaacgttggtcagggcgatgcggatgatgtgttcggaagtcttttccaaatgattgccgccggccacatgcggggtgatcaggcaatgcggctcatcccacaacggactttccgccggcaacggctcaggctcagtgacgtccaatccggcaccgtggagccgtccattgtgcaaggcgtcggccaaggcctcgggatcgatggcgtcgccacgcccggcattgatcacgatggctgtggatttcagacgccccagacgatccgcattcagcagatgatgggtctgcggcgagcgcggcaccgccatcgccaccacgtccgccaatggcagcagtgcttccagccgctcgaagccatacatcttttcaatgcccttggccggcacgtccgcatgacggcgcacgccgaaggtacgcatacctacggattgggcaagctgagcgaaatgcgacccgatgtcgccgacgccgataatcagtgcgatgccaccttccgggctcaataccgggccttcatcctgccactgatgatcacgctgattggaggcataccggttgaggttcttcatcaatgcccacatggtggcgaacatgtgttccgacacgctttggccatacgcgccgctcgcattggtgaccatggtgccgcgaggcagcacacccgggcggatgtacgcatccacaccggcgctgaaggtctgcaaccattcaagacgggtgtattgggaagcctgcgagaccggaaagttgccgatgactgcggtggctcgggagcgaagctcctcgggaacagcggccgaccagaccatgtcgccgcggtgcgcttcgtcgcccacgaattcctgcggcacatcgcgggccgccttggcgaaagcgcgccgttctccttcgttgagtggcaggcagttgacaatcagcttatgcgtgttctcaatacccatggttcaccaaactaggcggcagggcggatattatcgcgtgtttcctcatgctgaaccaatgccgaacccgccccgccggaccaatgccgaacccgccccatcaaaccccaccaaaccaagggacagcccattgcgcatcgaccgtagcgtccgccccgaaccgtacactcacaggtggttttgtgattccatagcgtgcagccaaggcagtacgattgccggtttatccgcacgcacaggtacctacgccggttggtaaaccttacattccatacattgcaaccgaacgtttaggagcatgtatgcctgagcagcatattgataacgagaagattcccacacgtcttatcggcgcgattgtggctgtcggctcacttgccttcattggcattctgaccgaaaccgtgatgaccgtgcttttccccgcactgatgcgcgaattccatgtcgacacggccactgtgcaatggattaccacgatttatctgttggcggtggccgctaccatgcccatcagctcgtttttgaagcgccgattcgcactgaaaaccatttttcttgcggctgtgattctggccatcgttggctcgctgatcatgatcgtcgcccaagccttcccgctgctgattgtcgcccgcattattcagggcattggctcaggcgtggccacgccgttgatgatcaacatcattctggagcagtctcctcgttcgaagatcggccgattgatgggcgtaggatcgctggtcattaccgtggctccggccatcggcccgaccgtcggcggcgcggtgaccacagtgctgccgtggcgcgcgattttcgtcatcgccattccgctggtgctaatcgcagcatgcatcggcatgaagtgcattgagcagaagacaccgaccgaggctgcctatcttgacccgattcagcttgggtccattgttgtcgcgttggtcggtctggtgctggcgctcaaccaaggtggcgtggccatcagtgcggcggtgtccggcaagtcagccacacgctccggcattatcgccattgtcagtctgattgtgggcctcgccttgttgatcgtgttcgccatgagttccaagcgtgccttctccccgctgctgcgccttggcattctcaaggatcccgccgtactgttacacgcctgcgcatatctgctgctgccattggtcgccatcggctacggctatgtcatcaccaatgtggcacagctctcgctcggcaccacggcatttgtggccggctctctggtgctgcccggagcactggtcggcgctgtctgtgccccgcttggcggctggttctacgataagttcggcgcggtcaagccgattctgattccgatcggcatcgctattttgggcccagtgcttatgctggtgttctcgatgcagcttacgcccgtgctgctcgccggattctatttcattttcggtctgttctattccatcggcaatgcgaatgtgatgaccagtggcctgtcggaggtctctcccgagttcaagccggacggcaacgccattttcaacacgtgtcttcagtttggcggcgctgccggtaccgcactgttctccacgattctttccgtggctcaggccggcgcaggagaagaaggcaccgctgagtttgctcacgccactgccgtcggcggcacatggacgtttgccacgatgacggttatctgcctgattggctggtgctgtctggccaccgcgttccgcattcgcgcggcacgtaagcgtgcataaatccgatcatcaatagagtcccagctttccaaacacgtgtggggcgtgccccgggagaaccccggggcacgccccacacgctaatgaaaggaagaaaaggagaaagaaagctttggcgggcagtgccggctgctgtgaccttgccatcacagcagccgggctgatcccgcctattcagttatggtgtgtgtcgtattcggtgcggagaccgagcgggcaagcccgctattttttatctccgccgaccgccatcaccgcgcgctgaagcacaacgaagacgaggatcatgagaccgataacgatggtggtccattcggccggcacaccgaagtcagaggtgagcggatcgaggatggagcggaccagagagccgagcacggagccgagcacgtagccgaagccaccggtgatgatcgtaccgccgatgaccacggaggcaacggcgtcgagctcccagccaatacccacagtgttcttggcagagccgatgtttgcggtgtacacgatcgaggccagggcggcgagagtcgcagaggtcaagtagatgatgtactgcgtgcgcttgaccggcagacccataagttccgcggaggaacgggagccgccgatggcgtagatggtgcgtccggtgcgggtatggtgcaggaagacgtagccgaagaccacaaccaccagtgcgatgatcacgccgacgttgaaggacagatcgttggagatcttcggattgtcgatgatcttgatctcgttggagatgaacgagaagtcattgccctgcgggaaggtcagcgagtcggtggagatgatggaggcaagaccacgggccaggaacatcgtcgacagggtcgcgatgaacggctgcatgttgaattcctcgatcaaggtgccggccagcaggccgaacacagcgccgatgagcagcatgatgatcatgaccaggaaggcgggcacgccggcgttcgccagcttcaggccgacgactgcggtgatggccacgatagcaccgacagacaaatcgataccaccggtcagaatcggcagggtcatggccacagccagaataatcaggtaggcgtggtcaatgaacagggaggagatgaagcccagtcgaatgtaggtgccgaacaacgcctgacccatgatgatcatcaggatgaagatcaccacggccgcgagggtcgggatcatctgacgatcgagcttgaagcccttcttgggagccttcactttgtttgccgtagctgttgtcatgctgccaccgccttagcttgagccttgagcgcgcgcttgcgtttcatattcgcgctcaggttgtgaatcttcggagcctgcatcacgcagatcacaatcacaacgacggcgaagaaggccggagttgcctcggcgttgacgcccagggtgatgatggtcttgcggatcatggcgataattacagcaccgacagcagagccggcgagggagaacttaccacccagcagtgaagtaccgccgatgacgactgccagaatggcgtacatttcgaggtcctgaccggtcttaaccacgtcgacacgcatcacggatgcggtggcgaacagaccagcgatggccgcgaggaagccggaaatcgcgtagacgaggaagaggatcttcttcggcttgataccggtcatacgggaggcttcctggttgatgcccacggcctcaatcatcatgcccatggcggtcttgcggcacagcaggccaacgagaatcacaatgataacggcgatgacgaagttggcgggaatgcccagaatgaagccgttggcgaaccacttcagcggttcgttgccggcaactgcggaggcgtcggtgttctcaccggaggtgatgaccttggccataccacggccggcgagcatcataatcagggtggtgatgaacggctgtaggcccaggaaggaaaccagagcgccgttgacgcagccaatggccagaccaacagccaaggcgatgaggatggagagccacacgttcatgccattggacagggtctgcatggcggcggcacctgccactgccataacggaaccgaccgaaaggtcgataccggcggtggagataaccaaggtcataccggttgcaatcatcaggtatcgggcagattcctggagcatggtgatcagcgggccggccagaccaccggtgttgctgttccagctcagagccaggaagtcatgctggaagatggtgcagatgatgaccagaagaatgaatgcgacgatcgaccaggtcaggttgctgctcagcagcttcttgacaaagttgttgccctcggcttttgccttttcagccatctcatgcctcctttccggtgtttacgttggtgttagcgatggtttcgacgatggtcgcctgagagacggtgtcgtcgttttcgatttctgcgatcttgtggcggtccttgagaacctcgatgtcgtcggacagacgcacgacctcttcaagctcggaggagatgaagacaacgcccatgccctgagaagccaggtcaagcacgacctgctgaatttcagccttggcaccgatatcgataccacgggtcggctcgtccagaatcagcagctcggggtgcgtggccagccaacggccaatgagcaccttctgctggttgccgccggagagattcttgaccgggcgatccgggtcggcgggacgaacgttgagttccttcatgtacttgtcaacgatggcgtccgcttccttcttgggaatcggcttgaacataccgcgcgttgcctgcagggcgataaggatgttctggcggacggtcaggtcgccgatgatgccctcatcacgacggttttcggtggagtacgcgattttgttcttcaaagccgtgtacggatcggagatgttgaccttcttgccgttgagcgtgtaggtacccgaatccggcttgtcggcaccatacaggagtcgaccaagctcggtacgaccggagcccagcaggccagcgaagccaacgacctcacccttgtagatgtcaacatcaaccgggttgatggtgcccttcttgccgagacccttgacatcgacgatcggcttctcgccaggggtgatttcacggcgagccttcttggcaccaatctgggacagctcggcggcggacttaccaatcatcatgccgatgagttcgtcgcgcggggtgtccttggtcatgacctccttgatgaactggccgttacgcagaatggtcagacgatcggtaatctcataaatctgatcgaggaagtgggagacgaagaggatggccacgcccgagtcacgcaccttgcgcatgatcgcgaacaggtccctgacctcgttggcatccagcgaagaggtcggctcatcgagaatcagcaccttggcgttgataaccatagcgcgggcgatggcgaccagctgctgcatagcgatggagatggagctcagcggagtgtgcgggtcaatggattcgaggcccatctgtgccaaatacttcttggcggcctcgtgggtcttcttccagtcgatgccgaaggggccgcgcttttcgtggcccagcatcacgttctcaccgacggaaaggttggtgcacaggttcacttcctgatacacggtggcgataccggcgttttgtgcgtcgagggtgccgttgaactgctgaggcttgccgtccaccataatggagccggcgttgatcttgtacacaccggtcagagccttaatcatggtggacttgcctgcaccgttctcacccatcagggcgtgaacttcacccgggtagagagtcaaatcaacaccatccaaggccttgacgcccgggaattcaatcgtaatgcctttcattacgacgatggggtttttatctgtcatgtctttgccttaaacgagaatgagatgttatcgttttgtgatatttgagccacacatgagtgatggtgtggaaggaacatccttctcacaccatcacaccaattatttggtccagttatcaatgagtcgcagcagacttatcagtaggcgcgggtgttgttgtccagggcttccttggcggaggcggcgtcgaaggtcttggactcgatctcgatgtccttctcaacggtcttgccatccagatagtccttgacggcctgagcggtttccttaccgaagatcgggttgtactcgatcacgtaggagaggtcgccatcaacaagagcctgcagagcgttcttggtaccgtcgatggtgatgatcttgaccttgcccttgaggcctgcggcgtcaacagcctgagcggcaccgaggcccatctcgtcgttctgagcgaagatgaactgcgggttgtcggacttgtacttgtcgagcagaccagcggtcacggtcttggcctcatcagtggaccagttagcggactgggactcaagaaccttgacgttggaggcaaccttgttgtcccaaccagtgccacgatccttcaccacggacaggccggcagggccttcgaggatgaagccgttggcgccatccgggaagttcttgttcacgaactcggcagcctgctcgccgcaccagacgttggacggtccgatgtgagcaacgatggccttcttggcctcggcgtccttgacgtccacgttacggtcaacggtgaagaccggaatctcagcctcagcggccttcttcagggagtcatcccaaccggaatcctcggtggaggacaggatgatggcgtcgacttcgtcgttaacgaacttgttgaacgcctgaatctgcttctgctgatcgttgttctgggtcggagagtaggtcaggtcaaagccggcatcctcgaatgcctgctgaatgtccttctcgttggcggtacggaagccgccctcagggcccacagcaacgaagccaaccgtcttcttgccggagtccgagctgccacctgcgttgctggaaccgcatgcggcaacgctgacaagcgcagcagcagaagcaacgagggcaatggccttcttccaattcttcataaatactcctcctcgagcagtgtttattttttggatgatcttccatcctgtttggtgactgttcgtcatcgacaatctctagtgtgacgctcacaggccaaatgttcaatcgcatgcgataacagtttgataacaggtttataacagtttgataacagtagttcaaaaaacggcttcacagcgccgttttgccttgttattaagccataataagaggtggttgcacggcggcaatgccgctcgtcagccgagcgacaaagccgccgcatcacaacacaagaaaagttattatgaacaccgtttttcttataccatctactgcgcaccgagggcagtgacctggctatcggcgatggtccaggaaccgtcgagtgagccggaaacggagcgcacaatacccaaatcgtccacaatggccaggcgacgggacaggctgatctgccccgatgccatcgacgttatgattccattgggtaaacgctgcgcattggccgggcctggtgccatttgacgccatgcctcttgttgttcgctgtttccctcaggaggtgtggtggcgtacaccagattcagatcattgtagaacgtgagcatggtgacgtgcctgagcacactcacttgggtggccgctttgctcagaccgctcagtgttttatcaccgttgcgcgccacaccggtcatcatcacgccgttcgtgtcctcgcccccgactgccaacgccaatcggcacccttccggagaaaccgccaatgccacaatgctgtcggcagcaccaagccaatcaagcttcagatcggtttccttgcccccatctgacacatgcaattcgcgcccgttctcggatacagcccatacttcgccatccagaccttcggtaatcgatcgcatcggctcgccggagaacatcaccccacaggacgcaccatcagatttcaggcattcgaccacgccgtccgcacgcaacaccgcgccgccggatgaggaaaaaacgaagccccgagcatcgtcatatccgggggcctcccctacacgcaacggactggagctggccagggaaacgatatgaccaccggtcaacgtgtatacgcccgctgtcggctgctcggtagtaagtttcacatttgcgtcggcatcggaatagtccactccatcgccggtaatcctcagcgcgtattcggcattgccgtcgcccatagtcagacggatgcgatgtaccagcaggcctcgttcttcctcgttcaacgcattgataccgctgttgaggtgtatctccaccacattgttcttcaccggcacgctgtcgaccgcgagtttgatggtagacaagccggcgcctcgcagcactccttccaaccaggagggtgcatccgagagcacttcaccgactgcctgggtgcgccagttgcgccagctcaaccaacgaatatccgggataagttgcttgccagaagtactcacctgatacacggatacttggcggaacacctgttcaaaatctgcggtggaaatcaccacgccgctttccaatgacgagatgcgccattggccgcttttcttcatcagcgtatagggaagcctgcgcgtttgggtgctgtttgacggcgtgtatacgccatgcgaatccaaggaacccaccacctgaagttccacttccacaatcagtgagctttccgcaccttgtggcgcgcttatggtgttggcgcgtcggcggaaatcaggggtgccgctgtataccagtgccgcagaatctccattccacccggcagaagccgagccagtcaggaattcgcgagccacgcgatagccatcggactgcacgccagcaggcatagcgtcatagaaccctttgacaatggtttccggctgtgcatcgtccgcaggcccctgaggattggtgtaaacacgctgggtctgctgttccaccggtgccagagtctgcaccgagccgctaatcggcaaaccgaacggacttgagcatgccgtcatcgtgatgcaacaggctatggccgcgcctgcggcggcaatcgttctggtcactcgtctcatagtggcctccccatcatcgtgtcgcggcgaacctcatgataatcatgtgtgacttggctggtggccacaccaaacccaccggtaacacgcaggtcatccggcgtttcagaagcaaaattcaccggcagttcagcgtccgccacctcaccttggtcggggtcacgcggcagcaataccaagaaccaggtgccctcccccactgccgaacgtacacggatactaccgtggtgcagcaaggcatcagtcatggcgatggccaggcccaatccggtgccgccggtaacgcgtgaacgtgaaaggtcgcctctccagaatcgatcgaatacatgagcgactttgtcttcgtcgataccaacgccatagtcgcgaacgctgatggccacggctttgcggttggccgcgacgcgcacttcgatcggccggtcctcagcgaaatcgacggcattggccaacagatttctgacgatgcgaatcactcgacgcgaatcgatacgagtcaaaacctgcacattgggcagatacgtgtgaatcggcacccgtttggcttgggcgatgccgtcaacttggtccactgccgtttcaattggttcgcataaatcggtttccacaaggtcgagtgccgcataaccggcatcgtagcgggagatttccaacagatcggcgagcatgtcttggaatcgactgatctggccggccaacagttcgaccgtacgcttggtggaggggtcgaagccgtcttttttcatttcgagcaggtcggaagccatacgcatggtggtcaccggggtacgcaattcatgactgacgtcggacacaaatcgtttctggaaaacgcttgcttcctccagctcatcgatcttctggttgagcgcatcagccatcgtattgaaggattgctgcagcacaccaagctcatccttacgatccacggtaacgcgcatatcgagattgccggaggccagtgtttccgaggccgctgccactcgtccaatcgggcgcacgatgccacgaatcaccagccagattactacgcccaccacgatggacagcaacgcacagatgaccaccagactgagctgaatctgtgtcaaggactgctgctggaacgtgtacgaataaatggcgaagaattcgaggttgccggccacgccaaagtccaatacggtgccgagcaccgctgcgggcgtcccgctgcccggcatgccggaatcaccgggaatttcgaccggctgatagaacacgctgtcatccaagtcggaagccacggacgaacggatgtcgtcagaaatcagactttgatagctgggttcggtggatacggggatgatggcacgcgagttggtatcacgactccacaaatacacacctatcaggttggaggacccctcggattgcaacgaggacgccaagtcattgaccagctgttggatctgcactacggcggagacatcggccgcgtccagactggtttgggcctgctgcaccatgtttgaatagtcggcacgcgactgcgaagtgatttgggtaagcagcgaggcgcgcactgataccatcgatacgccagagaagacgatggccacggccagcgtaagaatcacggtgagggccacggtgcgggcctgcagtgagcgacgaacttcagcgcgtccgtggcgcagcaagcgtttgaggctgaatcgagggcgcaggttcattgttcaggagtgacgaacttgtagccgataccgcgtacggtctgcacgatttgcgggttctcggggtcgtcctccactttggccctaaggcgttgaacatgcacattgaccaggcgcgtatcgccggaattctcgtatccccagacattcttgagcaggctggaacgactgatggcctcgccggcggcggccgcaagcatgaacagcagctcgaattccatcggagtgagattcaggtccttgccatccttggtggcggtgtgttccaaacggtcgatgacgatgggtccgcgttccagatggttgacgtttgcattgccaccgcttgcgccaccggtggcaccgtcttcggcggccggcttggcgatgcggaagcgtgcacggatacgcgccagcagttcggctactttgaagggcttgggtacgtagtcgtcggcaccggcttccaagccggccacgacgtcaagtgtgtctgatttggcggtgagcatgataatcggcacattagaggtagctctgatgcggcgggccacctccgtgccgtccagcccggggagcataacgtcaagcagaatcaaatcgggcttgacgatggggaacatttccacagccctcagcccgtccaggcaggtcacagtctggaatccctcgttttccaaaacaagactaagcatttcgccgatggcctgatcatcgtccacgatgaagatggtcgccatggtgtttgcctcccctttttccactgttattgttgcgttacactttactcccctatgttcatttctgttcgggttccccaccatgcagtatcgggcgaatcttggcaagacgctggctgacttcgtgttcatagccgcgatcgttgggatggtagtactcggtgccacgcagctcttcgggcatatattcctgtggcgccacggcaccgggccaatcgtgcgcatacttgtagccctcgtggttgccccactctttcataagcttggtgggggcgttcctcaaatacagcggaacagcgccgatcttgccggtatccacgtccgcgagcgcctggttaatggcgttatagctggcatttgatttgggcgcggtggccacggcaatcgtggcttcggccaaaataatacgtgcctcgggcatgccgaccagcgccacggcctgcgccgcggccacggtgacctgcaaaatctgcggggcggccatgccgacttcctcgctggcggcaatcatgatgcgacgggcgatgaagcgcggatcttcacccgcttttagcatgcgcgccagataatggatggcggcatccggatcggagccccgcatggatttgatgaatgcggaaatcacgtcgtaatggtcatcgccgtctttgtcgtagcgcacggtggcggtgtccattaccgtagccacgatttcggaggtgatgatgggtcggcgtgcgccctttttgcgggcttcgtcgccggtgaccgcgccagccgcggcctccagaatcgtgagactcttgcgtgcgtcgccaccggccatgcgcacgatatcggcgatggcttcgtccgtggctttgacctcgtccctgagaccgcggtcatcagtcagcgcgcgctgcaccagttcggtgagctgatcaggctccaatgactcaagcttgacgaccaccgaacgggagagcaacggtttgatgatggaaaagctcgggttctcggtggtggcgccgataaaggtcacgtcgcggttttcgacggcgggaagcagcgcatcctgctgggatttggagaagcgatgcacctcgtcgatgaacagtacggtttcccggccgcgtgacacgagccgttcgtgagcgcgggtgagtacgtcgcgcacgtctttgacgccggaggtcacggcggagagttcctcaaacacgcggccggattggccggccacgatggtggcgagcgtggtcttgccgacgcctggagggccgaacaggattacggagctcggcgcggtgagactgcctttgctggccggattggcgaggcggcgcagcggcgagccctggcccaacacctgcgtttggccaatcacctcgtccaaagtgcgtggacgcatgcgcaccgccaacggccgtgtcatcgactccggcgcatcagccaccccaaacaaatcgttctcactcataacgtcctatagtaccccagtgttcgaacagacgttcgagctacaccttggcttccctcagagaggggagccaagaaaggaatcagttactcaccttgtagtcatggaagactacttcaccggtgtcttgggtggcgtcgaggtccacgatgccttcgatggcccagtcgtgatcgccatcggaatcatcgataatctgacgcaccttccacgtatgctcgtcgttctcatgcttgtcatccaacatgaacagttcgggcgagcgcgcttcggcgccgatgcccacgtactcgtgctcgtcgtagtagtcgtcgagcacatcttcccattcgtgcacgccgtagccccagtccttgtcgagcgcgccgagcttgtccggctggtcaaggtccataagccgcacacggcggaacaaggcattgcgcaccagcacggtaagaccacgacggtcctcgaccaccgcgctttttgcgccgggcgcggccaaggatgccgcagcctcggattggtcagccgagtcaccggcgttctcccattcgtccaccagcgaggagtcgatggagcgcactagcacgcgcagccaggagatgatgtcttcgagttgctcgtcacgcttttcgggcggcacggtgcgcgccagcgtgcggtaggcgtccgagaggtagcgcaacagggtgccttcggagcgggcgatgttgtatcgggtgatgtatccggtgaagtcggaggcggtttccaccatgtcgcgcaccacggatttcggcgacagccagtagtcgttggcccacggcacatcgtggcggtactggtcgaacgcggcttcgagcatgtcttccagtggcttcggatacgtaatctcctgcagcttatccatacgctcgtcatagtcgagtccgtcggccttcatatcggccatcgccttgtctcgggcctgacgctcctgggcacgcagcacctgcttggggtcttcgagcgtggcctcggccatggagatcacgtccagcgcataggtgtcggactcggggtcgagcagttcgagcgcggccagcaggaacggggagagcggctggtcgagggcgaagtcgtccggcatatcaagggtcatgtagtagtccttgccgccgtccttgcggtcctcggtttcgatgacttcggtatcgaacagggtttggaagatctcgtcggcccgctggtgcagatgctccttctggtcgggggtctgcgcggaatcgtcgatgagatcgtcgatacgggcacgggcgtcaccgccctgcgccacttcattgagcaccatcgaatgcgtgattttcaggtgcgggaccagggtctccggttcagcgtcgatgagcttatcaaacgtgctctggttccaggtcacaaaaccttccggcgccttcttgcgcttgaccttcttgagtttcttcggatctcccccggccttggcgatggctttctggttttcgatttcatattcgggagcctcgacgatcaccagtccctcggtatcgaatcccatacggccagctcgtccggcaatctggtggaattcgcgggcgcgcaggcggcgcatcttggtgccgtcgaacttggtcagggccgtgagcaccacggagtgaatcggcacattgatgccgacgcccaatgtatcggtgccgcaaatcaccggcagcagaccctgctgggcgagctgttcgaccagacggcggtagcgaggcagcatgccggcatgatggatgccgacaccggtgcgcagcagtcgctgcagaatcttgccgaaggctgtggtgaacttgacgcctttgatggcttctgcgatggcttggcgctgttccttgctggatacaccggtggaggcgagcgcttgcgcggtctccaatgcggcgtcctgcgaaaagtggaccacgtaaatcggggtttcgccgttgcggaaggcgagttccacggttttttccatcgggtcgagcgtgtattcgtagctcaacggcaccggtcgcggcgcgtcggcgattacatccacgtccggggtgtcgttcagatcggagagcttgtcggcgatggcgtccacattgccgagtgtggcgctcatcagcaggaactgggtctgcggcagcgtgagcagtggcacctgccacgcccagccgcgctccggatcaccgtaataatggaattcgtccatcgccacgaggcccacatcggcatgggtgccttcgcgcaaagcctgattggcgaggatttcggcggtgcagcagatgatcggcgcgtccgcgttgatgtggctgtcgccggtgatcatgccgacattgtcgcggccgaacacttcgaccaagtcgaagaatttctccgacaccagcgccttgatcggagcggtgtaataggagcggcggccagtgcatagggcggcgaagtgcatgccgagcgccaccagcgatttgcccgaaccggtcggggtattcaaaatcacatggtcgccggccaagaggtccataatggcctcttcctgatgcggccacggctcgatgcccttgacgtcttccacccagccgaagaaccgttcgtagatgtcgtcggccgtaagattccgttcgcgtccgtcgccgtcccattcgggggccagccgccccagggatccgtattccttctcgtcagtcataatgctcagtctacctagtggcctattccgacggcacgagccgccctccgtcgctatgcgacgcctcccgccagcgggcggagccatgcgaagagctgtgccatgcgcttggctccgccaatgggaggatcgctcacgccaaccggcggcgcacctcgtcggggtccacctcgggttcgaggggaggccaggtcatgttcatgttcttcaaggtggtgcgcagcagttcggagaccacggctcgcgaataccagcggttatcggccggaacgaggtaccacggtgcggcggccgtgctggttttctcgaacacctcctgccatgcggccatatactcatcccagcggtcgcgggcctcgagatcggagatatcgaatttccagaacttggtgggatcatccagcctcccaagaaagtgttttttctgttcttcctggcttaccacgaggaagatcttgaggatggcgcatccgctggcggccagttcacgttcgaaatcgttgatctggtcgtagcgggcacgccatacgtcttcgggataggtgccatagacgtgcggcatgaccacatcttcataatgggagcggtcgaatacggcaatccaccccggcttgggcaattcacgcttcacacgccagaggaagtcgtggtcgagctcctcggccgcaggcttgccgaagccatggtaatggatgcccatcgggtcgccttggctgaacacgtggcgcacaatgccgcccttgccagaggcatccatgccttgcagcacgatgagcagccgccgtgccgagcctttgacgccattcgcgtacatgagccgctggtatcgggcgatttcggaggagctgatcgaaatgaacttctcggcatcctctttattgccgtcgaatccgggagtggaatcgccttcgacatcagtgacctgcatgccgtggtggaacataagacgttgagcgggcggcaacgaccatacggcgctgagcagttcactggatttcgccgcacgcgccagtcgttcaggcacgctggcactggagtcgatggtgtctatgcgatccaccgcgagctgtaataccttgtcgatccgtcgatcggttttggattcctttcccttgccgttcttgttgttctttcctgaggattttccggccgtaccccacttgccggcctcttcaggctcgttggttctgtcgtcgtccttggtcatgctcccgattgtacgtcttgtaactcaggagacctagcaacgtagcgacattcacatttcgcctgttactgcaaatctataggcatgcagtcgttcggaccgtaattgttggctttgcaccaattccaagcctcatctgtcgagtcgaagccctcaccggcaagaatcacatagtatttgtcggaattgctgctgtaggcgggccagtcacccgaccagataagcagtacgtttgaattcttgttgtgcatcgtgatgaattgcgcaagaatatcgcggtagttccaggtcttgccttcagcctccatacccttacgcttgctggacagctgtgcggtatacgtggaatagaacagctctgcggagtccttgtcgtgctcgacctgccaatccaatgccttgcttgcattattttcggcttcgtcatccgtaacgttgctgccgcttatcacgcctggatcagacgatccccagcaatatcttctttccggcagacccaccggaacgcggctgcgcagcgccaccgttgcctggcgccgtcgacaatgccgaagtaggtgcggtcgccgtgttgaaacttgggggcagcggcatcgaacccactggcacctgctggggagcagccggtaccagcgtcgggccatccatcgactgaggacttgggcttggcgcagactgtgccatcggcgcaccgcattccgtgcagaatcggcttccctccggcatctccgttccacatacctggcacttcatactctctccgttctccctcgtccctatcggccaatcccccgtccgtttgcagtacataaagaagcggcaaacggcccgaaacatacctgagctatcaggaagacggcacgatctgctacgagaaagagatcatcaccgaccggcaaatcgtcggcatcatgctgaagcatccgaccagcgcacgcggcttcaagcgctacttgcgcgccgcatcatgacgcttgaccacgatggtgacgccacccgcagcgaacagcgtcgccagaaccacaaccaacgcaaccgaggcaccggtatcggccgtacgttcggtctgctgtggcttggtgctgccattggcattgacgctaccgctatggttgccgttatccttgtcgtccgtcccggtggacactccggtaacggcaacgggcagagcgaccgtggtcttattggtcgcaccggtcactgtcaggcttatatcaccggtcttggttccggcgggaatcatgaccttgagctcggcggtatcgccattcgcaacctgcgcttcgccgaccacctgctcgccgatggtggcggtcagcttcgtctcgtcaggcacgcccagcgaggtgagcgtaagcttcgagaagtgcagggtgaacgagccaccggccttgaccgcaccggtcgggatgccggtgacggccactgcacggcggtcgtagcgcggggcaaccggatcgttgtccttgagatagtcaatccaagcatcgcggtccaccagaccggtgtccttggtgttcgtgccttgggcgaaggcgcggaagttatcgccgccctccaacaggaagctgaacgaaccgatacggtagttgcgtttcagatccaaaggctcaccgttgacggtcaccgaggtgatgtgatggccttgcgcagcatccggatcatacgtgtagctcacgttgtgggacagtccgagttgcagatacgcgcgcgatggcgtgctgccgtccgcgttcgtctgccactgctgttccagcgcttccttgaactgcgcgccggtaagcgtggtggtccacaggttgttcaggaacggcagtacagcgttggcctgggcgtaggtgatattgccgtcggcatcgagcgtgcaggcgtcattggtgccggacttgcagaattcggcacgcagaccgccggggttgaccacaccgatttcggccgcgccgcggtcctcacttttgagcgaatcgagcagcgcatcggccaccagattgcccatggtcgattcggaggcgcggtcgtcacgcttgccgtccttgaatgcggtggtgatatccgcagacaccttgccgaccttctcgccgcccttttcatcggccaccttaagggcctggtacacgatgtccctcaccttggcgacagtcgggttcgcggcggcgagcaggccatcgttgtattcggcgtaatcgttgtagtgcggatcatttttgtcggcgggctgcgaagccacctgcacggccgtgttaccggacttgtcgtaagacaccgcaccggtggccgtgttgtaggtgagcaccacttggccgatgttggcggcatagctaccggtctggatgatcggccggttgttgtgcgcgggatcggtgtacgagtacttcatgtgggtgtgtgcagtgaagatcacgttcactgccgcatcggtatcgtccacaatcttctggaatacggggctggcggccttctgctcgtcaagcgtgggcttggccgtggcgtcatcttcattggaggctgcaccctcatggtattcggccacaatcacgtcagcctcgccgttggattcgtcgccgtcggtgagttgcttggccacacggttcacggcttccaccggatcgccgaattcgatgtccttgacaccaccgggagccaccaacgtgccggtttcctgagtgaccgcaccgatgatgccgaccttcacgccgttcacctcctgaatgctgtactcgggcagagccggggttgtggtgcccttcttgtacacgttggcaccgaggtaatcccattgggcgttgcgcgcgccctccttgccaatcacacgatcggtaaggtcggcatagccttggtcgaactcgtggttgcccaccgccgaagccttgacgcccaaagcattgagcacatcgatggtcggctggtcctgctgcaccgaagagttgaacagcgaagcaccgatattatcgccggcggacagcagcagtgatgagtcagggtattcgcccttgagctgctcgatggtggcggcgaacggcacggtgaggttcttgtcgatacggccgtggaagtcgttgaagttcagcagattgatggtggtgctggcgggaaccggctgattggttgccatatagcccatacgcaatgaatggccattggtcacgccgtcgtctgcccagaacaccggcttgtacaccttgccatttactaccttggtggcttcggtatcaggggtgatggcaaaaccttcggtgttctgcgtacggatttcatccggagtgtcggtcagcttggtcagctgcagcacaccgttcttgaattcgtaggtgccgattttggcaccggtgttcgcgtcattgtcgctttgggcgagcagctggttgtgctcggcgtcccaagtcagatcgcgcgggccatcatagccggcgttcaccgcggactgcggcaggtcgatgtcggccaccggatgcaccaggtcctcatcattcacggtttgcagtgcgaaagcgtagatatggccggttttctccagtgcggcgaagaacagaccgccgaaatcattgccgaaaccgtccgggtcgtaggtcattacgttcttcgggtcaaggttggattggaatccattggcggtcaggaccgagtcgggaataaaggctatgccttccaccccaagattggcgtccgctccgtggcccagcgtcacgccgaactgcgtgagtgctgcggtgagattccactcgtgcgtagcggtcagctcttgcgctccgtcgccgttggcgtcggtggttttcgcggtcacgtcatactgcaggatggaaggccgcggcacattcttgttttcgttgtcgcgctcggcgccgatgaatatgcccttggatgaatctccgttgatcagcgtgatgccttcggagtccacaccgcccttgccgtccttgaagtgcagctgcttgccgcccttggtctgaccgttgttggtgaaggtccagccatcagtgggatcctgctgccatgtgccgttctggtagacgaacttgttgatggagccagggcccttatcagcggtgttgccgagcgtggggttcagatcgttgtcggccgcccacagcacgccttgcttgccgtctttaccggcttcatacaccagaccagacagattgccgtcagtgtggtcgccgccttgtcctttggcgccaaattcgccttcggcatccactgtggtcacatcggccaatcccgaccatgcgtccacggtcatggtctcgccggcgggcggagtcggagtcgggtcatcgaacacgttctgtgcaccgggcgtgggcgtatcggaaagcgcgaaagtgccatcgtccttacgggaccacgactgactgtcgctcatcttcttcacgccggttgtatcggtattccatgacgtggaatccaccacatcgctatcggtaaagtcgccgctggtagtggtcagataggcttcgtcggcatcggaacccaggccgggctcggccttgtcggggtcgatgtatgccaccagatatccgccggctttgatgacggtgtccgtattcgttacttcgctggtgccgatggtgtagtgcttcttggctttcttgccgctgtcgtagatgccccagcccttcacgtcaacgtctgtggagccggtgttcttgagctcgacccaatcgcaacgcttgctatccgggtctccggcagctttcgtattgccggcatagacctcgttgatgattacggatggtttggcagccgtgttctgttcggcagtggcctgctgctcgtccgcagccgcagcgggcacgccgatcagggcgatgctgctcagtgtcaccgcagcggtgagcagcgcgatggcgcgccgcgacatcgcggtgaaattgttggtgtggaacattactcccgttccttcctcgggttgtgccgccgcagcatgatgctcttcggcggatgacaccccgagagtatgagagagaaatgaagccgacaccgtatgaaggcaaactcggcagatctccaaactgaactttggctgaattaccgctgaagctggttcttggatttgcgtcgaaccgtccgtattccgccgacaatcgcgattacagcggtaccgatggctacgctgatcaacgccggtcgttgcgcggcatggagggtggcgagatccggcccggccgcaatggcgctgttttcacccgccgagc

SEQ ID NO: 948 - DNA, 8519 bp, Unknown
  R117_24m  MAG No. k141_14437
cacgtacaggaagccccgatacccctcaaaggtaccggggctttccctatatccggaaccggccccggcccgaacccgcacgggcaccgggacctccccgcatacccatgagacccacgcccgggaccattcccggccagccccgacggcgaggccgaacgacgcggcgcgtccgcgaccgtgggagcccgacgcccgggcccccggtccgccgcgcagacagctcccctccagaggggaaccagaaactggcttggttatggggtcgctctacactggcttctgctatgcattacttcacccctaaacgttgcgccacgtcgaataaaatcatgtaccacgataaggcgcaggctcagcgtgccgctgatcaaagcctgatcgagcgtggagccgagctatgggtgtaccgttgcgaatattgcggatgctggcacctcacacatcgcgatccacaatccagttaccggcatgtaccgctgaaccagcaactcaagccacacagtcgtaaaaagggctacaagccacgtagacgttagcgtcagaagctccacaggcctcgccaacgccgtatctgaggcaggttacggtccaaacacgccaggtcgtaggctgctaagcgttcagggcgctcggacacactccgtccaacactcacatcaccttggtgctttcaaggttgcggataacccaatcgttgaagcgaattaccggcttgcgcaacataagtcccaacagcaatgagggaacaaggaacagtgccagtttgcccatggaaacccagtattccatgccgaatgagcccgccatggccgaatgcatcgcatccaccgcataggggaacagtagccatttagaaacgacctggaagaacgtcggcagtgtttcaatggggaatgtgccgccggaaccggctacctgcataaccagcagtactacggcaatggctttgccgatatcaccgaacgatagggccagcgtatacacaatattcgagaacaccagtgcagacaaccacccgaccatcaaaaactgaatcggatgctcacactgcacgccgagatagaacatatcgcccaggcacaccagcgtaccttgcagcaaagcaaggaaaccgaaaatcatgtatcggccgaaatattcgtggtgcaagcgtaaaccgaactgccgcgcattgccggaagactcggcacgcggcttcttcagcacatccaaggcggcggccggtccggcaatccgcccggcaatcatggcctcgcgaagacccactcccgaaccgagcggcagatcattgcccaaccctaagatacgggccttctcatggtcggaaatcgatactttcaacatggcgaccagaatgatcgcaccgacccagatagacagaatcgtgtagaacggagccatcgcggaaccatagttggcaacgggatagagcgcgatgcggtcgaccgctacgggtgccgccagcatggaagcaatggcatcgggcttcgcagaggaaatcacagacaggtcgttggtgccgccactggtgatagaggcgagttgggaagacaagttgtcgagtttcttcgccgaacgggtcaaagcgctagctgcgtcagtcaaggctgactggatatccgtcaggctgtctgaaacgccgccagaaagacctgacacgctgctgacggtcgacgcaagcccgtcgattacggaacttgcctgcgtggccacttcgtccatggacgaggtcagattgttcagttgcggtttcagcgtgctcttgtacgtgtctgaagcctgagtaatcgattgtttggcggcggcgatttgtgatttcagatctcgacgcgctgtatcggcatcggcagtaccatttgctatgtgcgtggccgcatcgcccaacgcggtggcggcttgctgcatgctctgctgcgcctttgtggcttggtctgcagccgcgttcagttgagcggcaacggtatctccgcccacgggcagtgaagccgcttgtttggcgagatctcgtaaagcggcggcatactttccaaagctgtcggcctgagcctccactttggattgcatatcggtcagcttgtttgatatctgcgaggattgtgagcccacatcggcaaaagcggcatcgatctgcttggcaatggtgtcgtaggatgaaccggcctgctgcaatgccgtaccgacgccatcggtggctccggacaatgccttgtcgaggctggagacgccgttgcgggtctgtttcaacgcctttttggttgtggccgcagctgagcctgttgatcccagcagcttatcggtggaatcaatgatgctgttggcggccccgagcagattggcataggaatccatctgcgacgcagtgccggtcaaacgagatgacatggtggcaatatgactggaggcgttgttgacgtactgctccatttgcgggctttgcgcgtaatcggccacgttggaaaccaaatccagcgccacgctcgccaaggtcttcacaaatgtctggtcgatggtcgtggccacggtggtagcaccctggtcggtgatatgcggagcgatcggattgattttctcattgagatagtattcgagcttggcgtgcttgatcttcggtgaaaacagcgtcatcatatcggagctgaagctctttggaataatcagcgcggcatagtattcgcctgagttcacgccatcgatggccttagcacgatccacaaactgccagtcaaggtcatgattggccctgagcgtattggtcacggtttcgccgacgttgatggtgatcggcatcagatcggacttatagcccttatccacgtttgccacggcgaccttcaaggccttggtgttgccgtacgggtcccagctggcggcgatgttgtaccaggcgtacagtgccggcacaatcaccaatcccatagccacgattacggcgatcacattgcgggtggcttggcgcacgtcacgtacgaatattttccagataagcttcatcgtgcgcctccttgcccagactgcccagactgcccagactgctcgaactgtgcggtgtgcgcagtcggctcggcggcctgatcgccgaacagtgtgagtcgttcagtggtttcgccgatatccggattgctgcccatcgccgcttcgtgacgtccgtggccgtggaaacgccgccacacatatccgttgagcatcacattgcggaactcgtcggcactcatggcactgacgccaagctgcatggcgtaggtttcgcgtgcgtattcaaccacaatgagataggcgtcgataagaataatcgacagaatccaggaggtcagcatggcgattttctcttgggtgacgaacagcagtaccaggaatacgaacgggagtacggtcagcaatgtcagaccggcaacgatcatctttgggtaccgcgcgaagaaccggtgcgcgcgatgagcgatgatatcgcgcagttccttgctgtcggacaccgtgcggaatacggagttcaagctcacctgttcgttcaccatgctgttgtgctcggtgatcatcaggtcggtatctcccaaacgatggtcgaacagcgcgttcaggttcatcgcataccggcgtacgacaagtcccacgaaaagcgccgccggcagataccagaacaggtgcagcatgtcgagccagtaatggttcgcgtacaggccggcgatcgggccgcgcatcgcgttgatgccgtaggtaaagggcagccatgggtgcagttcgcggaagaagttcggcatcatttcaatcggatacaggccggaggcaccgggtatctgcacaatgaccagaattacggcgatggctttgccgatatggcggaacgccacggccagcgcgtaaataatgttgatgtagacgaacgaacagaagattccggccaagatgaacagcagcggatgctcgcattggatgccgagcaccagatcgccaatggtggcgatgatggcttgcaggaatccgatggtgaccagcagcagccagcggccaagatatgcttgcgtagcggtgatacggcgaatgcctttgcggtcgacctcaagcttgtagatggcaatcagcacgaaaccgcctacccacagtgccagattcgtgtagaacggggtgactgcggacccgtaattgtcggtggcgtacacgactttcgtggtcagggtgacgggattgcccatgaactcgccgaatcccttgtcatccagatgcagcgtatcccggattttctggtaagcggcggaactatcgagcgtggcgatatcggtgcgtacggtggcgacatcgctggccgcctggcgcagcgaatcctgcgtgctgctgatggtggttttcgtttggttcagggtatcgacaagctggtcgaacagcccgtcggcctgatccaaggtgccggacaacgaagtcaacgtgccatccagcgtgccgttcagggcggcgaaactgttcaatgatgaggtgagcgacggcattacggtgccggtcagcgagccgcgcgcggtattcagcgccgcgatgccgccggtggtggtgttggtcatggctccggaaaggttcgtggtggcgtctttgccggagttgatgaactgtgtggtgtcggtatggaaggtgttgagctgtgtctgctgtttgctgatcaatgagtcgagcgcatcgatttgtttccagatgttctggccgaccgggtcggtggtgtctttgccgatgccggctttggtcagcgcgtctttcagatcgctgattgacgtttgggtggcgttcagtggggccgaaagtgtgttggtgatggtgtcgacggagttctgcgcgctgttgaaggagccggtgatgctgccggcggcgttgttgacgtggacggccagtccggagagttgtgctgaactgctgtcgagcgcgccgaccagtgtggtggagaaggcttgtgacccggcctgtgtttccgccaacagtgtgccggactggagggaggcattctgcgcggccgcgacggtctgcttgagtgaggcggtggtctgtttagcgtcggcgagaatcgtgtctgattgggccagcgtgtcctgtaagtcggtgagtgaatcctgaacggtgttcagcgtggacatcaccgtattgagatcatcgatcgtatcgtgctggactttgccagtggcttggccgagatcgtctccggtttcggaaatggccgaggcaacggtggtggctaccgtggtgacgaaggcggagttgatctgctcatcgatggtggtggcgccggtgtcggtgattttcggcgcgatcgcgttcttcttctcgttgacgtaatacttgattttcggctgtttggaggttccggtcaccgattcgaccaagctggcgctgaaatccttgggcagcacgatggctgcatagtatccgccggtctccacgccgtggacggcctgttcctcattgtctacgaagcgccagccgagttcgtcgttctgcttgagtttcttgacgacctgccggcccgcatcgagatggccgaccagatcgttggtgatgccttggtcttcattggctacggccacttgcagattgccggtggctgaatagggatcccagttggcgagaatgttgaaccatgcgtacagcgagggcagcattgctacgccgagcgtcaccacaacggcaacgggattgcgtaagatacgtctgcaatcgcgtagaaagacttgccaaaccgtccgcatccagtccctcttttccggttcgtagtcattgcggccacatgcagtctattcccaccactggtgcggatactgctggtttggcgggttttcttgcaaaactggccgttggttgtccgcataatgggactgatatgtgaacgtttgttgatggtgcgacaccggcgggatggttgtgtaattttgccggtatccggtgatgaaatgttgaggtgttggaactgagtcgtcgcagtgctgagaccgagacgactcagtgacgagcctatccgaggctatctcgttggttctggtctcactgatccagacggaagccctgagcggcggccttgtcgagcagtgtctgatggctgacatcctgccgactgatcgtggcgacctgatcgctgaaagcgtccaccggacggtcggcttggcgcagatcgtagtaccggtgaacttcctcgtcgaaggcgggcagctggtcgagtacgccatcggcgtcagccgggtaggtgttctcgaagaactgcatcgtgcgcggcatgcgcggcttgacggtcgggttctgatcgggcttgccgatggccagacccagcaccggatacgtgtattccggcagattcagcacgtcgataaggccggggatgttgttgagcagagagccgagaatccccagttccagcgaataggcggcggtctccatggcgtgcagggccagcactgcgtcgttctgagcttgggtgaagcgatagctgtacttgagatggaattcgtcggaagcgggatcgatgcccttgcgttcggcgatgcgtgcgttgcggtgctcgtcgatgacgaacacgtacagcaacggcgcggtggcgatatacggctgatggccgaattcggcgagcttggctttggtggccgggtcggtgatacggatggcggaccagtcgttaaggaactggctggacgcggcatgttgggcgacggtttcgagcgtggcgcgggtatcgtcgtcgatggcctcgtccttgaacttacggatggagcggcggcccagaagagcttcgattgttgcgttggtaaccatggctttattgtcgcacggcagacgccggacgccacggtggattacctcacagtgaaatgccgatattgtgtggcggaactgtgctggactgatggttcctgtcgattgactgatggttccttgacgaaattccagcgatgagtcatcagtcagccaacagaaaccatcatccaaccgggggattagcggctgggcttgcgatggcggtggtcgacgaacgccttggagccccgatccgacagctgcgaaaccactgcgccgagtgcggccgaaacggcggcgaatgccagactcattgccagactttgcggcgcgtctgccgccagtcccttgcgcagattgcgtttgcttgtgcccttgtcccatatcatctggaatgctttgccggcaaccaagcctgccagcgctgggaccgccgacttgatgagcttgtcgcccagagaatcagggtcgttgagccggtcctcgcgcagcctgttgaccttctcgtcgatgcggtgcaggctgtcgaccgcgcggtcggcgctggaggggaagtcggtgttcgtttcgtcgctcatgactctcagtctaatagcatctcaatcatctcagcgcaaaagatgggcgttaatggtggagtcatgaacgagcgcagactagagtggaggcatgagcgaacagaacgtgaacggcaccgttgccgtcgagaactctcgtggcggcaatggatttttggtgttgctgcgccacggccagaccgtgtggagcgaatccgggcagcataccgggcgcacggacatcccgttgaccgcggtcggcgagcagcaggcagcggatgccggaaggcgcctgcgcgaggccttccccgaaggattcagccagggctgtgtgttttccagtccgctgaagcgggcgtgccaaaccgctgaattggctggttttgcggaccatggtgtgttggacggcatcgctgaatgggattacggccgagccgaggggcgtacgcgccagcaggtgagtgaggccagcggttttgaatgggatgtgtggcgtgacgggccgcgctcgctgacgcccacgctggagggcgactgggtcgagaccttgccttcgggcgaacaggtgccggtccatgccgggcctggcgagacgctggaagaagcggcggcacgcgccaagagcgccatcgacgagattacgccgctgctgaaagacggccataatgtgctgttggtggctcatgcgcacatcctgcgcatcctcacctcgcaatggctgggcgtggacccgcatttcgcacggttgctgcgtttggatacggcgcactactcggtgctcagcgtctataagggagataacgtcatcgaacggtggaacgcctagccccggttgcgctgcgattgcgctggcctgcccgctgctgcgggcgggcctttattgtttgtggcgggaattgcggtatgtcgataaatgatttgcaaacgatagcgtcggcgtgttgtttttttgatgggtataagtggcaatcgattgccatgaaagatatgttagcgctctcatggttgcgaacgcttgcattgcgataatgaggcaaaaatgactgaattaatgggatatttgttgacaatggcctgaaaatgatgatttatgacgcgccgatattgctatcgtttgcaaaaagaagcaaaccgttgcacaatagtgcatgtcgatagtcgtaaaggtgcgtgctagcgtacctgtcccgaccggggacggccggg

SEQ ID NO: 949 - DNA, 13134 bp, Unknown
  R117_24m  MAG No. k141_14861
gtgattcacaagcccaacggcggcctgtccgacgcccgcaacaccggcatcgccggggccaccggtgcgtacatatacttcgccgattccgacgacaccgtggcccccacgttggtggaggactgcctgaacgccatgcgcgagtatgacgccgacctcgtgatgttccagttcgacaccatctccgagaacaacaagccgctgctgtccaactatcgccacaacgacttcaccgaggtgcagatcctgaccccggtcgaggccatcaaaaagcaggtcaaggctgagatcgacggctatttctgggccttcctggcacccgcctccacctatcagggcaccggattctccttcccggtggggcgcaaaatcgaggatctctcccgtatctgcaacgtgatcggcgaggccacgcgcgtggtccgtctgcccaaggcgctgtaccactaccgcatgcgcgagggatcgattaccgccaactgggatccgcagctcacccgcgactggacccgcgccgccgacgaccgcgaggaatacatcgtccaccgattccccgagctcaagggcttcatgacgctgcaacagctgaatttctttgccaacctcgattacgagaccatgcgccagtcgctgatcgccgggctcaagatcgatcccgaggacgccgacgcgcttcgtcgtcgcatcgagggcctgacccagtccgccgatgagggcgatgagcccgtaccggaaacgttgcgtgagttgctcggactgctcaagctgggcatcaccaaggtggccgatggcacgttcggtaaggccgatggcagcggtactgatggcgatgccgagaacgatgacgtaacgctggccgaccgtttccgcgacatgcgcgaggactggcgccagctgcgcatccagcgcatcgaaaacgccgaggagcgcaaggccgagcgcaaagccgcccgcaacggcgtcaccttcgagtctgtgttgcattagtcggcgactgatggaatccgtcagttcgggaaggcaggcctgctctacgccgggcgtgccggttcgcacgttcgagaaacaggcgtgtcatgggccgaaccacacaacacccccagaaacgcccataaagttaactacattttcagacacgccacttgccttggtccacggtccgtgtatagtagttctcggctcaacgaagagaaccttcactgaaccggaaaaaagtaaacgctgaagcttgcagtttccgaaagcaaagttgtacgtcggtggcgagggcggaagcgcagtaaagaacaaatccctttacaacggatcgtgaggcacgtacctgcctctgaaaggattagtaattatggcagaagtcgttttcgaccacgtcactcgtatctacccgggcaacgataagccctccgtggatgatctgaatcttgatatcaaggatggcgagttcctcgtcctcgttggcccttctggctgtggtaagtctacgacccttcgtatgctcgccggcctggaagaggtcaacaagggccgcatcctcattggtggcaaggatgtcaccacgatgcagccgaaggaccgcgacatcgcaatggtgttccagaactacgccctgtacccgcacatgaccgtggccgacaatatgggcttcgctctgaagatcgccggcactccgaaggaagagatccgcaagcgcgtcgagaaggccgctgagatcctcgacctgaccgagtacctcgatcgtaagccgaaggctctgtccggtggtcagcgtcagcgtgtggccatgggtcgtgcaatcgtccgtgagccgaaggtcttcctcatggatgagccgctgtccaacctcgacgccaagctccgtgtccagacccgtacccagatcgctgccctgcagcgccagctgggtgtcaccaccctgtacgtgacccacgatcagaccgaggccctgacgatgggcgatcgcatcgccgtcatcaagctcggtatcctgcagcaggtcggcgccccgaccgagctgtacgatcgcccggccaacgtcttcgtcgccggcttcatcggctccccgtcgatgaacctgaacacccacccggtggtcaacggcaaggcgaagatcggtgaggacaccgtggacctgccggctgaggccgtcaacaagctcaccgccgaagacaacggccagatcgtggtcggcttccgtcctgaggacgctggcctggccccggctgacgacccgaacgccttctccctgaaggttgtgaacgtcgaggatctgggctccgatggctacatctacggcaacatcgtcaccgatggctccgccgctgaggcttcccaggtcatgtccgaccagaacaagctcaccacgattcgtgtgaatccgcgtgcgctgccgaaggttggcgcgaccgtcaagatcaagatcgacccggccaagatgcacctgttcgctccgtcgactgagctgcgtctgaactaatagatacttggcgaggtctaatcgcttcgtcaaccattaaacgaggttattctcttcctctcttatggcctcgttggaaaagccctgcatagctgcggggcttttcttttgccttctagacggtctgagggagagaccaaacggtgttttcccgtaaacataacgcgccgaagtcgtggccaaggagcacacatcgcgaacgacacgtaaaatcgaacacatggagttgaacgaattgccccagatggatccgcgtgcgctgaaggccacgtctgtcaaagccgaagacgaacacgccgattcagcggaaccgcaagcactgaaaatcaccgccgccagctcgaacccaaagatgttcacgctgccctggcacaagcccttggccacctggcctgaggacctgctggccaacctgccgcgaggcatctcccgccacgtcgtgcgattcgtgcacgtgggcgacgaggtgtacgccatgaaggagatcacgcgccaggtggccgagcgagagtacgagatcctgcgtcgactgcagaagctcgaactgccaactgtgaccccgatcgccgtggtcaccggccgtcacacccgtgaaggggagccgctggaggcgattctggtcacccggcacttgaagttctcactgccgtaccgtgcgctgttcgcccgcaacctgcgcccggacaccgccgaacgactgatcgacgccctcgccgtgctgctggtgcgcctgcacctggccggcttctactggggcgatgtgtccctgtcgaacgtcctgttcctgcgcgacgccgacgctttctccgccttcctggtggacgccgagaccggtgacctgcaagtccagctcaccgacggccagcgcgaatacgatatcgacttggcccgcaccaacatcatcggcgaacttatggatttggcgtccggcaagctactgcccggcgacgtggatgagatcgaggtgggcaaccggctggtcgaccgctaccactcgctgtggagcgctctgaccgacaccgacaagttcaacccggacgagatgtggaagattgagcagcgcgtcaacaagctcaacgagctgggcttcgacgtggacgagctggaaatgaagaccgccgaggacggcaagcgtgtgctggtccgcccgcgcgtggtggacgccggctacgccaaccgcaagctgctgcgcctcaccggccttgacgtgcaggagaaccaggcccgtcgtctgctcaacgaccttgacgcctaccgtgcctccacgtggcgtgagggcgaggatctggaaatcgtggccaccgattggatgcgcgaggtgttcgagccgaccgtgcgtatgattccgcgcgaatatcgctcccagatcgagcctgctcagttcttccatgaggtgcttgaccatcgctggttcctggcggagaaggccggccacgacgtgccgatgggcgaggccgtgaccagctacatcgacaacgttctgccgagctacaaccttgattccaaggcactcgccgaacttaacgaagaggccgattccggcgtcattgacgacgaatccacctacagcgacccggacgacgacggctacaaccccgatgacgatccggatgcggcagtgtggagtcattaagcggacaatccggtggactgtctgtaggtgagcccatcacacaaagaagcccctcaaatagaggggcttccgtgtatgtacaacctattacggcctcaagcgacaatcactccgccgcagccttgcgccgtgcgttggacaccgcgtacaggctgatacccgccgctactgaagcgttcagcgactcaacagacgagctgatcgggatgccggcaatcgcgtcgcaggtttcgcgcactagtcggcccaaaccgctgccttccgaaccgagcactacaacgagcggatcggattcaaagccggtctcgccgacgagcttatcgccgccaccgtcaaggccgacaacgtagtatccacgctccttcaagccctcaagtgccttagtcaggttcaccacgcgcgccaccggcatatgcgcggccgcaccggcagacaccttccaagcggcggcgttcactgaagcggaacggcgttccggcagaatcacaccattggcaccgaatgcggccgccgaacgaatcacggcgcccaggttctgcggatcggtcacgccgtccaaggcgatgaacagcgggcgcgcagcaatacgggcggccgccgaattcgcggcctccattgccttggccttcttctcagcacgatcggccagctcgttcagcgaggagtactggaacggatcgaccttcagaatcacgccctgatggttgccggagcgggcgatacgatccatctccagacgatcggcctccagcatgtgcaggccgttcataccagcgattttcacgatttcgcgagtacgatcgtcatgttcaatacgagacatgatgtacagcgtggaagaaggtacgcctacgcgcagtgcttccagcacggaattacggccgtacaccagatccgaagtatccgccgaagcgaacttgtccactcgacggcgggctgccagacgcgggtcggccatctgccgacgttcggccgctttcttggccttatacgccttgtgatagacgcggtcctcggctttgggagtggggccgtaacccttcagtttgttgcgatgcttgccacccgaccccttggtcggtccttttttgatagccataggtgctattgtcccagcaccccgcgccaaaacgcggctattccgccgtcggtagccggtaaggtattgagagtgaagaagcagcgcatgatattcggactgtccctgttgtattggggattatggttggcgattctgattctgtggatgggtcgcttcgtgacctcattcttgtcgatatatttggtttccgcgctgcgcctcgatgagggtgtggtgggcacagtcgtggccatgtacggcttcggcgcaatcatcggctgcctgttcggcggtaccttgtccgacagattcggccgccaatccatgattatcatcggcgaaatcggcgcagcggctgccctgctggtcgtttccgtgctcactgaccccgtggctttaggcgcggccctgtttgtctatggtgcgttcgcctcactgcccagcccggtcatcgccgcgtatatcgcggatgtggtgcccgccgaacgtcagcaacgtgcgtacgtactgcaatcgtgggcgattaattttgggtacgcgattgggccgattgtggccaaccagctggtcaagatctcgtattcgctgatgttctacgttgaagcggcggtgatgatagccgtcacgatattgctgattgcgttcttccgcgaggtgcggcatttggggattactgtatcggtgccaagtgcggtgcgccatgaagacgaacgcagtgttacgcatgcggaattcgccggcgtcgaggggccgaatcactcggatgccgcaccggctgccagtgccaagggctccatgtctcgtaattggcggcgcgtgctcactgatacgccattcctcggcttctccctgctgatgttcggctacttccttgtgtacttccaaagcacctccggcctgcccattgccatgacggaccttggtctagggctgggcgagtattcggtgctgctcaccatcaatggcggtatgttgtgcctgctgcagattcccgcgatgaaactgttctcgcgcatgggcaattcacgcgtgctggtgatgggcctcgccgtaaccgtcatcggctatgcggtgcaggccgcggcccattcctggggcggattcgcgcttgccgtagtgctgtggacgctgggtgagctgggcacattccctatcgccaccactacggttgccgccatggcacccgcgtcggcacgcggcacgtaccagggcgtctacaacgtagtgtggtcggtatcgattgcgctggcgccgctgattggtggctggaccatcagcaacttcggcggtcgaacgctgtggatcgcctgcacgatagtcctgatcgccgtaaccctcggtctcaagctcaccaaaggcttgcgcgaccgcgccatggccgccaacctgcgcaatgcctcacagtaaataattcccgtcaagaaaagtgtgaggcatccgaacttttccgcacaatcaaacatggtccgcaacggcgggatctcactgatatgacgctctgcatgtgcgattgaggcatcgtaatcctcacgcttttcttattgagaatcattctctgcgatacgttctagaatcatcacaagcaatgcgccatatacaacggcagatataggcggtctccttcaacgcgcattggtctaggatgcagcacatattgcatgccgacccggctgtcgaatttattcttgaacttatcgagcgatgaggttttgtatctctttgtcgatttgacctccacggggcagaccctggccttcatggcggcatttgaatactccccgataaggagaaaatcaatttccatgcggtccttcgcctgacgggaatatcgggaatagaagaataggcgatggcctgaggcccggagctgctgcgcaacgacattctccaccagcatgccttcattcacttccagcttgccgaacaggatatcgcggtacaactcattcgacgtgtatgcgcggtcggcaaacacttgcgttactaacaagccggtgtctcccatatagcatttcatcgtggagtcctcttggtgtaggcgcaggcccacatgcggatccgtggcattcatgcagcggttgatcaggaacgattcatccaaccagaagaaagcattgccatattcacgttcgcgtgcgttttcgcctaaagacgacagtgtgaacttcttttcatgcttggaaagttgccctggaatttcatcgaagatacgtttgacccgttctttcgaatctccgccgtatttctctatgtcctgagcgtacaggtgcaaaatttggcgtttcactcgatcgacattgcccatatcggatgttcccagataacgctctacggcctgcggcatacctcccaccagcatgtattcacggaacaggcgttccgccttgttgtccagcagcggagacattgctcgcctgtccgcaaaagattgccgtatcgcatcggcgagtagttcttctcctctggcccatagaaattcctcaaaatccatgggaaacatgctcaccgattcttcctcggagggaatcaagatgttttcgacattcttcttaatggagatcagggagccagtctccatgaagtcatatcgaccatccgcaacgagttgtttaaccgcgctgcgggcaaaggggaagagctgtacttcgtcgaaaataaagagggtgtcacgctcatgcaggcgtacgccgtaatagacggaaaggtccatgaacagcgtgtccaaatgatccagattgttgcggaacgagtctcgtaccgcctgcggagccttctgccagtcgataaggatgtatgagcggtattcgttcttcgcgaattcctcggcgacggtgcttttgccgacgcggcgggctccttcaatcattaacgcagtagtacccttgctcgctgctttccatcgccgtagatggtcgtatacttttctcttatacatgttaagctcatattcctagtattttcaaggatttatgagctattatatcacgattcctaagttatataatgccgtaaaactcactattcctaggttatgaattgctttgattctcacgattcttaagttatatgtcgagctgtcgaatgctctgtaacggtagtgcggcatacgttcttcacgattcgctgtaagcgttattcggtttggagatacgggcaagaccgcatatggtgagtggttcttatcgagaactattctctgcgcgtatgatgtatggcatgcaataatccaacaaaccatcgctggcattgacggcaacgaggcgcgattctttggctatgtggccgacaacagcgaggagatggaaccggaccgcatacgcccggccatcctgattttgcctggtggcggctacgccatgacctccgaccgcgaagccgagcccgtggagaatacgctaatgctatccaggcctgccgggccgccggcgtgagcatcgaagcacacctgttccccgaaggcagccacggcctgtccctggccaatgcggaaaccgctggcaacggcttctatgcgcacatcgtcgaatgcgtgcagtgttggcctgatttggctgaagcctggttgcgtcgcctgttctaggcaaaacgctattacgctgtgcgccaagtgcgccacgcagttatggaataatagcaatcgtatgcatcggcagcagttgcgccggtgtccataaccgcgcagtcctgtgcgtccagccgggagagaaaacccggcagcggccgcaaggctgactactccgcggcaataccaaggagaacattatggatgatctcaaagatcaatccgcagtgtccgcgaccgcaacgaacgaggtcgtggaatcggaagaagtgcgcgcgcaggaagcgctattgggggaagctgatccaagtctgaccagtgccgacgacgtggccaaagccctgaatgtcgacccatcccagggcctgagcgaggaagaagccaagcgtcgactggccaaattcggcccgaatgagctcgccaccgccccgcccgtaccgaaatggaagaaattcctggcccagttccaggacccgctggtctacctgctgatcgcggccaccatcatctcggtgatcgcatggttcatcgaaaaggccaatgcgcagcccggcgcggaaggcggtgaagtgctgccgttcgacgccatcgtgatcattttgattctgatcgtcaatgccgtgctcggctatatgcaggaggccaaggcggaggccgcggtcgaggcgctcgcccaaatgacggccccgcagacctcggtgctgcgcggcggcaaagtcatgcgcatcaacaccgccgacgtggtccccggcgacatcatcgtccttgcggaaggcgactcagtctccgccgatggccgactggtcaacgcggccagcctgcgcatcgccgaggcttccctgaccggcgaatccgtgccggtcggtaagaagccggacacactcaccgaagccaaggcgctgggcgaccgtgccaacatgatcttcaacggcacttccgtgacgcaaggcaccggccgcgcaatcgtgaccggcaccggtatgaacacgcaggtcggcaagatcgccgacatgctctccgccaccgaagatgagaaaaccccgctgcaaaaggagatggattacgtctccaagatcctcggcattgcggtgtgcgtcatcgccgtcgtggtgctggtggcgctcgccgtgctggaaggcttcgacgacgtccatgacgtgattgattccttgctgttggccgtctcgctggctgtggccgccgtgccggaaggcttggccgccatcctgaccgtggtgctggcgcttggtgtgcagcgtatggccgcgcacaacgccatcgtcaagaaactgcattcggtggagaccttgggctccgcttccgtgatctgctcggataagaccggtacgctgacccgcaacgagatgaccgtggagcgcgtggtcaccccgtccggcgcagtgcagatcaccggcaccggttacgcgccggaaggccgcatggttatgaccggtggcgtcagtcctgaatccgagcaggcccagattgtggccgatgaagtcgtcgccacgcttgtggccggcacgctcgcgaacgacggcgaactacgcgaggagaacggccgttgggagatcgtgggcgaccccaccgaagtctcgcttatcgtggccgcacgcaaggtcaaggccgatcgcaagatcaagcgctacacgcgcgttggcgagattccgttcacctccgaacgcaagcgcatgtctatcatcgccaaggacagcgccgattcagacaagctcaccgtgttcgccaagggcgcgcccgacgtgctgttgagctactgcacgcgcatccgcgtgggtggtcaggtccgtaagctcaccgaaggcgatcgccagtcgattctcgccaccgtcgaacgtctctcctccgaggcctaccgtacgcttggcgaggcctgccgtccgctggaaaccagttctttggctgatgtgcccggtgtaagcgtcaacgccgcaggccaggtgtccgacatcgccgatcaggccgaagccatcgaaaccgatctcatctggaatggcatggtcggcattatcgatccgccgcgtaccgaggtgcgcgactccgtgaccgaggcccatcgtgccggcatccgcacggtgatgatcaccggcgaccacccgctgaccgccgcccgcatcgcctccgaccttggcatcatcgccaaggacggcaaggccctgaccggcgaccagctcgaccagctgcccgatgaggccgcactcgacaaggccacgtccgaagtgtccgtgtacgcgcgcgtggcccccgagcacaagctcaagatcgtcgaatccttgcagcgtcaaggcaacatcgtggccatgaccggcgacggtgtgaacgacgccccggcagtcaagtccgcggacatcggcgtggccatgggcatcaccggcaccgaagtgaccaagcagagcgccaagatgattctggcggacgacaacttctccaccattgtggccgccgtacgcgagggtcgcgtgatcttcgacaacatccgcaagttcctgcgctacctgctgagttccaatgtgggtgaggtgttcaccgtgttcctcggtgtggtgtttgctggcttcctcggcatccgccagccggaaaccgtgggcgtcaccgtgccgctgctcgccacacagttgctgtggatcaacctgctgaccgatgccgcgccggcgttggctatgggcgtggacccgcagaccgacgatgtgatgggtcgtaaaccgcgtaaggtgacggaccgcgtgattgacgcctccatgtggggcgacatcatcttcgtcggcgtcattatggccatcgtcacgctgattggtatggacatgcacctatccggcggcttgttcaccgaccgctcggtggatgccatcggccatgaagcgcagatgaccgaggcccgtacgatgggcttcacgattctggtgtttgcccagctgttcaacgcgctggcctcccgttcgcatctgcagtccgcattcgtgggtctgttctccaacaagtggctatggggtgcgattggtttgtccgtggcgctgcagctcgtggtgatttacgtgccgttccttaacggtccgttcggcaccgtggcattgagcccgatggcttgggtggaatgcatctgcctggccgcaatcgtgctgattgcctccgagctacgcaagattgtgctacgcgcgatagccaagcgttaagccatcgcaatagccctgattgtgggcatatagcagtgggccgggctctggtattcagggcccggcccactgctatatccaaacggctcctcatggggcggtaactatcccatggggcggtgagttcctcatggggcggtcgctgaaaacggcattattccgcgaaaaaggaaaatgcgctaaccgccccatggggaagttaccgccccatgggaaacgggagaacgctgcagacctcagttgtggctgccgtcggggccgtcagtagaggtggacccgtcttgagacttctgctgtgcctgctgcttggccttctgctgtgcctcttggtcggccttccgctgagcctcttcctgagcttgcttggcggcatctgcctgctgcttggcctgcatcgaggcagtgacgtcggactcggccttctgcagtctagaaatcgcattgttgacgtcggattcggacggactggtcccgttcatcaccgtattggcctcggtgatggcgttttgcagcgcggtgcgggtgttctcatcggccacactgcccgcggaattatccagcgtgccctgcgcctgcgaaatagccgagctcaggttcgatttcagtgtgtcggtatcggccgtcgcctttgaagtattaacggccttgatcgcattgttgatggcatccgtcttgtcagccatgtcgctggcatcattctgcagctctttagtgtgagacttcagctcagtggcgttgaggctggaatcgcacttggcggtgtcggtcggattgtcggcgtcttgcaacgcctgattcagcgtggtgagcgtattggcatcggccacatcgctggtggatgtttgcgcgctggtttggccattggatatggcggtggtgagcttcttctgagcattcgtgtactgcttggccgctaccttgcactcggccaatgccacggcttggctcgccttgctgctgttggaatgccaccagagcaggccggcgacaaccagcgctatcacggcgactactgctacggcaatgccgacgattttgcgggtgttctttttgccgctaccgccgtgacgaggctcggcgccatcggaatcgtcctcatcggagacctgattcaacggaatggagggaggcatcacagcaggctgagcctgtgccgaagcagccagggcggccggttggaacacctgtgtggctgca

SEQ ID NO: 950 - DNA, 10995 bp, Unknown
  R117_24m  MAG No. k141_15104
agggcgaaggccacgacgtagcccatgaagccgatgaccggaatgccgaagataatcggcttcatgccggcgtagtagacaatcgacgagccaacgaacaaaccgaccacaatcagggccatcgtcagacgattcgccatatccgaaagcagctggaacggctcttcggagccgaccagttccatgttgacgcgcaactgaccacgggtcagcatacgggccacggtcttgagttcggtcatggtgccgagcgtggcatgcaaagcctgatgcccctcaacgcccagcgacttgatctcgtctttggtggcgttcttcagcgatttcgacgtggcgatatggtcggagatgatttcgatcatattcacatcaggaatgaactcgtccagcaagccttcgagcgtaaccaacgcgcggccgacggtggtcaccgtactgggcacctcgatgttgtggcggccggccatctgcgtcagtgcggtcaggaaagcggcgatgtccagttcggccagatccacggtgccgaattccttgacgatcacgtccagatcggccaatagcgcgggatagtcctccggatcggcctcggtgccggcaaatcgcagcagcccctcggccagagcgggcgaatcctgtttggcgacggcgaaaatcatttctttgaggactgcacgggtgcgctggtcgagccgaccggtcataccgaggtcgataagtacgatctggccgccccggatgaggatattgccgggatgtgggtcggcgtggaagaagccgtcgtcgagaatctgtgtggcgtaattgtcgacgagcttggtgccgatctccttcaagtcataaccggcgtcgatgagctggcccgggtgggagacggagatgccgtcgatgtactccatgaccaccacatgctcggtgcacagttcggcgtacaccgtcgggcagtccatgtatttgaatcgggcggcgaaacgcttgaattcggcgagattgcgggcctcgatcagaaagtcagtctccgattcgaaggtgtcccacagctcctcgaccacgcccttcagatccacgatctgcgaggtgcgaatcaccttagtggcggccttggctatggagcgcatgatggagacgtcctgggccatgatttcgcgcacacccgggcgctgcactttaatggccacatcttcgccggttttcagcgtggcgcgatgcacttgcgccagtgaagcagagcccaacggcttgggatcgatatgcgcgaacacctcgtcggcgggacgcccgtattcggcggcaagcacatccaacaccgtggaatacggcatcgggtcggcgtcggcgcgcagtttggcgagttcgtcgcagaagctttgcggcagaatctcggagcgcatcgacagaatctggcccactttgacgaacgtggggccgagcgcctcgaacatgaggcgcatcttgaccggagtcaggccgtgcagcacgtcgaattgctcgacgattctggtgatctgccccagtcgtttgatcttgccacggcgcgtcagatggtagcgcgtggcgaaatcgttcctgcgtccgaacaatgccagcgtttcgtcggatacgctcggagtcgccttggtaacggtctgcttgagcgtgtccggcgtgtcgacggaccggttcgccgccgcctcacgttcggctttcgcaggcgtcagaatagggtcgaccctgctggaaagcggggtcgactctgattccggcgtagtgcgtgtgggcttggtcactcggccttgccctcgtcggcgggcttgtcggcggcactggtgtcggctgcggcagcagctttgtcgccggcttcggcggcggccttcttggcgtcatccaccgtctcgctcaccttgcgcttgagctcggtgttcagcgccttaccctgctcgaccgtaatctcacccttcttgacgagttcgtcgacgagctcgctgctcttctcatatccggtggcaagggctccgatgcccgccagcaggaccttgcgcaggccatcacccagaagatcaaaatcagccatgatacccctccttcgaggtccgacatggcctggtgccatgtctcgtaccaccaagcctagcgcaaacaacagggcaatgtactagaccctcagactgatttcgactgatttttcgctgattggtacttaccgaggactcaccgagaattcaccgaggacgttcggcggcagccttgcgcgcgttggtggctacttgatcgagccgggcgagctccttggcttgttcgggggtctgatcggacgtatcgaacgtaccgtaacgacgagtcacggcggtttcgataaggaaatcgctgatggcggggtttttaggcagcaacgagccgtgcatgtaggtgccgatcacgttgtgcacgcgcgcgccctcggtatggtcttcgccattgttgcctcggccgtcctgatcgacggtgccgagtggctgaacgccttcgcgcaggaaggtctggccggagtggttctcgtagccaatcacatcgccgaactggtcggaatgctcaacaagattgccgatcatacgcacgttctggcccacggtataagcaccgataacgccgatgccatccagacgggtgccgtccacggtttcaaagtactcgccgaacagctggtacaggccgcagatcatcagcatcggcgtaccgtctgcggcaagcgagcgcagcaggtcggcgcgatggtagaagtcgtcgatgattttcttctggccggtgtcttggccgccgcctcccagaataaggtccacctggtcgggccagtcgtcgccttgattgtactggtggacgaccggttcgtaaccgtacagttccagccggcggcggatagtcagcacgttgccggaatcgccgtagatgttcatgtctttgggatacagggacaccacatcgattgttctggccatgtcacgttctccttgtcgatgtcttcccgctaaggggaagtcttattcctcaccatgtcctcctgcaggcgggaggtggcgcgcgggcgctagagggtggttacttgcccacgcccgcgtcccgtacttcggtgatgcggcccagtacggcacgggttttgagcatggcggtgtaggtgcagtagatgtgcttgcgtgtgccgggattggcgttgacgaatgcggtgaccgcctgttcgaggtcggtgttcgtatcggcgactggcacttggtcataccccaagcgcaatgccatgtcccaggcgcgcacaccggagaccatggcgacaccggacgcgcgtaaagaggtgaagtccacgtcccatagccagctcatgtcgcggccgtcggcatattcgtcgttgatggcgatcatggtgtccgcgttggccgggtcgaagctggcgagcgagaggcggaagcccatcgggttcttgaccagcagcagttcgaccggggaaccgttgacgtcgatgacctcgccacggccgaaagccggcgtgacgcgggaaacggcggcgatgagctcgtcggcggacacggcgcaggcgttggctgcggcagtggccttggatgcggcggcattgtcttgcatcaccgcacgtaccacggcgagcgcggcggccgcgttgtacaggttgtagacgccttcaagtttgacgtcggtggcgtagtcctggctgtccatctggaaggtggccttgtggtcgcccacggcggtaagtgtcacgtcggcggggagttctgccgtgcctgcggaagctcccctctccgaggggagctgtccgcgaagcggactgaggggagtactgactgaagggagcggcccggccataccttccaccgacacggtcgtggccatgtcgtcatcggacgggaaatagtggcgcaaatcgtcggcgaggccgaagtatcgcactgtggtgccagccggggccttcgcggcgagcgcggcgatacgcgggtcctcgcggttcagtaccacagtgccggtagtcgccgcagccacatggctgagcagtttggccgtggtgtcgatttcaccgaatcggtcaagctgatcgcgcatcacgttcagcagcaacgcataacggggcttgacctgcttgacgaagtggacggcgtacgcctcatcgagctcgagtacagcgatgtccgcgtccaatttgccgccgaaagtgacttcggtgagcagtgcggagaccacgccgcgcacgaagttcgagccggtcggattggtgaacaccttcaatcccagatcggagagcatcgaggcgaccatgcgggtggtggtggtcttgccgttcgtgccggacaccaataccacgccaagcggcaactgcccgagcgtacgggtcaggaagccggggtcaatcttttctacgactttgccgggcaaagccgaaccgccatgtttggtgacgcgggatgcaaaccgcacgaagcggcctgcggccacggtggcgaacgcataccacggtttgcgggtctgcaccacggacgattggtcttgcgaaatatcgcgtgaaacgttgcttgccatcatcacaccccctgattgctgttgtagtcctgcggcatgtccttgaatttggacgtggcaccgaggaaggcgaggtggaaggtttcggtcgggccgttacggtgcttggccatgatgatatcggcctcgccggggcggtcttccttgtcgtagaagtcagggcggtggaccaggaacaccacgtcggcgtcctgttcgattgagccggattcacgcaggtcggagagctgcggcttcttgtcgttacgcatttccgggccacggttcagctgggaaagggccacgaccggcacttcgagttccttggccaagagcttcagggcacgggagaattcggacacctcttgctgacgggattccacggccttgcccgaggtcatcagctgcaggtagtcgatgactacgagtttcagatcgttggtctgcttcagacgacggcatttcgcacggatctccatgaggctcatgttcgggctgtcgtcaatgaacagtggcgcattctgcatcttggtccagaactggttcagggtgttccagcgttcgggggtgatgtcgtcggcgcggcgcagggcggccatcggaatattggtttcggcggagataatacgctgagcgagctccaccttgctcatctccaagctgaagaccacggaagtcatgttgtggtgcaacgcggcggcgcgggcgaagtcgatgccgagcgtggacttacccatggccggacgtcctgcgacgacgaccatctgtccgggctgcaggccctgggtcacgtcgtcgatgtcgcggaatccggtcggcacgcccttgttgacgagaccctgctgcagtttgtccagctggtcgagcgcgtcgtggaccaccgggccgatggcggcatagtcctgacgcaccttgcccatcgacatctcgtagatctcggactgggcgaggttaaccacatcctcagcctgcgatccctcggcggaataaccgagctgggcgattttggtgccggcggcgatcacattgcgcaaaatggcccgctgatggacgatctccgcgtagtacatggcattggcggcggtcggtacggatgcgacgaggctgtgcagatagtccgcgccgccgaccttgtcgaggttgccgtccgccaacagctggttggccacgagcaccacgtccaccggctggctggcggaaaacagatcaatgattgcgttgtagatcgtctggtgcttgggctggtagaaatcggtgacgtcaatggtctgcgaaacttcgccgatggcatccttactcatcagcatgccgccgagcacggccatttccgcgtcgtcatcgtgcgggggcacgcggtcgaaaatcgggtcgccagctgccgccgcctgcgcgccgccccggcccgcgcggtcgccacgatcgccacgatccgagccactgccgaacccattctgatacgagtgttcacttccttctgccatagccctcaagtataggaggtggcgtggcgagcggaagatatcgcacgactacgttcattaggtcgattcctcactcattaggtcactgtgcttggtaacaccacaaaccatgcgcttggaatggcggcattctgaggcgctcgatcaatatctctcaaagtccaccgacctaatgaatgcacaatcgacctaatgaacgcatgaaagtgcaagtcgtgccgaatcatcgcgcaccaatttcatcgttggttcaccttgcggtcagcgcggcgacacgctgaagcgtcaaatgtggatagaaaaaatagttatccacattttggggataattctggggataatccactaagttatccacatactggggataacttggtggatagtctggggataacattccgcgtccacaacaggtgcttgcgcaatgtagtcaggcgtgatatgcgtgtgagcgtgcacatagactcttccgacgccaaagccaccagttccggcgataccacacgccgcgatggcttcggaaccccgcatgccggcgcaaacacaaacaccagcaacggcccggccgacgcccgctccaccaaccgtcggatcatggcgctggccctgccgaccttcggccagctcatcgccgaaccgaccttcatccttatcgacacagccatcgtcggccatatcggggatgcggcgttggccggcctgtcaatcggctccaccatcatcctcacggcagtcggactatgcatattcctggcctactcgaccactgcgcaggtggcgcatctgctgggagcgggtcgtcgtcgcgagggactgcaggcaggcattgacggcctgtggctggccttgagcatcggcaccgtactgggattgggattgttcgcggctgccgagccattatgccgggcactgggcggtcagggcgaagtattggaacaagccgtgacctatacgcgcgcaatcgtgctgggtgcgccaggcatgctgatggtatatgcggcgaacggcattttccgaggattgcagaaggttcgtatcacgctgatcgctgcggtgggcggcgcggtggtgaacacggcgcttgatgtgttgttcgttattgtgctgaattggggcattgccggctccggagtggcgacgctgatagctcagtggttcatggggctgttcctggtaatccccgccattctgtggtcccgggcggacggtgcgagtctgcggcctcgtttggccggtattgcggcagccgggggcgacggactgccattgttcattcgtacattggcgattcgtgcggccatggtggctacggtcgcctgtgccgcgcgcatgggtactgccgtgttggccgggtttcaggccgtgaactcctcttggaattttgcgatgaacatgctggattccgtgggcatcgccggccagacgctggtggccacaacgctgggcgctggcagcgtgcagcaggcgcggcggttgacgcgggcgaccgggcgtgcggggctggtcaccggcgcggtaatcggcacggcttttgcggtagtcggcctgttcgccgggcacttcttctcccctacgccaaatattcagacgttgattgccgttggcatggtgacgatgggcatcttcttcccactgcaaggctggatgatggcaatcgacggcattcttatcggcgcgcgcgactaccgctatctggcaggcacctgcacgctgaccgccgtggtgtatgtgacgctcatactcatactggccaatatggtgacgccggcgctgacgagcgacctgatgcgtaccgccgtgctctgggccgcgttcaacgtggtgctcatgggcgggcgcagcctgtccaacgggctgcgcgtgcgctcggacgcatggatgaagtaggtatcggccgcgcgaagtgctgggcgattccgtttacatcgcggcgcgagcggcggaatacatgccgcgcacgatttgttcgcgccacttggaccagccgtattgcttggtgatggtctcaccggcggtggcaccgagcgaggagccgtcggcccgggtcaggtcgaacagcatatccaacagcatcttgtcgtggtgcaagcggtcggccaactcctccgccacggccggatcataggggtccttacccgtggcgaattcggatagggtcaaatgctcacgcaccagcacggtggcccagtcgacgatgtccggcgcgtagcccatacgcttgagaatcaccggcacatggcgggcaccctcggcggcgtgatcggccacgaacgcgcgcttgccgatgtcatgggtaataccggccaacagcaacgccttgaaatgatcgtcatcataccgtcccccggacggtgtctcacgacccagacgcgacgtgacctccaccatatgccgatcgatggtgtaccggtgggcggccgaggcggacggacggttgcggacgccgagccattccggcatccatcgacccggaatgtccacgaagtcgatgctctcccacacttccataagattcggcccgcatgcaagcagacgaataaacagctcgcgcgattcgtcatcccactggttgtcgtgaatcgggcagtgcttcagattaaccaaggtagacgggttgatgggcaaaccgaattcgccggccgccacggccatacgcaacgccagcttggcatccttggcaggctcggcaccgggtgccaacaccaattcgccttcgtgcttggccacgccgggagccaccacgtcgaattgcggggcttcacgcttgccgccagagcgctgagagaacatctggaagaacgcgaatcgcggcttttcgtgggtcagcgaatgtccagcgcgggatgcggtggaatcaagcgagaaggagatgcgccggccgatacgggcaagcagcgtctgcaaatcgtcgatcgagtaggcggcacgctcgttttcgggccaagtcggatcggcaaggccaagcatggcagccactttggcctgatagggcgtcagcatcaggttggtatccttgccggccaccagatggatgcagtcgcgtacgtcgagcagacgttccacggcttcgtcgtagatgccgtgcgggcggtcggccagccatgagacggcgagcgcggagacgagcaccgaatcgcgcaaacccccacgggtctccttgatgtcgggctgattgacgtattggaggcggccgaattcgtcgagtcgggctttggcagagtcgagcagttcgggcaggcgcttgcgggcggccttgcgccagcgttcgaggatggatgtggcggtggtggtaatcagagcagtgtcgccggcgatgggcttcacgtccagccagcccatggcggcgggaaggtcatggtcggtgacttcctcgcattgggcgcgcgtgcggatggagtggtcgaggtccagaccgctgtcccatagcgggtaccagagtttgttggccaactcgttgagctgctggtcgttcaacgtgcgaggctcgtagatgatgaccaagtcgaggtcggagctggggcccagttgaccacgtgccagcgagcctaccgcggcgaagccgatgccggagtcgggcacggggaaagagacatccttgcaggccgcattccacagctccgtgaggcattgcatggccagttccgtgcgggctttacgcttggtcgcaccattccggtagacaccatcgtcatccggctggctcatatccatgaatcgttgtttcaagccatctactgctgaagtcattgcttcatctttcattgccaaaaaggtccccgcacggcgtcaattcgcggcgtgcggggacctttcccatgcagtccatccccttctaggcatggacgtctgtgttatcagatcgcggcggaaccggtctcaccggtacgcacgcgggccacggagtccagcggagcgacccacaccttgccgtcaccgatggtgccggtgccggcggacttgatgatcacaccgaccagcgtctcggcatccgcgtcatcggacagcacttcaacgcgaatcttcggaatcaggtccacggtgtactcagcgccacggtagacctcggtgtggccgcgctgacggccgtagccgttggcctcggacacggtcagaccgtgcactccggcggccgcgagggcctccttgacgtcgtcgagcttatggggctggatgatagcggtgatgagcttcatctcacctcacctccttgagaacagagctggcagtaccagcaaaatcgtaagcacgttcgccctggtcggcaagatcgatgccgccgacttcctgagcttcggtgacgcgccaaccgatggtcttctccagagcgaaggcgatgatcgcggtgatcaccgcggagtagaggatggcgacgagagcgatgaccagctgaacgacaagctgcttccagtcgccgccagccagcaggccggtgccttcgccgaagaagccgacgaggacagtaccggtgaaaccaccaacgccatgcacgccgacgacgtcgagggagtcatcgtagccgaacttgaacttgagaccgcaggccaggcaggtcagaacaccagcgatggcacccatcacgatggcccacagcggggaaaccacatcggcggccggggtgatggcaaccaggccggcgaccatacccgaggcggcacccatagcggtgtagtggccggagcgaatcttctcggtgaagccccaggagagcatggcagcggcagtggcggcggaagtggagacccaagcgtagccagcggtgccgttggcggcgaaggcggaaccagcgttgaagccgaaccagccgaaccacagcaggaaggcgccgagcatcacgaacggcacgttgtgcgggcggaacggctgcgtgccgaagcccttacgcttgccgatgatgagcacgataatcagggcggcgactgcggcgttgatgtgcaccacggtaccacctgcgaaatcgtgggcggccgcgccgatggccttggagatggcgccgtcagcagacagc

SEQ ID NO: 951 - DNA, 2683 bp, Unknown
  R117_24m  MAG No. k141_15377
cccgcccccagcgtcggcggccaaggcacgtcgaacggtgattacggcaacgcctatgccgccggccagtgcacgtactgggcgtatgaacgccgtaggcagatgggcattggcacgccgtcctatctcggcaatggcggcgactggtggcgcaacgccccctcgtacggcttgcgcgtggaccacaaccctcaggtcggtgcggcgctctccttcctgcctggtcaggatggtgccgacggtacctatggccatgttgccgtagtcgaagccgtgtatggcgacggcacattccagatctccgaaatgaactggggtggtccgtggaacatgcacgaccgcaccttgaccaatttgggtcagtactggttcgtccactgaccggttggttcggccgatatatgcggttgaagggttcctcttgaagaggaacccttttcgtattcgaggccggtccgtgatatcgtcggatgttgcgttgctacccacgagttgctacccacgagttgctactcacgagttattgcccacgaaaggaggagacatgcccaaggaaaccggtgagaaactcatcgtccagaacaagaaggcccggcatgactatgccatcgaagacaagtacgaggcagggctggccctgaccggcaccgaggtcaagtcgttgcgcgaaggccgcgcatcgctgtccgaggcgttcatctccatcgaccgccgtggcgagatgtggctggagggcgcgaacatccccgaatacctgaacggcacatggaacaaccatgcgcccaagcgcaagcgcaagctgctgctgcaccgactgcagatcaccaagctcgcccgcggcatcgaggccaagggatacacgattgtgccgctgagcctgtacttcaaggacggtcgcgtcaaggcggagatcgcactggcccgaggcaagaaggaattcgacaagcgccaggccctgcgcgaagagcaggacaagcgcgaagccctacgcgccatgcgctacgccaacatgcgccactagtcccgtcccttggctcccctccggaggggagccaagggtaggatgtccgcgttgtgggtcatttcgcccacgattaacgcttccgtagcattgcactcctacgctctggaaccatctgggaaacatacccgcccagctgactatccggagagaggaaatccaatgtctctaagcaagggaatacaatccgctgcggccgccgccctgagcgcggccatgctgatcgccgtggcggcctgtggcacgactgacggcaccgacaccgcatccaagagcggcgattcatccaaggactcgtccagcacttcgattcaaggcttcgacaccagcagcatccagaaggacgacgagattgccgcactgctgcccgattccgtggccggcgacggcacgctgaccgtcggcgccgatacttcctatgccccggccgagttcctggccgaggacggcaagaccccggtcggctttgatgtcgacctgtccaaggcgctggccgcagtgttcggactgaaggaaaacaccgtctcctccacgttcgattcgattatcccgtccgtcggctccaagtacgacatcggcatctcctccttcaccgtgaccaaggaacgcatggaggctgtggacttcgtgacctacttcaaggccggttccacgttcgtggtgcagaagggcaacccgaacaaggtcgactcctcgaacctgtgcggcgtgaaggtggctgtgcagaccggtaccacccaggaagaggaagtcaacaaggataacgagcagtgcaaggcggacggtaaggatgccatcgacatccagtcctccaagctgcagaccgatgtgactaccgccgtggcttccggtaaggctgatatcttctacgccgatacgccggttgccggctacgccatcaagcagaccggtgatacgctcgaggccctcggcgaggacgttggtgtgacccctgaggccgtggccgtcaagaagggcgattccaagaccgccgaggccgtacagaaggccatccagaagctgatggatgatggcacgtacaagaagatcctcgacacgtggggcgtctcttccggcgccgtcgacaaggccgagatcaacccgtccgtcgagtagtttcggttactatgaagactcccgttgccctgcggcgggagtctttttgtatatgtatgcactgtagtgtataaatatgcttaaccgttgatcgttgccgttgaagcggcgtaagagagaagaagaaacgattatgcagtccaccaaactgaagtccattatggccattgcactgagctcggccatgctgttcgccaccgccgcttgcggcgcctccgacaaggccgatgccggtacggattccgccaagggctccgatgccgccaccatcaccagctacgatgtcagctccgtggagaaggatgacaccatcgccgcactgctgcctgaatccgtgaccaaggacggcaagctcaccatcggcaccaacccctcctacgccccggccgaattcctcgacgccgacggcaagacccagatcggctacgacatggatctcgcccgcgccatgggcaacatcttcggtctcgagaccgaaatcgtctcctccaacttcgatacgatcattccggccatcggctccaagtacgatctgggcatcgccgc

SEQ ID NO: 952 - DNA, 39127 bp, Unknown
  R117_24m  MAG No. k141_15651
agcgaacgcaccgatctgcccctcgtcgtgatgccgtccgtgctcgacgcgatgatcgagcccatcaaggcccagttccccgcgctccacgacgttgcccgcgtgcgtatgttcgaggaattcacgtccgacgaggcgaccatagccgagcgtctgaaggatgccgacgccctgctggtgggcggctaccacatttcggatgatctgctacgcaccatcagcgagcaggggcacgtcaagtgcatcgtgttctgcggtaccggcgtcgccagctacatcaatctcgataaggcgcgcgagctgaagatccgcgtctgcaacgccgaacattatggcgatcacgccgtggccgagcacaccttcgccctcctgttcgagctcatccgccgcgttggccaactcgataaggatgtcaaggccggcaactgggcgtgggccggcggcgatggactgcaactcgccggccgtcgcatgggcatcatcggactgggcggcatcggcgccaccgtggccggcatcgcccgtgccttcggcatggaggtcgccgcatggaattcgcatgtgccgcccgagcatttcgaacgctccggcgccactccggtcgacgatctcaacgagctcatcgaaaccagcgacgtcatctccgtccatctgccgctcaacaacgccactcgcggcatcgtcaccgccgagaaccttgcgcatgtgaagcccggcaccctgttcatcaacaccgcccgctccgaagtcatcgaatccggtgcgctgcttgcccgactgcaaaagggcgatgttcccgccgcactcgacgtgttcgaccacgagccgctgaccgccgacgacgccatctgccatgtgcccggcatcgtcctgaccccgcacgtcggctggcgtaccgacggcgcgttcaaggagctcacccgccagatgatcgcctgcctgaccgcctacttcgccggcgaggactataacgtcgtcgtctccgaacgctgatagtcctgtctagcttcgcgctcaatcgaacacccagtcagccgaccaccggaacacgcttatgcagacgattctcaacacgtccgacgatcccgcccacgattcgctcgtcgaaaaaaagtccgaattcatcggcgacgctgcccatgtcgatacgctcgacgaggcgctcgcgttcgtggccgcgatccgtgagcagcatccgaaagcccgacacgtggcgtatgccgccgtgtgcggaggcgcggatgggcgactgtccgaacgcatgagcgatgacggcgagccgtccggtaccgccggcaagccgattctcgacgtactcaagcagtccggcaccaccgattgcgtggttgccgtcaccagatatttcggtggcattctgctgggctccggtggtctggtccgcgcgtactcatccgccgcatcattggcgatgaaagccgcccgcgccgcccgcatcatgaccgccaagcgataccgggtccgtctcgaatacccgcagctggcccgattccagcagatcctggcgcagctcggtggcagtcaggaggatgaatcgtatgcggtgaacgtcgaactgaccgcggtggtgccgcaagatgattgcgtgcgattcgaggagcgtgtgcgggaagcgttcaatgccgcggtggtaccggacccgattgacgtggtcaacattccgattccgttcgcgtgacgcctgtatgactaagctgggcatcatgaccgacgagaacaccaccagccagcggacccagcccaccgaggccgcaaccgagactgcaaccgacacgggcgcccagcagcgggaccaaggcgcgcaggccgcagccgagtccgccgctccggtggatttcgaaccgctgaccgctacatacgaacgtctgcgtcattccaccgacccggccgaactgtccgaattcgcccgtcggccgttgcctgaccgtgccgatcaggcggcgttctcccgcgccaccgcacttttggaggctgtggccggcaacccgcacaccccggtggccgatcgcgtgttcctcgccgacaccatgccgttcccgaacgtattggtcaaactctccgaagaccccgaaccgtccgtgcgccaagccgtggccgccaacggggatgacaagaattggctggtcggccgcctgaccaaggatccggtacctgcggtccgggatacggcgttgaaaaacaagcgcaccagctggaagatgcggcttgagggtgcgcaggaccccactgcggatgcggagacattggatttcttgggcgtacttggcaccgaatccgaagagggagcaccggcagtgctttcctcgatggtccgccgtgccgtggcgctgaaccccaatacgtccgaagcgatgcttgccaaattggccaacgacccctcggccgaggtgcggcacgccgtggaaagccgccgctaagcacactattgctgtgttttgccgtgcaaatttggccggcaatcaccctctatccaccattgtgagcgctcacatctcactatgtgagggtaaaaagtacataatttggcggaatcacggcattttgcttacggtgtggcgcaatcaaacggcgttagactggggctatgagtgagattaccgagagtgaagagcgtctggcccgtccgttgattcgactggccaagttggtcggtgtcggcacgagttatgtgggcatgagccatgactaccacgagatagacgatgacgtcctgatcgaggtgctggcagcgctgggcatcgacgcctccagcgagaacgcccaactcatcgccatccgacgcattctgaacgagcgttactcccgattggtggcacccaccgtgctgcatatcgccggtagtgaggaccgggtgctggtgaacaccggcattctggacgtgccttcggcgagcatcacgctggagaacggcgagccatatcagggcaccgttgaagttggtcctggagatggatcccaggcctacgacttggatggcacgttcatttcgaatgcggctgtggtcattcccgccgatctgccgattggctaccatacgctgcacgtcaaggtcgccgaccgtgtgcaagacgccactttgatcagtgcacctgatcgcgtcgatctgcttgacccgatgaagggcggcagtctgtggggctggatggcccagctgtactcgattcgctcctccaactcctggggcgtgggcgattacgaggatctgaagaccatgctggtggacgccaagcagaagaccggtgccgacttcgtgctcatcaatccggtacatgccgccgagccggtgtccccgctcaccccgtcgccgtatctgccggtaagccgtcgcctgatcaacttcacgtacatccgccccgaggcgatcaccgaatatgccacgctcagcgcgggcgacaagaacgccgtcgacggactgcatgccgacaccgaaccgctgaacggtgattcccagctcatcgaccgtgacgccatgtggcgcagcaagatgcacgccctgtggattatcttcaaggccggccgtaccgccgaacgccaaagcgcgttcgaccaattcaaggcggactgcggttccgacttggaggcgtatgccacgtggtgcctgtgctacgacaagtggggagcacccaacggcgaggagagcaactgggagcgcaagttcaaccgcaactccccggaaatcgccaatctgcgcaagcagtacccggacactttggacttctaccgctggctggaatggattgccgccgagcagctgtcctccgcccagcaggcagccaaggacgccggcatgcatatcggcatcatgtccgatatggccgtcggcgtgcacccctccggcgctgacgtgtggtggaatcccgagcgcttcgccaagggagccacggtcggtgcaccgccggacatgttcaaccagcaaggccagaactggagccagccgccgctgagcccgatcaatctggaggccaccggctacgagacctaccgcaatatggtgcatggcatgttcgcccgtgccggtgcggtgcgcatcgaccacattctcggcctgttccgcctgtggtggattcccgagaaccggtcggctatggatggcgcttatgtgtactacgactcagacatcatgctgggcgttctggccatcgaggcctctcgcgccggcggcgtggtcgtaggtgaggacctcggcgtggtgccggaccatgtggccgattccctgtcgagccacggtattctcggttgcgccgttgaatggttcgaacagtgcgacggcgtgttccgcgccccctcccagtggcgtccgtacgcattggcctccgtgaatacgcacgatttgccgccgaccgccggttacctggaatacgagcacgtcaagattcgtgagcgtctgggcttgctgaccggcccggctgaggaattcgaagcctccgcaaaggccgagcaggatgcgatgctggtcatgctggtcgagcagggctatcttgatgccgacttcgccgaacatcgtgaggatcacgaggcggatatcatcgacgcgctgtaccgcgcactgaagggttcgccgtgcaagctgctcgccgcctcgatcaccgacgcggtgggggagaagcgcgcgcagaaccagccgggcaccaacaacgaatacccgaactggcgcatcccgctggccgacgccaagggcaacgtggtaccgctcgaaaccctcttcgacacccccggcgtccaacgcttcgcccaaatcttcaattcctgacccactttacctccctctgacgagccgagtcgttaagcggacagtccagtggactgtccgtagacgaggcctgaacgaagcgatagctgagagaaggcagggaattgcctcaccgtaggcgagtcggttagccgaagtgggtggaagagaaaccataaataggggaagagaagccataaacccaatggagtgtccccagttgccctatgtcaagcccggcgatatactagtggattgttgtgtttccctaaggggtccttcaaagcgctatcccactcgccatcgaggactttcagggagcccacggataatgaggttcgatgcctcttggatgcggccctgaccaagccacgccaagcagctgagacccggaacacaatatagaaaaggtaatccagtgaaaactttcactccgaagccagctgatctgactcatgactggtatgtcatcgacgccaccgacgtggtgctcggccgtctcgccacccaggctgcaatcctgctgcgcggcaagaacaagccgacctacgctccgcacgccgattccggcaaccacgtgatcatcatcaatgccgacaagattgctctgactggcaacaagatgggcaaggaactctactcgcactccggtcgtcccggtggtctgcgtcgtgactcctacgccgagctgctcgagaagaaccccgagcgcatcatcaagaacgctgtcaagggcatgctgccgaagaaccgtctggccaaggtgcagctcgaccgtctgcgtgtcttccgcggcgccgagcacccgcacaccccgcagaagccccaggtcttcgagatcgcccaggtctcgcagcaggccaagtgaaacctgagaggagataagaatcatggctgaaaacaccaacgactcccaggttgtcgagaccgaagaggagctcaccaactacaccaccgagaccaacgctggcgctggcaccggcacctccgcgatcgagccgggctacggcaccggtcgccgcaaggaggctgtcgcccgtgtccgtctggttccgggtgacggcaagtggaccatcaacggccgcaccctggaggagtacttcccctccaagctgctgcagcgtgaggtcaactctccgattgttctgctcaagctcgaaggcaagtttgacgctatcgtcctcgttgacggcggcggcaccaccggccaggccggcgctatccgcctcggcgttgcccgcgctctgaacgccatcgatcgtgatgccaaccgcgccgccctgaagaaggctggcttcctgacccgcgacgctcgcgtcgtggagcgcaagaaggctggtctgcacaaggcacgtcgcgccccgcagttctccaagcgttaatttcgcttgtcctgtaccgagcatacaaaggctctccgtggaattccgcggagagcctttgtgtttgtgtcgtgctgttttgagtgtgactcacacctgtttcatcagcgtgatgctcagcgccggcatggtccagacattgtcgtcgacgggagtgtccggcgtatcatccacaggggcatcaggcatatcatctgatacctcatcccgaggcgcggacgaggtgccgtttgcggcgtgatccgttgctggcatcgcgaattcgatggtatccgcttcatcctcagtcgaggattccgtgcgctgcatggccacttcttcgaccagcgtgcgtaccgtctcgctggcgtccggtacatgctgcgtccaaacggtggtgtcatcgttcaaatcgcattcctcgacctgaatgccatgcccggctcggcggccgttgatttcggccgagcaccatttaggcgtccagtgagtgtctggcggcaggtggaatgtgcggtcgtcagcggtgccgttgaccacaatgcacacgtccacctcactgttggacagcaatcgcatggtgaagctacgtacgcccagatcgaaccagtcacgctccatcggcgtggtgccgtcgggcaggaaccactgcacgcggcttgagggcttgagtaggccgagttgggtcagtcgggtgaagaagtcctcgtggtgatacaggtccagtgatttacgtagcgccaccagtcgagacacggttttcaggcgacgcatttcgcgtgtcttgttggtggaatacatccaatcccacttcagccacgtgatgtcgttgtcttggcagtaggcgttgttgttgccgtcctgtgtgttgcggaattcgtcgccggcgagcatcatcggcgtacccagcgagagcagcagcatgccgatcatgttcatggccgcctgttcgcgtgccgtgatgacgtctggatcatcggtgacgccttcgacgccgaaattggcggaatggttcaccgacgagccatcattattgttctcgccgttggcttcattgtgcttggagcggtatctggtgaggtccgtcagcgtgaaaccgtcgtggcaggacacgaaattgatggaggccggagcgccgcgcccgggttcggtggcgaacagatcggccgagccgcagagtcgcgtggccatctcctgcaaactgatacgaccgaaatcggagccgccgtccacatcctcaagccagaaggtgcgggccgtgtcgcggaagcggtcattccattcggcgaacggcacggagaattggccggtgcgccagccgaggttgcccagatcccacggctccataatgagcttcaggttgcccagcagcagatcggaacgcagggcgtagaggaacgggtgatgatgggtgaattcgccttccaggcgggccagcgtgacgccaaggtcgaagcggaaaccgtctatgccgatacgcttggcccagtatcgtaatgagtcgatggcaaaggtgaccacatgcgtgttggtgaagtccagcgtattgccgcagccggtggtgtcttcgagtcgaccggtattggatttttgatggcgatagtaggccaggtcgtcgaggccgcgccagcagaccgtcgggccttcgacgccgccttcgcatgtgtggttgtagaccacgtccatgatgacttcgaagccggcctcgtgcagcgcgcgcaccatgtctatgacttcttggcgcacggcggccgcgcccttctcttgggctgctttggtggcataggagggttcgggggcgaagtagctgagggtggagtagccccagtagttcttgcggccgtgttcttgcaggaagagctcgtcctgcttggccataatcggcagcagttcgatggaggtgatgcccaatccctgcagataggcgagcgttgtggggtgggcgagtccggcgtaggtgccacgcaacgcttcgggcagccacggcgcgttggcggtgaagcctttgacatgcatctcgtagatgacggttttgcgccacggcacatgcgggtgctgcgggtcgccctcatgcttatggatatcgcgatcgtcgatggccacggataccggcacatggccgagcgagtctacggtgctcatggcaccgtatgccgagccggttaccttgcgatccacgacatcgcattcataggagaaggcggcgggggtgagctccatggagccgtcgatgcccttgccatacgggtcaagcaggaatttgtatggattgaagcgcacgccgtgtttcgggtcccatgcgccgtccacgcggtagccataacgcatgccgtcccatgctttgggcaggtgcacgtaccacaggccgtagttcggtccggtcatgcggaacagggtctcgcgcagatacaaatgttcgataatgcgcgtgcacaccggaaactcatggatctgctggatgaacgaggcgttcgggtcttcgaacaggcggatggcgtcttggaagaaggcgccgggctcgtcaatgggctccagcacacacagccaaacctgatcggcagtttcggaacgaacaacgacgtcagccccaccgtcgtcagtgaagtacagccctgggcgagtggcgtaacgatgcaacggtgggtttttcatacctccattgtagacgtgttgtcacttctggtggaagcccttgatttcctgccgcgttccgcagcaccacagatatcgtcgagataattctcggcgaatcgcaatgcggcaccgatgatgttctggtcttcggcgcagtagctcttgcgcagattgaaatggtcggtgccgaacggactgcgtgcgatgacgcgcgccttcagatcctcgatgtcactgtcttcaagatgctgggctgcttcaccgccgacaatcacgtcgcccgcgatgatggatcgcgcgttgacgatggcctgcgccacgtaatccagccattcgtccatgcgctcgcgatgatgccgttcaccctgctcaagcacgctgaagaagccgggaatactttcgtaatcctcgggcaaggtctccggcgagcagtaggtgtccatgcaaccgcgctggccgcagtagcattcgcggccgcccggcaccagcgtcatgtgttcgatggcgccattgcacatattcggaccctgatacagcttgccgcccacgatcaccgcgccgcccgggcgtcgctccagatagacgcacaccgcatcggtgagcgtggagtcgaaccatagctcgaccatggcggaggcatcggaatcgtggatcatcatgcacgggtaatggaccgactggctgatggtttcgagcgtaagccccgtgttgcccataatggtgccgaaggtgatggtggtggcgtcgggggagaggatgccttggatggcgaacgagacgccgagcactttgccgtgcttcttttcgacgtcggaagcgaagttgttgatgatgccgccgatacgctggtagtaaacgttggtgttgcggtaaggcagggcatcgttgcgtttttcgatgacgttgccgtacaggttaatcgcgcacaggcgcagttcgttggaccgcatcactacgccgatggcagtgcgatgatcgggattgaactcataattttgcgccttgcgcccgccggtggaatcctgcagttcgcctttgcggatgagtccgtcatcttctagggcgcgcagattttgggtgatggtgggcaggctgaggccgagttcgcgttccagttcctgcttggtgacatggctatggccatacagatactgggtcatggcactgcggttgtgcgctttcactgcggtcgatggcattgccctcatatttacccctttgtacgatgagatatatgtaagtatactttatgaaagtggctttcatgtgcctcgacgcggagattatgaggcaacaatcgtatatttgtaggcgattttgggcacttttttaaaccaattttctagaaatgtggggaaaatgagtacttttggaaacttgatttaagaaagttgtcggattgcgttgtttgcaagcatgtgattttcggtaaaaagtgaacaaaaagtaccaaatcgccgaataaagtgaggatttgttcgatatttcgcacaactcttaacaaaaactgttcaatatcgcacgtgaaacgccgtcgattttgtgcgtatgcatcgcgccggaccgttcggtatattgtgactcaagtcacatatgcaatgtgacaacgcatcaccggtcattttcggttactgaggcggtatcccgctggtgcaactgaggtgacgaggcgatggcccagaactttgccataataccccaagaagatcgaggaggaccccaagtggcagaagcaaagaagaaagtcgaagctgccaatccgaccccagaagagaagcaggccgcagctgaggccgaagttgacgcgctggttgcccgcgccaagaaggctctcgacgaattcgagaacctcgaccagaagcaagttgatcgtatcgtcgccaaggcctccatcgccgctctgaacaagcacctcgttctcgccaagatggccgtcgacgagaccggccgtggtctcgtggaagacaaggccaccaagaacatcttcgcctgtgagcacgtcaccaactacctggccggccagaagaccgtcggcatcatccgcgaagacgacgtgatgggcatcgatgaggtcgccgagcccgtcggcgtggtcgccggtgtcaccccggttaccaacccgacctccaccgccatcttcaagtccctcatcgccctgaagacacgctgcccgatcgtcttcggcttccaccccggcgcgcagaagtgctccgtcgaggccgccaagatcgtgcgcgacgccgccatcgaggccggtgctcccgagaactgtatccagtggatcgagcacccgtccatccaggccaccggcgcgctgatgcagcacccgggcgtggccacgatcctcgccaccggcggtccgggcatggtcaaggccgcttactcctccggcaagcccgccctcggcgtgggtgccggcaacgccccggcctatgttgattccgatgtggacatcgtccgtgccgccaacgatctggtgctctccaagcacttcgattacggcatgatctgcgccaccgagcaggccatcatcgcccacaaggacgtctacgaccagctcatcaaggagctcaaggtccgtaaggcctacttcgtcaacgctgaagagaaggccaagctggagcagtacatgttcggctgcaccgccggttccggcgtcaagcccgtgctgaactccgtggtgccgggcaagtccccgcagttcatcgccaaggctgctggcttcgagattccggccgacgccaccattctggccgccgagtgcaaggaagtctccgacgacgagccgctgacccacgagaagctcgctccggtgcaggccgtgctcaaggccgacaacaaggagcaggccttcgagatgtgcgagaagatgctcaagctgggtgccggccacaccgccgccatccacaccaacaaccaggagctcgtgcgtgagtacggcgtccgtatgcacgcctgccgcatcatctggaaccagccttcctcccttggcggcatcggcgacatctacaatgccatcgccccgtcgctgaccctgggctgcggctcctacggcggcaactcggtgtccggcaacgtgcaggccgtgaatctcgtcaacatcaagcgcattgctcggaggaacaacaacatgcagtggttcaagatcccggccaagacctacttcgagccgaacgccatcaagtacctgcgcgacatgtacggcatcgagaaggccgtcatcgtgtgcgataaggtcatggagcagctcggcattgtcgacaaggtcatcgaccagctgcgcgcccgctccaaccgtgtgaccttccgcatcatcgactacgtcgagccggagccctccgtcgagaccgtcgaaaagggcgcggagatgatgcgcgaggagttcgagccggacacgatcatcgcggttggcggcggctccccgatggatgcctccaagatcatgtggctgctctacgagcacccggaaatcgccttctccgacgtgcgcgagaagttcttcgatatccgtaagcgcgccttcaagatcccgccgctgggcaagaaggccaagctcgtgtgcatcccgacctcctccggcaccggttccgaggtcaccccgttcgccgtgatcaccgatcacaagaccggctacaagtacccgatcaccgactacgcgctgaccccgtccgtggccatcgtggacccggtgctggctcgcacccagccgcgcaagctggcctccgacgccggcttcgacgccctgacccactcgatggaggcatacgtgtccgtgtacgcgaacgacttcaccgacggcatggccctgcacgcggccaagctcatctgggacaacctggctgagtccgtcaacggcgagcccggcctggccaagaccgacgctcaggagaagatgcacaacgccgccaccatggccggcatggcattcggctccgcgttcctcggcatgtgccacggcatggcccacaccatcggtgccctgtgccacatcgcccacggccgtaccaactccatcctgctgccgtacgtgattcgctacaacggccagattcctgaggagcccacctcttggccgaagtacaacaagtacatcgccccggagcgctaccaggacatcgcccgcaacctcggcatcgacaccggcaagaccccggccgaagccgtggagaacctggcgaaggctgtcgaggactaccgcgataacaagctcggtatgaacaagagcttccaggattgcggcgtggacgaggattacttctggtccgtgctcgatcagatcggcatgcgcgcctacgaggaccagtgcaccccggccaacccgcgcatcccgctgatcaacgacatgaaggacatcgccgtcggtgcttactacggcgtctcccaggcggaaggccacaagctacgcatcgagcgcgagggtgaggccgccactgaggaagcctccgagcgctgattgcaggcggttggcggctgctggcaccagcagtagccaccaaccgtggtgttgcagcttagtggctgcatagcggacacaaggagcccgaccccattacaggggccgggctcctttgcatatgtggcgctccctcagccggcaggtgcctccatggggcggtaacccactcatggggcggtaacctactcatggggcggtaacttgcccatggggcggtgtacgaaaacggctctattctgcggaaggtaaaattttaccgtccgccccatgggctaattaccgccccatgagggaattaccgccccatggaatcgctgagcgtcgctaaatcaccgcaataatgcagccaaaagcaataaagctggcaaacgcctcggtaacgccggtcaccacgggcttcaaggttgtgcgccgtgtaaccaccggcaacgcaacggcgcgggccaacagcagcacagtcatcgcaatcagatacgggctgcgtccagccggcacggcggctagcagcaatagcgccacatgccatacccacgaagccgccacgtacgaacgcttcccgcgttcccggatcatggttttgaccaccagaaccgacccatactgcgtcagcgcaaacagcacggtggcaatcagcccgttcacgggcaatgaacccgcaggccaccaggcgtgaaggtcgaatatctggctcaaatccggcatattccgaatcgcggcgcgtgcggcggtgacatcagcggctgcgcacgaggcatgtgctgcgttgatgggaataacacatgccgtctcaacagcgttgccaaacgacgcgatcaccgtggccatggccgatgcggcaatcaccgacacggcattgccccacagcgagcgctccttcctcagccacgaggacagcatcgacagcgcaaccagcactatatataaaggagcccaacgcagtatgccggtatgcgtaatcaggaatggcaagccgatgacgatgagcgctacggcataagtgagcatcggcggcagataacggcgtgaaaagtgtgctttgaaccagtgcgcggcgctgaactgcacgcaatagcacacggcccacgtcgccaacagccaaagcgtatcaagattaggcccgccgataaagaagccagccacagcgggcagcataaccattacccatgcgccaggttggttgtcgaaccaatcgcgtttaagagtcttgcggcgggaagccatatctgtcatgatatcgcagcgaatggttctcaataagaaagatgtgagacctgcattgcgacaatcgaacataggaagtgcgagaagccagtgcttccgccattatgcaacatgtgcgattgttcggaaatgttcatttggctcacattgtgtttatgtgagactaatctcgttgagtatcgccctcggcgctggaaatggcctcggctatcggatcttggctgaagtcgtggttgcgataatcagggtcgtccaccggcagatgctgcaccaaggtatcgaacacctgactgtagattttgccgcgctcgagcaccgcatcgagcacatggccgccgaacgtcttgtcgtcggacaggaagtgctcgtggaatccggccacagccgcgccgtgaaacatcacgggggagaagtacccgagcatggtgcccctgacgtcgtggcgcaggaacacggcctgccggtcggccacctctaccagcgtggggtagggtgcctgctgcttgatgaccgcgcgtgtcttgatgaagctgaacgtgccgcgcacaattaccgaaaagaacgtgttcgcgcggccgttcgccttgacgatcttttcgttgagctcttctaggccgatatcatgacgctcgcactggtactggaaggccgcgcgatggctattagcgaatggcatggtgaagtcgtccggcacgcgttcggccacaccggattggcctatcttgtatgccacgccatccaggatgatgagctcgccgtccaagccctcgccggtgccgatgccggtgtcgccatgcttgagcaattcgccgatggtggtggtgccttccagcagccccggcacgagtaaggccaaagtgccgtgctgatataacacgttggcaccgtgctcacgaataggtttgatgttctttgccagtgattgtgtcacgagccttaagagtaattcgcgttaccgtccaactcaattaatcaatccatattcgccaacgtgagctgtgccactatatataggtaagtctcagaaggatgttggtaggcgacgccgagcggctatgccgcgaggtaatacgaacggcatgagcgcgacacgcgcgaattcctccgcgctgtcccacctcaatgcttgaataaacaagttgcctgatttgggctcgcaaattggaattaaaaaaagcgagcgcgggccgggggccacttcaagtgaagtgacagccggaaaccgcgcactgatgtcggatgaccgccagaggacgtatgtccaagggaggccatgcgcgccggtgccctagaagcaggttggtaaacagtacaacgaacatcgctagaaagggcggacggcaatggcgggacagaaaatccgcatcaggcttaagtcctatgaccacgaggtcatcgaccaatcggcgaagaagatcgtcgaaacggtgacgaacgcgggcgcaactgttgttggccccgttccgctgccgaccgagaagaacgtcttctgtgttatccgttctcctcacaagtacaaggattctcgcgagcacttcgagatgcgcactcacaagcgcctcatcgacatcgtggacccgacccccaaggccgtggactccctgatgcacatcgatttgcctgcggatgtcaacatcgaaatcaagctgtaagggaggaggaagcattatgtctaatcgcaaggctctgctgggcaagaagctcggcatgtcccaggtgtgggacgagaacggcttcttcgtgcccgtcactcttgtcgacgtgtccaccaacgtggtgaccgccgtgaagaccgaggaatctgacggctacaaggccgtccagctcggctacggcgccatcgaccccaccaaggtgaccaagccgctggctggccactttgccaaggccggtgtcaccccgcgtcgccacctcgtcgaggtgcgcaccgacgacgtcgatcagttcgaggctggccaggaactggccgctgacctgttcgaagagggtgctgaggtcgacgtgaccggcaccaccaagggtaagggcttcgccggtaccatcaagcgttggggcttcaagtcctaccgccgtactcacggttctcacaagaacgagcgccgtcccggttctgtgggcgcatgcgccactccgagccgtattctcaagggcaagcgtatggccggccgcatgggtcatgtgaccgccactacccagaacctgaccgtcgtctccgctgatgtcgagaacggcatcctcgccatcaagggcgccattcctggccccaagggcggcatcgttctcgtccgctcggctgtgaagggagcctgataaaccatggcaaacgttactctgaacgtcaccgacgccaagggccaggccaccggcaccgttgaagctcctgaggctctcttcggcgtttccgccgaggatgtccaggctcacatcccgctgatccaccaggttgtcaccgctcagcttgctgctgctcgtcagggcacccacgccaccaagactcgtggcatggtttccggcggcggcaagaagccgtggaagcagaagggcaccggtcgtgctcgtcagggctccatccgtgcaccgcagtggtaccacggcggcaccgtgttcggcccgcagccgcgtgactactctcagcgcacccccaagaagatgaaggccgcagctctgcgctacgccctgtccgatcgcgccaacgccggtcgcgttgccgtggtggagttcggtatcaccgagccgtccaccaaggccgctgtcgccgccctggccccgatcaccgcggacaagttcaccacggtcgtcttcactcgcgacaacatcaacgagtggctctccgtgcgcaacatcccgaccgttcacccgattttcgtcgatcagctcaacacgtacgacgtgattacctcgcagtacgtggtcttcaccaaggaagccttcgaggctttcgtggctgccaagaccgagccgaaggaggcctgatttagatggtcgctattcacaagcccgctcacgacgtgattcttaagcccgtcgtctccgagaagagctacgccgcttccgaccgtggccagtacaccttcgtggtggctccggatgcgaacaaggtgcagatcaagcaggcaatcgaagagatcttcaaggtcaaggtgacgaacgtcaacaccctcaaccgcgctggcaagaagcagcgcactcgcaccggtttcggccagcgcgcttcccagaagcgtgcgatcgtgaccgtcgccgagggccagacgatcgacatctttggtaactgaaggctagccgagaaaagttaaaggaagaactacattatggctatccgcgtttataagccgacgaccgcaggccgccgcaacgcgtccgtctcggatttctccgagctgactcgttctacgcctgagaagtcgctggttcgcaagaagtccaagaccggcggtcgtaactcttacggccgtatcacctcccgtcatcgcggcggcggccacaagcgccagtaccgtctcatcgatttcaagcgttgggacaaggacggcgtgcccgccaaggttgccgagatcgagtacgatccgaaccgctccgcccgtatcgccctcctgcacttcgcagatggcgagaagcgctacatcatcgcgccgaagggcatcaagcagggcgacgtcatcgagaccggtgctcaggctgatatcaagccgggcaacaacctgccgctgaagaacatcccgaccggtaccgtggttcacgccatcgagctccgcccgctgggtggcgccaagatcgctcgttccgctggtgctgccgttcagctcgtcgccaaggatggcgcctacgctcagctgcgtatgccgtccggcgaaatccgcaacgtcgacgcgcgctgccgcgctaccgtcggcgaggtcggcaacgaggaccacgccaacattcagctcggcaaggctggccgcgcccgctggatcggccaccgtccgatcacccgtggtgagtccatgaacccggtcgaccacccgcacggcggtcgtacccgcggtggtaagccgccggtctccccgtggggcaagggcgaggttcgtactcgtcgtccgaagaaggcttcgaacaagatgattgttcgtcgccgtccgtccggcaagaaccgcaagtaagggagtatcgagaagatgactcgtagcatcaagaagggccccttcgtcgacgcccacttgcagaagaaagtcgacgagcagaacgagaagggcaccaagaacgtcatcaagacgtggtcccgtcgttcgatgatcacccctgatttcatcggacacaccttcgccgttcatgatggtcgcaagcatgtcccggtgttcgtcaccgaggccatggttggtcacaagctgggtgagttcgcccccacgaagaccttcaagggtcacgtgaaggacgacaagaaggcccgtcgctaaggataaggaatagaacatggaagctaaagcaatcgctcgtcacgtccgcgtgacgccgcgcaaggctcgccgcatggtcgacctcatccgcggcaagaaggcgaccgaagccgtcaccattttgaagttcgcccctcaggctgcggccctgccggtccgcaagaccctggagagcgccatcgccaacgctcgcgtgaaggccgacaaggccggcgagccgttccgcgagaacgacctgtacatcaaggagacctacgttgacgaaggtgtgaccctcaagcgcttccgcgctcgtgcccagggccgcgccgctcgtatcaacaagcgcacctcccacatcacggtcgtcgtggctaacaaggaaggagcccgctaaagatgggtcagaagatcaatccgtttggctaccgtctgggcatcactgagaaccaccgctccaagtggttctccgactccaacaaggccggcgaacgctaccgcgacttcgtgcttgaggatgatcagatccgcaaggagatgagcaaggacctcgagcgcgctggcgtgtcccgcatcgtcatcgagcgcacccgcgaccgcgtccgcgtcgacattcacaccgcccgtccgggcatcgtgatcggtcgtcgtggcgccgaggccgagcgcgtccgcgccaagctcgagaagctgaccggcaagcaggtccagctcaacatcttcgaggtcaagaacgccgcgctggacgcccagctcgtcgctcagggcatcgctgagcagctgaccaaccgcgtcaccttccgtcgtgccatgcgcaaggcccagcaggacgccatgcgcgccggtgccaagggtatccgcatcaagctctccggccgcctcggcggtgcggaaatgagccgttccgagttctaccgtgagggccgcgttccgctgcagaccctccgcgccctcatcgattacggcttcttcgaggccaagaccacgtacggccgtatcggcgtcaaggtctggatctacaagggcgacatgaccgaatccgagttcgaagagcagcaggctcagcagaacaaccgtccgggccgtcgtggtggcgatcgccgcccgcgccgtggcaaccgttccgccgccccgcaggccgtcgaagcccccaaggctgaggctcccgccgaggccgctccggctgcagaaacgaaggagtgagcaagaatgcttatccccaagaggactaagtaccgcaagcagcaccgccctgtgcgttctggcatgtccaagggcggcaacgagatcaacttcggtgatttcggcatccagtctctcgccccggcctacgtgaccaaccgtcagatcgaagccgcgcgtatcgccatgacccgctacatcaagcgtggtggccgcgtgtggatcacgatcttcccggatcgtccgctgaccaagcacccgctcggtgcccgaatgggttccggtaagggtgccccggagttctggattgcgaacgtgcgccctggtcgcgtgatgttcgaaatcggtggtgtgtccgaggacgtcgctaaggaagccctccgccgcgctatcgacaagctcccgatgaagtgccgcattatcgcacgtgaaggtggtgatatctgatggcagtcggtaccgctgattactccatcaagaatctcaacgagaagaccaacgcggaaatcgaaggcttcctgaagaagtccaaggaagagctgttcaacctgcgcttccagcacgccaccggtcagctcgagaacaccgcccgtctcaaggctgtcaagagcgacatcgcccgcatgtacaccgtgcttcgcgagcgtgagcttggcatcagccaggagccggccgctaccgaatccaaggagaagtgattatggctgaagagcgtaacttccgtaaggttcgccgcggctacgtcgtgtccgacaagatggacaagacgattaccgtcgagctcgagcagcgttcgacccacccgctgtacggcaaggtcgttcgttccaccagcaaggtcaaggcccatgatgaacacaacgacgcccacattggcgacctcgtgagtattatggaaactcggcctctgagcaagaccaagcgctggcgtctcgaatccattatcgagcgcgccaagtaagtaaagttcggcaaggctcgccatttaccggggcattatgggcaaccacgatgccccggtaaatggggagaaccagctcggctaaggagaatcaatgattcagcaggaaacgcggcttcatgtcgccgacaacacgggtgcgaaggaactcctcgccatccgcgtgctcggcggatcgaagcgacgctatgccggcatcggcgacgtgatcgtcgcctccgtcaaggacgccattcctggcgggtcggtcaagaagggcgacgtggttaaggccgttgtcgtccgtaccgtcaaggaatcccgccgtgcggatggttcctacatcaagttcgacgagaacgccgccgtcattctcggctccggccgtgaaccgaagggcactcgtatcttcggaccggtcggtcgtgaactgcgcgagcacaagttcatgaagatcgtgtccctcgccccggaggtgatctgacatggcagccaagatcaagagcggcgacctggtcaaggtcatccgcggcaaggaccgcggcaaggaaggcaccgtcaagcaggtgctctccaacgatcgactgatcgtcgaaggcgtgcagatcgtcaagaagcacgtgcgtgcaacgcagcagggccagcaggctggcatcgtctccactgaggctccgatccatcgctccaacgtgatggtcatcgacccggagaccaagcagccgacccgcgttggcatcaccgttaaggaagaggcgcgtgacggcaaggtgaagaccgtgcgcgtgcgcgtcgccaagaagtccggaaaggagctggcatgaccgatactactgtcgaagcgccggccaccccgcgcttgaaggtcaagtacaacgagcagatcattcctgagctcgagaaggagttcaagtactccaacccgatgcaggttgcccgtgtccagaaggtcgtcgtctccatgggtgttggtgccgctgcccgcgactccaagctcatcgaaggtgccgtcaaggacctcaccctgatcaccggccagaagccgaagatcaccaaggccaagaagtccgtcgcgcagttccacctgcgtgaaggccaggccatcggtgcgtacgtcaccctgcgcggcgaccgcatgtgggagttcctggaccgtctgctgaccctcgcgctgccccgtatccgcgacttccgcggcatcaacggccaccagttcgatggccagggcaactacaactttggtctcaccgagcagtccatgttccacgagatcgatcctgattcgatcgatcacgtgcgcggtatggacatcactgtggtgacctccaccaaggacgacaaggaagcctacgcgctgctgaagcacctcggcttccccttcaaggagaactgatatggcaaaaaccgctcttaagaacaaggcggccggcaagccgaagttcaaggtccgcgcttacacgcgctgccaggtctgcggtcgtccccactccgtctaccgcaagttcggcctgtgccgcatctgccttcgtgagaaggctcaccgcggtgaactgcccggcgttacgaagtccagttggtaaacatcgacgctgaaggtccgcggcccgaacgcttctagaagaagcgtgagggcggcggaaaccatagcgagaaagggcaacaagcccaaatgacaatgacagatccgatcgcagacatgcttacgcgtctgcgtaatgcgagcgcggccaagcacgaaaccgtggatatgccgtactccaagttcaaggcgaacatcgccgagatcctgaagcgcgaaggctacatcaaggacttcaccgctaaggaagccaaggtcggccagactcttgaggtcaccctcaagtacggtccgaacggtgagcgttccattcagggcatcaagcgcatctccaagccgggccttcgtcgttacgcgaagtccgactccctgccgatgccgctcggtggcctgggtatcgccatcatctcgacttcttcgggactgctgactcagaaggaatgcctcgaccgaggcattggcggcgaaattgtcgccttcgtgtggtgagaaaggagagctgaaacatggcatcgcatattggtaagctccccatcgccatccctgctggcgttgaagtcaagattgaaggccagaacttctccgccaagggcgctaagggttctgactcctacgtggttccggaaggcatcaccgctgccgttgaaggcaacgagatcgtcctgaccgccgctgatgacctgcgtccgacccgtgccaagcacggtctggcccgctccatcatggccggcatggtcaagggtgttcacgatggctactccaagactcttgagatcgtcggcaccggttaccgcgccgtcgccaagggcaagggcatcgagttcttcctcggctactcccacaccatcaccgtcaacccgcccgaaggcatcaccctgaaggtgaccgacgccaaccacgtggttgtcgaaggcaccgacaagcaggtcgtgggccaggttgccgccaacatccgcaagctgcgcgctccggaaccctacaagggcaagggcatcaagtatgccgatgaacgcatcctgcgcaaggctggaaaggctggtaagtgatatgagcgttgctattctcggaaaaggcaagaaggtagctctcaagcgccgtcacgcgcgtatccgcaagcgcatctccggtacccccgagcgtccgcgcctggtggtcacccgctccaaccgtcacatggttgctcaggtggtcgacgataccaagggtattaccttggtgtccgcctccactcttcaggccgacttcgccggcttcgaaggcaccaagactgaggccgccaagaaggtcggcgagctgatcgccgagaaggccaaggctgccggcatcaccgcagtcgtgttcgaccgcggtggcaacaagtacaccggtcgcgtcgcagccgttgctgatggcgcccgcgagggaggtcttgcactgtgagcgacaacgaaacgaaggaaacccaagtggctgaagaaactcagaacactgtggcgaccgaatccaacaacgaggaccgcaagggtcgtcgtggccagcgcggtgaaggccgtcgcggcgagcgtcgtaaccgtcgtgaagaaaaccacggcgacgagctgctcgatcgcgtggtgaccatcaaccgtgtgtccaagacccacaagggtggccgtaccttcagcttcgctgcactggttgtggtcggcgacggcaacggcaccgtgggtgtcggctacggcaagtcccgtgaagtcccggccgccatcgccaagggccagctggacgccaagaagcacatgttctctgtgcctcgcgtccgcggcaccatcacccacccggttcagggtcacgacgctgctggcaccgtcctgctgcgtccggccgccccgggtaccggtgtaatcgccggtggctccgtgcgcgccgtcatggaatgcgcaggcatcaccgacgtcctgaccaagtcgatgggctccgccaccgccgttaacgtggtgcgcgctaccgtcgacgccctcaagcagctcgaagagcccgaggagatcgccgcccgtcgtggcctggcgctcgacgaggttgctcccgatgctctgctgcgcgcccgtgccgccggcattgccgaggctcgcaaggctcgcgaagaggctgctgccgctaaggccgccgaagagaaggatggtgagtgatactcatggctaagaacctgaagattaccctgcaccacggcatcgtgaaccgtaccccggctcagcgcgccaccgtcaagaccctcggcctcaacaagatcggtaagaccgttgtccgcgaggacaccccggccaaccgtggtctggtgaacgccgtgcgtcacctggtcaccgttgaggaggttgactgattatggcagataacgaaatcctgcagatgcacgacctgaagcccgccccgggcgccaagaaggaccgcacccgtgtgggccgcggtgaaggctccaagggtaagacctccggtcgtggcgccaagggccagacgaagcgtaaccacgtgcgtccgggctttgaaggcggccagctgccgctgtacatgcgcctgccgaagcttcgtggcttcaagaacccgttcaaggtcgagttccaggtcatcaacatcgctcgtctcgtggagctcttccccgagggtggcgaggttgctgtggccgacctgatcgccaagggcgctgttcgtgacaatgctccggtgaaggttctgggcgacggcgagaccaccgtggctttcaccctcaagggtgttaaggcttcggcttccgccaagtccaagatcgaggccgccggcggttccgtttccgaggactgattagtcctacggggagcgcaataggctgtacaacccccgcccgccaataggtggacgggggttcccttttctcaaaaactgttgttctgagcgcagagaagcagtctcaacacaatgatcgttttgagtatgcttcccccgttcagtacggcggagcataattcaggtaacattcgcgagacatgaagtggccgaagtaggcactgtagactatgctcattcgttagtttgtgtatttcgcgtgattggcgcgctattgggaggaaatctaggtgaggacactaatccaggccctgaagaccaaagagttgaggaagaagattctcttcgtcctgttcatcatcatcgtctaccgcatcggttcgttcattccgacccctggcgtggactacaacgtggtgaacaagtgcatggccactgtcggcagcgcctcccaggagaacttcatcggactggtgaacctcttctccggtggcgctatgctccagctgtctatcttcgcgctgggcgtcatgccgtacatcaccgcgtccatcgtggtgcagctgctgcgcgtggtcatcccgcgcttcgaggccctgcataaggagggccagtccggagaggccaagctcacccagtacacgcgttacctgaccatcggcctggccgtgctgcagtccaccaccatcctggtcaccgcccgctccggtgccctgttcaactaccgctgcgaccaggtcatcccggacggctccgtgtggaacctcgtggtcatggtcctcatcatgaccggcggcaccggcctgatcatgtggatggccgagctcgtgaccgacaagggcatcggccagggcatgtccatcctgatcttcatgtccatctgctccggcttcctgccgcagctgtgggagatcggctacggcaccaacggcaagaacggcgactggaccaagttcggcatcgtcgtgggcgtgctcgtggtcatcctcatcttcgtcgacttcgtcgaactgtgccagcgccgcgtcccggtgcagtacacgcgccgcatgatcggccgtaagatgtacggcggctcctccacctacctgccgctgaagatcaacatgtccggcgtcatcccgccgatcttcgcctcctcgatcctcgccatcccgaccctgatcgcccagttcggcaagtccgaccagtcctgggtcaagtggatcaacgccaacctggcgaacaccacatccgtgtggtacatcgccctgtacgcactgatgatcgtgttcttctgcttcttctacacctcgatcacgttcaacccggacgagaccgcggacaacatgaagcagtacggcggcttcattcccggcatccgcgccggcaacgccaccagccgttacctgacctacgtgatgaaccgactcaacaccgtgggtgccgtctacctgctgttcgtggccctgatcccgaccgtgctgatcatggctctcggactcaacgccaagctgccgttcggtggcaccacgatcctgattatcgcgggcgtgggcctcgacaccctgcgtcaggccaaggcccagaccgaacagttccagtacaccggcttcctgttcgaaaacgtggaccacaaagaaggctgacgcccgcttggcagcggtcgcccgcaatgggcaggcggccgcgcgaggagtggaacagtccagtggactgttccacgacggagcaatctttcttccacatataactcaatggctcccctaaccaagggagccaaaaccgtattaataaccgacacaaaaggagaccaccatgcgtctgctcatcatgggcccccagggcgtgggcaagggcacccaggctgctctgctcgccgagcacttcaacatccccaccatctccaccggcgacatcttccgctacaacatcaagaacaagaccgaactcggtcttgaggcgatgagctacaccgacaagggcgagctggttcctgactccctgaccaacaagatcgtcaaggatcgtctggccaaggaagactgcaataacggctggatcctcgatggctacccgcgtaacgccgcccaggtcaccgctctcgacgagatgctcgccgacctcgacactccgctcgaccacgtggtggccctcgaagccgcccgtgacgtgctgctggagcgtatgaagaagcgcgccgccgagcagggccgcgctgacgacactccggaggccatcgccaagcgcctggagacctacgagaaggaaaccgctccgctgctcgacatctacgaatcccgtggcctgctcgtcgtggtcaacggcgtcggcgacatcgacgagatcagcggccgtatcatcagccacctcgagtagtaggttcggcagcccggccaacaagccggagtgatgccgaaataccacatcaacgtttccatacccctgtgcgacacgccgagtgttcgtacaggggtatgtgcgtatatagttgacagttggtgtgtcttcggatatgccatagtaatcatccaacggaataggactagaggcacatggcaaaagacggtgtgattgaagtcgaaggacaggtagtggaagcactgcctaacgcgatgttccgcgttgaactcgagaacaagcacatcgtgctcgccacgatttccggcaaaatgcgtaagaactacattcgtattctgccgcaggatcgtgtcgtgctcgaaatgagcccttacgacctgaaccgcggacgcattacgtaccgttacaagtaaaggtacacaagaaaaggataaccatgaaggtcagccctagcgtgaagaggatctgcgaaaactgccgcgtgatccgccgtcacggccgcgtcatggtgatctgcgtcaacccgcgccacaagcagcgtcagggctgagagcagattctccagcggcactaagtaaataaggcactctctcacagtgcttcccgaaagggaacgacactgaaccacgggtacgtaggcccgtgccgggtaaccgggcgagcgggtgcaagacctacggcaacaagaaggaatcgcaatggcacgtcttgccggagtcgacatccccaatgagaagcgcatcgagatcgccctcacctacattttcggtgtgggtcgcactcgtgccaaggaaacgcttgccgcgaccggtatcagcccggacatccgcgtcaaggatctcaccgacgagcagctgattacgctgcgtgactacctcgaagccaactacaagatcgagggtgacctgcgtcgtgaagtcgatgcagatattcgtcgcaagattcagatcaactgctaccaaggccagcgtcaccgtaagggacttcctgtgcgcggtcagcgcaccaagaccaatgctcgtacccgcaagggcccgaagcgcacggtcgccggaaagaagaaggccaccaagtagtcggtggcatgattcgggccacgggatgatttcatcccatcgcccgaacgtcaacaacaaagttcgttactaggaaacgagggtcaatggcagcgcctaagcaagccgctcgtaagccccgtcgtcgcgaccgcaagtcggtcccggtcggccaggctcacatcaagtccactttcaacaacacgatcatttcgatcaccgatccgtccggtgccgtggtgtcctgggcgtccggtggtgatgtcggcttcaagggctcccgtaagtccacgccgtacgccgctggtatggctgccgagtccgccgcccgcaaggcgatggaacacggcgtcaagaaggtcgacgtgttcgtcaagggcccgggttccggtcgtgagaccgccatccgttccctgcagtctgcgggcctcgaggttggttccatcaccgacgtcaccccgcaagcccacaacggcgttcgtcctccgaagcgtcgtcgcgtctgagcactcagcaataccaaatccatccaaaaccgcctgaccggtgagtgcaccaccgagttcaagctgaaaggataaccacagtgcttattgcacagcgtccgactcttaccgaggaatctctgaatccgcagcgctcccgcttcaccatcgagccgctcgagcctggcttcggctacacgctcggcaactcgctgcgtcgcacgctgctgagctccatcccgggtgctgccgtgacctccgtgcgtatttccggtgccctgcatgagttcaccactctgccgggcgtccaggaagacgtcaccgagatcctgctgaacatcaagggcatcgtgctcaccagcgaatatgacgagcctgtggtcatgtatctgcgcaagagcggcaagggcgaagccgtggctggggacatcaccccgcctgccggcgtcactattgccaacccggagcagcacatcgctaccctcgccgacgatggcgaactcgagatcgagttcactgtcgagcgtggccgtggctatgttcctgcccagatgaacaagcaggacaacgatgagatcggccgtattccggttgattccatctactccccggtactcaaggtgagctacaaggtcgaggccacccgtgtggaacagcgcacggacttcgacaagctcattctggacgtggagaccaagcccgccatctccccgcgtgacgcggtggcttccgccggttccaccttggtggagctcttcggcctgtgccgtgagctcaacgcccaggctgaaggcgtcgaggtcggtccggccccggtggccgaggagaccaaccccgagatggccgttccgatcgaggacctcaacctgacgcagcgttcttacaactgcctcaagcgcgagggcatccacaccatcggtgagcttgtctcccacaccgagcaggacctgctcgacatccgcaatttcggtatgaagtcaatcgatgaggtcaaggagaagctgcagaccctgggcctgagcctcaagtcctcgccgatggccttcgataccaataatctcgaaggtggtacgttcttctcgccggaagacgagtgatctgcctctttgaccaatcgttcgttcactaggcaagcggatgttcgggcatatgcccacctgcttgcctgaagaacggacatataaggagtaaacccaatgcctacacccaagaagggcccgcgtctggcttccagccccgcacacgagcgcctcatgctggcaaacatggcgaccagcctgttccagaacggccgcatcaccaccacgctgccgaaggccaagcgccttcgtccgctggccgagcgcctgatcaccttcgccaagcgcggtgatctgcactcccgtcgtcgcgtgatgcgcgtcatccgcaacaagtccgtggtgcacattctgttcacccagattgccgagcagatggagcagcgtgaaggtggctacacccgtatcgtcaagatcgccccgcgcgttggcgatgccgctccggccgctgtgatcgagctcgtcaccgagccggttgccaagaaggctgttgtgaaggaagctgaagccgccgccaaggttgccgaagaagaggctccggccgttgaggctgaggccgctgaggctccggtcgaggagaccgccgccgctgaggctgaggctcccgctgaggaagccgctgacgccgagaaggccgagtgagctgaatagcgtttcgccaagctagctgaaagggctggaatccgtttgggttccagcccttttgcgttgtttcatagaaactacaacgtacgtacggctcgaatggcctcggctcttgcggccagctgatcatcgacggggtatgcgatatgctccaaagtcaggccctgcggcgcaatcggcccgcttgagccttcacgcactggctcggccattttgccggcaaaccattccagagatttgcgtcccgaaccaactttgatgcatgagccgaccaaggagcgcaccatattgcgggcaaaggcgtccgccacaatcgtgaacaccgccagtccggactccagcgacggagtccgatatgcttcatgcgatgccatcgcatccggcaccaggggagtgatcggcacccgccgccaataggcggtcttgacttcgcggatcgtagtgcctcccggattcggagtggcgaaggaaccaaaatcgtgcaggccgatggtcaatgaggctgcgcggttcataagctccagatccagcgattcatccacggtaagcacgcatccacgcaggcgcgggtcgatctcggacgaacgatcggcgacccgatacacataagtgcgctccaatgcggagaacctggcatcgaaaccggccggtgccacggcaatgccatgaatgacgatgtccaaaggcagcacagccttgagtctgcgagtcagcgcctcggtgaccggaatggtcatgtgacctacgcagcgattcagtacctcatcggatacatccaaatgcgccacttgatgggaggcgtgcacaccggtgtcggtgcgcccagccaccgtcagacgcaacggttcggccgcatcatcggccggcacccgcagcaccttgtgcagcgcatcttcaatggcgccttgcaccgtacgcagattgggctgtttggcccagccatagaatccgccgccgtcgtaggccaagtcaatgcgcagtcgtgtcatagccattcattgtaacgagtgcggtcggcgagatgcgcgcggtcggcgagacgagtgcggtcggcgaagtgacctgcctgtaacattctcgcgcgtttgctgaaacggggccgccttaggttgtaaccatcaaacccggttacggcttgcggcgtcagcgtgcgctcgaaacgcctaaccgcttgaggccacagaagccgccacagcaaggagcaggcacgatgatcgaatccgcagcacgcagactggcccatgaactggtaaaccgtcgcgaggcgatcaaccgcgagctgtcccgcaacggcgtacgcttcggcatctacaagaacggcgaataccatgaccggctcttcccgtacgatcccgtgccgcgcattatcgaatccgacgaatacgacgaattggagaagggcctgaagcagcgcgtcaacgccctgaacgcctatctgaaggacatctactccgacaaggccatcatccatgacggcgtcgtgccggaggaatacgtatacacctcggccggctacttcccgcaggtcaacggcgtgacccctcccggcggcatcttcgcgcacatcgccggcgaagacctggtccagggtgaagatggccgctggtgggtgctggaagacaacctgcgcatcccctcgggcgccagctacccgctgttcgtgcgcgacatcgagcgccgcatctccccacgcctgttccgcgacgtgcacatccgcgacaatcgcgaatacccgcgcctactgcgcaaggccatggactttgtgtccactgagggcatcgccgtggtactgacccccggccgctacaattccgcgttcttcgagcacgcctatctggcggagaaaaccggcgccgcactggccttccccgaagacctcgaagtggtggacaacaaggtctacttcctcgactacgccggcaaacgccaccgtgtgggcgtggtctaccgccgtctgtccgacgaattcctcgatccgtttgccttcaatcctgattcggtgatcggtgtgcccggtatcctgtccgcctaccgcgcgggcaacgtggccatcgtcaacgcgccgggcaacggcgcggccgatgacaaggccatctactacttcgtgccgcagatgatcaagtactatctcggcgaggaaccgattctcaacaacgcgcccacgtatatgccgatgttcgaggccgaccgtaaggaagtcctgaatcgtatgggcgagctggtcatcaaggatgtggccgaagccggtggttacggcgtggtgttcggttcgtcgctggatgctgccgcacgtgaggagcttgccaaccggatcaaggaggagcctcgtcgattcatcgcccaagaggtgattcagttccgcgatatcgatgtggtggacccgaagaccggtgagatgtcgccgcgcaaatgcgatttgcgtgcctttgtggtcaccggcaaaaacacgcacgtgtggtattcgggcttgactcgatactcgtcggtgcccggccagatgatcgtcaactcgtcgcagggtggcggattcaaggatacgtgggtgttggcacccgaatccggcgtggagcatgaatacggtgctgaagtgcaggtggcgaacctgctgagccagtcccgccgccactcgttgtctctggtcaccgcttccaaggcagacaacctgtattggctgggtcggtacaccgagcgcgccttcaccacgctgaaccagttcttcccgttctacgatcgtgtgatggacaccgatgtggacgccttccgtccgttcgctcacgcactcgacctgcccgaagatttcgaggacttcgacgggttcgtgaacagcttcctgtacgacgggtccaaccctgattcggtgcggtcggccgtaacctccgcattcaacaacgccgtgattctgcgcccggaattgagctcgcgtctgttgcagtacgtggagttggcgatgaccaatatcaccgatgccgccaaatacgcggccgacgccgaggacatctacaagcagcgcgatattaccgatgacatgctcgccttctggggcggcatcgagaattcgccggtcgaccccacgctgaaggcgttcatcttcatcggcaagtatcttgagcgcatcgacctgtacacgcgcttcggcctgacgatggaggagatggaagccccgcttaggaagctcgcctcctactcgatgatcctcgacggcatgccgttgcctagttgcttcgccgatgggctgagctggctggtcggtcagctgccgtctcgcgggtatcaggaagtcgccgacctgctgaagaagtaccttgacgattattccggccgtgtcagcgccctggccatcaaagacatgggctcactgagctccatgaacatggatgccaagcgcccctaacccgacgttcgccctgacaggttcaaatgctatggtggtatggcgaaaaaccgtgcgcccgagtgccggccgatgcgtatcggcgaattgccggaatatatgcgtggactgtgagcgcgcggaccatacctcagccatggctgtagtgtcgttatcccgagaatgtgccggttgccggctcgtgtgtaagtgcaggagacgttgtgaaaaaactcgtgttcgactatgagatgaagctgtccttcagcgcaccggtcaccgatcacaggttccagcttcgctgtattcccgccactggccctcgccaacaggtgattgacgtggaagtgaagattcagcccgaaaccgaactcgaaaccaccatcgactcctttggctccgtggtgatgaccggattcatccccgagccgcacgacatattcagctattcggtgaccggcatcgccttcgtggacaatgcgcatatccataaggaagcctataaaccgctgtaccgattcaattcagcgctcaccattcccggcccgaacgtggaggcgatgatcgacgtatgccgcgaacgcttggctgcgttgcctgccgacgccactccggtgcagcaggccgccgaagtgatggatgaggtctacaaggcgtttgtgtatacgcccggttccaccacgattcgcaccaccgccgaacaggccttggcccagcgcaagggcgtatgccaggattatgcccatgtaatgctgtccgtgtgccggcatgtgggattgaccgcgcgctacattgccggtttgcttgggggagagggcgcgacccacgcttgggtcgaggtgtatcaggatggccgatgggtcggactggatcccacgcataaccgattggtggacgacagctacatcaccatcgcccacggccgcgattaccgcgactgcatgctcgacatcggcatcttctccggctacaacgtccagcagacccaatgggtcaatgcctccgtccacgaacaggtggcgtaaacaaaattccaagctccctctgatgagctgagccgtgaagaaaactccggaggcgtttttaggcgaaggcgaacgacagtgagcaaataaaatggcagctggaaagctgtccttaaattgcgttcgagctgtcgagcgtagcgagactgagagagaccgctcaatgcagagtggccccgtcaccgcttctaccaccaccaatattcggattttcgtcgttgcaacattcggattttggtagttgagaaattcggattattgtagttagaaagttcggattttcgtcgttgcaacattcggattttggtagttgagaaattcggattattgcgatggcggacgtgaaataacgggaggtgcgcggaatggccgattctctggcgagcgacatcaagccgaaagcctatcgccctcgtatcgtggatgcacagatcgaacgatatatgcgcatctttggcgcggtggagattaccggcaccaagtggtgcgggaaaacttggtctgcgcgggcccatgcagccagcattacctatgtggatcgcaataacaatttggctgcggctaaggcggatccgtcattgatgctgctgggagataggcctcatatcgtggatgagtggcaactcgctccagctatatgggatgaagtccgtcatcgcgtcgacgatgattccgcgaataaaggtcagtggattctgaccggttcatccactcctctcaatgagaatcggccgaaccatagtggtgcgggacgaatcggacgtatccgtatgaatcctctgactttatatgagtccggactctcgacaggtgcggtaagtctcagtggactgtttgaacataagttcgccgctgcaaaatcagagataagtacacaaatgttgttggatgccgtatgccgaggtggatggccggaggcggtggctctgcctgtatctgacgcacagattctgattcgggaatacatgcgactcacgctgactgagagtgtgcccaggcaaggcaaggatcctgatgtggctcgtcgtctgctggattcgcttgcgcgcaatatcagtcaagctgtgacattcaaaaccttacgtaaggatatgtacggtactgaagaaaaccttgacgatttcatttcggagagaacggtatccgggtatacggccatgttcgagaacatgttcgtcatcgatccgataaagggctgggtcccgccggcacgggatccaaagcgactccagaccaaggcgcgtcggtattttgccgatccttccattgcggccgcaatgttgggcatgagtcctgctgctcttatcggcgattggcagacttttgggtttctgtttgaggatctatgcatccgtgatctgttggtgtatgcgagatctctcctcgatattgggatagaaccggttcggtattatcgtgacgattccggtctggagtgtgatgccattattgaattgtccgatggacggtggggcggcatcgaaattaagtccagtgaggataaagtccctgaggcatcggcaaatctatgcagactgaaagataagctgctgagaaatccgagtgcgcgaacccgtgaaccggagttcttggcggtgttggtgggggtcggcgagttcgcgtatcaacgcgatgatggagtgtatgtaattcctgtcggagtgcttggcgcgtaaacgcaatgccagcgcttcgggcgaattccgggattgtgatctgacatgtctcaagcggcatacactcgagacttgctcagcgaaactccgatttgccaggtcggcagaatgtggcataatgaacaagttgccattttggcagcatggataagtgtccgagcggtctaaggagcacgcctcgaaagcgtgtgaggtgaaagcctccgcgagttcgaatctcgccttatccgcctttagggttccggggtttgtcccggaaccctttttgtttttgatgcgaacgtccgtattcggggttataggccaaaatgtatgtccggcggtctagtcgttcgactgccattcgaccctggtgtggaactcgttccagtcgatgccggtgccgtgtctcatgggaatgccgaacgtctcgtgcatgctctgcgggcttctctcccatgcccgccggtagaggcgctcgagtcgttcgtcggtcatcgcgttggccgcgagccacgcgtcgctttcgggccgttccgtgtgctggtggcaccaccagcagatcgccttcagccgtctgaccagccgcagtccgcggtggcggcgcggcatgtcgcgcaggcgcgcgttccatgattcgacgaggttgttcgtggacggcactgggccggctgccgcgagcccctcgtcgaggaacatgaacggttggccctcgcggatgcgcctgcggatcatgcgtggattggcgacggtgtgttggactgtttctagagggtttttccttgttgtgtgaactccacggggctcaggtacccgagggtcgagtggagccgttggtggttgtaccaccacacgtaccggttgacgtccgagcgtagttgctccacgttcgtgtagacgttcctgtggatgagttccttcttgacgagccggttggtggattcgaccaccgcgttgtcgtatgggttgccgggtctggaaagggaacgtgtgatgccgaacacgtcgagcatgcgttcgatgcgttccccggtgaactcgccgccgcggtccgtgtggaacacctcgatctcatccagcgggaagcgcagcgcggcgaacgcggccagcacgagatcggcgtcgtgcctgacgccgaccgaatggccggcgatctgccggttggccaggtcgccgggcaggcagacgtacgcccacgaactgccgaccctcacgtaggccgggtcggaggccagatgggtgcgcggcgcatagccattgaactcgcgggcgaggatgttgggagccgggtcgtcgttcggcctggccgggcgtggcctataggcggccttggaataggagctggccatgccgttcctcttcatgatccggttgatgcggcggcgggacagcgtcacgccctcgtgccccagggcgtgcttgatcttcctggccccgtacaccttgccgctgtccctccacacgcgctccacatccttctcgtaagggtcggcgcgttcggcctcggggtgttcgagcatccagtagtaggtcgacttggcaacgcccaggatcctgcactgcgctgatatcgggcagcggccggcgttggaccgtatgacctctactttcgtgcgaataccggcgccgcttgttctgaaacgtccacctccatctccagctgcctgttgcgtttccgcaattcgatcagctcgttctcctcgggagtgcggttgtcgacggccctggtcgagccgctgttgcggatgccctgcacccaacgctgcagcgtggaacgcgggatgccgtactccgccctgatctgcgacgacggcttgccgttctcgtacagctgcacgatctgccgcttgaactcctcctcgtaatgacggggacgattcggatcggccatgatgatcaactccttcgttgtcatgtcccgcatgaaccagtccaatacattgtagccaatccacaccgcagatcacgggcgctgttgtcgcgcgactgggtgcgtgagctcccgcagccggcgttccggcacctccacctgatccgtcccgagctcgtccttccgttccgcttcatcggctcgccgcacacggcgcaacaaggtgtgttcatccacccaatctgccacgccaactcgaaagtcactcaaccgttgtgccgcaaggcctgaccggc

SEQ ID NO: 953 - DNA, 11532 bp, Unknown
  R117_24m  MAG No. k141_15735
gccgaccctcggcttcatcttcctcatcgtatttatcgaaacgggtgtggtgttcttcccattcctgccgggcgactccctgctgttcgccgccggtgtgttcgccgctcccgatgccgcgaccggcaaggccgcgctgccgctgttctggctgctgccggtggtctggtgcgccccgattatcggcgaccagtgcaattacttcattggtcatttcttcggccgtcgcatcatccagtccggcaaggtgaaggccttgaccccggagcgtttggccaaaaccgagcacatgattgagaagtggggcccgctggccgtgttcctgggccgtttcttcccgttcattcgtacgttcatgccgttcatctccggtatttccggtatgcgttggagccgtttcacgccgttctcagtgctcggcggcctgtgctggtccacgttgttcacgctgctgggctacttcttcggtaacattccggcagtacaggaccacttcgagctggtgatcgtgctgattctgctggtctcgctcgccccgaccatcatcggtctgctcaaggccaagttcggcaagaagaagccggccaaggtgaccgatgctcagttggatgctatggaagacggcattaagaacctcgataagtaagcaagaaatgtagattaccgcataaggaatcgtcgtgaaaatgaaggccctgactgtgcatgtgaggtcagggccttttctgcatgagatgggcgtgaaacagcagcgtggttatccacatttgtcgtggacgacatgccggggtgtggataactcagcaagctagaaccacaatggtcgattcgtgttgagcattgaactcggacacgtttcaatcggcttatgaatagcaacaccacaccccgcgtggcgcgtaggatcacctcgccagcggtagcacctccgggcattccgctgcccacggacgatgcgccaattccagcgtatcgctactacactccgccgcccaggccgttggcctcatgcgaacggcagagatcgggcgaggctccggcactcgccctaactacagacaccagcttccataacattgtaacgatgacgtcaggtcatggaggcgtggggttgagtgtcatggcttccatgcttgcatggacattggcgagacgtgaacacagctgcgttctcatagacgctgatttcgtggccggatgccttgacctgctgcttggtgtagaacgagagccgggcttgcggttcagccaagtcgacgcgcccctcggccgtatcgagggtgaggcgatgaaccatgagctgatgatgtgggagggtgtgcgagtacttccctatgacccttggagcgcgcgccagcctgactggtgggaagttcaagcggccattcgggctttggcggaaacgaacgacgttgtcatcgtagatgccggtcagggtggactcattgagaccgtacccgatctgcgcagtggcctgcaggtgattgccgcggaattgtcggtaatggggctggccagagccaagtcgcaccggtccagattggattcatggggctgtgaagcgccacatatcgtaggtgtggaaccacgtggcgctccacgtgggagaggccacgtgggtattggcgaggcgcaggactatttgactgccacggtattggggcccatcaagccaagtgtcaatctgtgcggagacgtactggaaggcctcggcatcagatcggtgaccaaaggcagtcgcaaagccatgaacttgcttgccgatctcgtagaacaggccattcgcccggtttcgggagcttctcacaaggaccagtgatgctatggctgccgtcagcacgcgagccaatgaggctggcacagcgctcagaaccatattcttcggtctgctggatgacgtggcatctgacccgcaggttaccgatttggcggtgacctgtgatggccgcgtttgggcggaccgcggcaatggcatgcgcgaaacagtattgcatgtgccgttccgctcgccgcaagtagttcgagaatacgccgtccaactgtgcgcgcagctcgggcgcagactggatgatgcctgcccgatagcggatgccgccagtccggatggcatccgcgtgcatgcggtgattgccccattggtgccacaaggtgccgcgatttccatacgattccctgaccgaaccatggcatcgctacagcacctgagcaaattaggcgtattcccggctgcttggctgccgacgttcgtgggattggtgcgcaaacatgccacagtgctgattaccggcggaacaggcgtgggcaagaccaccttgctcaaggcgctgctggcgcaatgcgacgtgaacgagcgcatcgtcaccgtagaggaagttcgtgaactgggggaactgggacgcgacgatcatgtctcgttggtaacacgcgaggcgaatgtggagggcgtcggagccataagcctggcggacttggtcaaagcgacgttgcgaatgcgccccgaccgcgtggtgctgggcgaatgccgtggcgcggaaatcgtcgacctattgcgcgcgttcaattctggtcatcacggtggcatgaccaccgtgcatgcggacggcgtgaaccgagtaccgttcaggctgatttcgcttggattactcgccggagtcagtccacaggcgttgaccatgctggcggcaggcgctttcgacgcggtggtgcatttggagcgagtgaacggacagcggcgtatcacgcagatcggcgaactgcgcgtagcacatggtgaactggcaggaacaccgctggcggtatggaatggctgccatcctcctcggtatgccgccgaatgggggcacttcattgaacgatggggcatcgttcccaggccgagtggtggtgggtgatgatgtggtgtgctgttctggtggcgctcgccgtgctgatatggccggggaacaagtccgggaggctgtaccggctggcttaccgcgggcgcgcggtcgattccgcagccataaacgaacctcgatatgccgactcacctcgcgtgggcgttgcgcaggtgattacatccgccatcgcgcgattgcgaggtggcggcacattggttgaagcattcgaggaacaatccagcagacgcttcgccactcatcgcattactgtggaacggctcataacggtgttcgaacagcggcgtctgcccgacgaatcaccagcgcaggtacttgaagctgcacgcggggtcgccgccgcagcggttttgagcgatgagctcggttgccaagcggtgccatgtctggaagcggtattgactgcttaccggcagatgaggctgatgcagaacttgcgatcgcaagcatgtgccgttcctaaagccactgtggggctgctgagcgcgcttccggccgtcactgtggcattgggcgagcttctgggagctagaccattggcgttcttgcttggatcgccacgcggtgtggtctgcttgacattgggaggatgttgttatgctgccggcttggcatggatgcgggcattgttgaaaggcagcggattatgagtacggtgtgggtacacgccgcggcaggctgtgcggcggttgctggttggctgtataaggctctgtctcgtcatgacagccgcttgccgggcgaggagccggccgtagcgcatgattgcgggtcgtcatggaccatactcatattgcgtatgttgcaggtgtccttgcgtcagggctcctcgattccccgggcgcttgacatggtgggcaaagccgtcggcggcgactgcggcgctcgcatgagcgaggtcgggaactccctgaccagaggggttccctgggctgatgcgtggcatgccgctatggctgttcagcatgagggtgcgccagctgatagtccatccaagggaaatacgaataccacgcaacgagatcttggcctgctgcaatcggctttggaatcgtcatggacgcatggcgatatgcctggtgtgcgcctcgaatccgccattgaacagctggaccgtgacgagcgtgctgctatcgaacggaatgccgcgaagctgtcggtaaagctactgatgcctacagggctatgttttctgccggcattcgtgctggtaggagtcattccggcgattgcgtccttcatgatgtgaatataggcgtgaactgagtgcgcttaggctgaatcttgttgtattgctcggtattgtacttggctgcgtttggttatccacatttgtggtggacgacacgtcgaggtgtggataactcggcaagctagaaccacataccccgtttttcctggtgcatgaagcgttgatagtccacagtggtatgcaccccgcgtcaacccggcgcgggggccaaccactcacatacgcatggggaaggtgcgaagccactgcgcagcttcccctccttaccgaaaggaacgccaatgaatacccctatccccgtcatcgtcgacgggcaggccggcatctttgcgcacagcaaggctcgtgtggccacgctgaacgccaaggcgaaagaacggctatgcctcatggacgcacgcatccgcgccctcatggctgagcccgaagaaggcgcagccactgcggaatacgcagtcgtactcgttgcggctacaggctttgcggcggtgctggtcgccatcctgaagtcggatgccatcaagacgttgctgaccaacatcatcaaacaggctctgaaagtcgggtgacagccatgaagaccatgagatgccggtggaggctcgccagactgccgccagacctatgcacgggatcggccaccgccgaattcgcgatcgtattgcccagcgttatcgccatcgccgggctgatactggcaatgggacgtgtggtcatcgtttccatggactgccaaggtgccgcgacggcggctgcacgcgagtttgtggttaccggtgacgaatcatccgcgcgcagcatagctgcggacgttgcagggggagatccccgcgtcagcattgcccacaacggccaatcgacgagcgtgatggtcgaatgttcggtactgcccggcccactggatgtcactccaacgcgggtcaccggcaacgctacggcgataagccaataactggtcggctgctggctgggcggccgcaatagaaaggaactgcggtgcagggaatgcgttatgaggagggatcgggcacgatggccggagccatgctggttatggcggtgggcattgcgctcgcggtggcggcaagtgtgggcaacctcatgatctgccagaatcgagcgcgttccctcgccgatctcatcgcctttgacgccgcgtatgcgctgtggcatgtggatatcggtgatccatgcgcgcttgctgcaaacatggctgaagcgaatggcgtcacgctgggctcctgctccgtgcgggatgaagacgtgttggtaaccatcaaggtggaaaccatggttccggtggcatcatccgtggagcggatggctcgggccggaccggtgaattgtacggaaggagacaattatcacaataatggaccgtaagcactgatgctctggcgggcttctggacctttggttaaggtgagagcatgagcgagagtgaacgcacagaacgccgtcgcgtggtggccatggtgggcaatcccacttccgataagggccgtggtgccaaggtggatgcgcgagtattgggactgctggaggacgccggccgtgcccataacttcgacgtcatcgacatcaccggcgtaagtttcgacgattccctgaaccaggcgcgtgaacgcgcgcacgagtacgactatctggtggtggtcggcggcgacggcatgatcgcactcggtgccaatgccgtgggttgcggcggtaagccgctgggcatcgtggccatgggctcgggcaacgatttcgctcggggacttaagctgccggtcaatcgcatcgaaaccgcagtggaaggtatcgtcggcgctatcgtgcgcggatcacacattgatgtggacatgggacgcgtgacctctttggatggtggctatgccgtgaacccatccaccggcggggaatacgagtaccgggagaacaagtctgccgagcacccgattgaccggtactatgcgggcatgctgtcctgtggtcttgacgcaagtatcaacgaccgtgcgaatcattcgcatctgccgaccggcaccatgcgctattttgcggcggtgctggtggagctgacgcatatgaagcgttatgggtaccacgtcaaggccacgctggcggacggtaccacggatgaacgagacatcatcacgccgttgctgacgattgcgaattcgcgtcatatcggtggcggcatcgaggtctcaccgtactcctgcttctccgacgggctgttggacctggtgtggatgaatcatgtgccgaacttcggcgaatgtgcggtggccatctcgaacgcctataacggcaagctgctcgcctcaaaggtgttcgggtggaagcgcatacgcgagatcgaagtcacgcgagccgcagaaggcgacgagccaccggtgctgatggcggacggcgaatacatcgggcatctgccattcagggtagtggccgaggactgcgcgctacgcgtgctggtaccgccggccgtagccgcccgtgaggtggactcccgacaggaagtgctcgacgccatcgcccgagacggtcgcgaccccgtaaccggccagttcgcctgacctgattatattggctcccctcattaggctgagccgtaaagcaaacagcccagtgggatgtttgtaggcgagggttcgacgatagtcgaaccagaagaaagtcagccgtaggctgtccgcaattgcggacgagctggccgcgaagcggactgaggggagtgcgggagagcggtaccagagccaatggccgtcagacctcagacgacatagctttcgatatgcagcgtctgcgccatgacctctttgatggttcggtcgctgatgttcggatgcgagcgaaccagcgagataagccccacgattagcgtgaagaatgtctcatggacattggtgattggcagaccatgcatctgctcgaaatcacgtacggtggtctgggcaatgtagtcggcaatacggtccgccgcgcggtcaatgaacttgatatacagttcggcgttgccatcttggatcatacggtttgagaaggggctctcgtcggcgattagggaacggagcacatgcacgatgtcgtctaatgccttgttcacgttgcctgtttcgcgcgcttggttccactgcttcaacgtggtgaggatttcgtcgatgacgtcatcgagtactgcgtcggctacggcttccttgtcttcgaagtagtggtagaacagcgaacgcgtcataccgacttcgcttgcgatgtcggaaacggtgattttggagaagcctttttccagacacaccttgcgcgcggcttgcacgatggcgtcgcgccgggcatcgccacgggtggggcgtttctcgtcgaggatatcgctcatgggtacctcctgactacaaccgttattgacactatgttaatacaaagaaagcggttaataacaataaaaatgcggtaaccgttgtcagatgaatgtcgttggaatataaagagttttcccgattcggcagctatgagcccggtttatcttgactttttatcggttaattctgagggcaaaggtaggttagtagctatggcacttgcactgtatcgtcgctatcgtccggacaccttcgaaggggtcatcggccaggaccaagtcacggtcccgctgatgcgcgccttggacgaaggcaagcttacgcatgcctatctgttctcagggccgcgaggatgcggtaaaaccagctccgcgcgtatcctggcccgttgcgtcaactgtgccaaagggccgacttcccacccctgcggcgaatgcgaaagctgcaaggacctggccaccggcggtccgggttccatcgacgtggtcgaaatcgatgcggcctcgcacaacggtgtggatgatgctcgagaattgcgagaacgcgctggtttcgcccctgcgcgcgaccgctataagattttcattctcgatgaggcccatatggtcacgcagcagggcttcaatgcgctgcttaaaatcgttgaagagccgcctgaacatgtgatgttcatcttcgccaccaccgaaccagacaaggtgatcggcaccatccgttcgcgcacccaccactatccgttccgtctggtgccgcaggaagtcatgggtccctacctggagacgatctgcgacaaggaaggcatcaagcccgagcccggtgtgctgaaactggcgatgcgcgccggtggcggctccatgcgagataccctgtctgtgcttgaccagctgatggttggttcggtcgaaggcgttatcacccatgatgccgctgtagccctgctcggcttcacgccggaggcgctgatcggtgaggcagtggatgcggtaatcaatcacaacggcgaagccctgtacggcgttatccagaaagtcgtggtcggcggattcgatccgagacgattcgtcgaagacctgctggctcgtgtgcgtgatctgctggtgcttacgttggccggggaccgtgcggaatccgtgctgtccgacacggctgaggccgaggatatggacgatctgcaccgccaagccaaggcgctgggactgggcgcactgaccgccatggcagacatcatcaacactacgttgggtgccatgaccggagccatttctccgcgtatgcgcttggaactgctggccgcacgattgttggccggcagtgaatcaggctttgcaacagccgctcccgcgccagcttcttctggcatgccgcctgcggctgcttcttcgacttcgactacgtcagccgcttccggtacgggtgccagtggttttgccggcgcatcgcgaggcgggtttgccggagcctcacatggtggattctccggtgctgcacgcaaccagcaagcagccgcgcctcagagcaccgcttcccatgaatccgctgtgggagacaatggccctgtcagcagcccagtcagcgaccggcccgcgggctctccgtctgcgcaacctgccgcagcaactgctgctgccaatgcctggggtgctcccgccacgtcgccggccgtcccggcccaaccggtgacctcgcctgcggcatcggataatcggtccatcgacgagaagtgggatgcagccgtcgccgctttgccggaaaccattcgtgaatatgtgtcacgagacaaggtgccgaccgtaaaattcggtcccaaccgtaagagtctgccttgcctgtcgatgacgttcgacaagtcgctgagccagcacgctttcgccttggccgtggacaacagcggtaagaaggcggcgtccgtggtgttggatgccgtgcgcaacgagttcggtgccaatgcggttattgcaccttctgcggtcgcggcgaatggcgagcgagtcgaatccgtcaaacgtatgagcccggagcaattggccaaggtcaagcagcagattgccatggccaaggccggattggccgcgtcgagtttgggcgcgggtctgggcattcatatggggagcgagccgaaagctccgaagccgactgcaacaggccaagccgaggatacggacgacagccatcgagccggccaatccagtgcatccacggcggcgaagagctggagtgacgatgacccttgggccaagccggccgtaagcaacgcttcaccgcaatctgcagacgggttcgcacctaacgagcccgctgctgcgcctgcgcccgaagagcatcacaagaagcatgttgcggttccggacatcagtgatggtgttgatccgtgggccgctccggctgctcctgttgcacccgctgcgtccgttgcgtccgctggacccactggacagtccacggggcagccagccaccgcagctcccgctacggcagttgccggcgcaagcgatgatccatggaatcagccgcaatctcaggctacggcctcgctggcactgcaaccggtcgaagccgacccgtggaaccagccatatcagcagtctcctcacgatgatccgtggaatcagccgcaggggaaccatgctcaggcggctccgcagccaggagacgacccgtggaatcagccgcagtcccagactccggcttcttcggttcctcagacagtgtcgggcaatatgtcgggcaatatgtcgggcgatgacccgtggaaccagccccaatcggttccgcagccggctgccggcgatgacccgtggaatcaaccgcagcccgcacagccgacgccgaatgccgacccgtggaatagccagccgcagccgcaaccgcaagtcgcggccgaggacgacgaatactcgatgaacgaccagtcgctcggcgaggcgacggccatgaatcttgacgatctgaaaaagctattcgaggtcaaaaaagtcgagcaattcgcggcagatgatccgaagaaccccaagaacatccagcctgccaagaagcactcggatgaataatgaggacgaataacgaggaatacccatggcacttgcttatgacggcgcaatacagcgactgatcgacgctttcgggcggctgcccggcatcgggccgaagggcgcgcagcgtatcgccttctacatgctgtccgcgcccgaagatgaagcgcgcgatttggccgaggccatcgaggaggtcaaggccaagatccgcttctgtgatatttgcggcaacgtgtgcgaatccagcccctgcccggtatgcgccgacccgagacgcgaccgttcggtgatctgcgtggttgaagagcccaaggacgtgatgagtatcgagcgcacgcgcgaataccgcggcctataccatgtgctcggcggcgcaatcaacccaatggccaacgttggccctgccgacctgcgtattcccagtctgctcaaacgcttagaaggcgatgaggtcaaggaagtcattatggcgctcgacccgaatattgaaggcgaggccaccaccagctacttgacccagctattgcgacccgtaggtgtcaaggtcacccgacttgccagcggcctgccggtgggctccgacttggagtacgccgacgaaatcacgctgggcagggcgctggccggtcggcgtgaggcctaggccagcgtatcattggcgctttcgcccttgcggcgcatccacggccagaatgcgccgtggcggatgatgcgcgcggccttgtgccgtcgtgccaaccagataatgaacagtcctgccgccagtatgcccaggccaacaccaagggcgatattgcgcgcgtcaagcacgtcattcggctcgggggccggcatcggaattgccacgcggtgcccggagataagcagtcgatgcgtgttcacgccgtatggcgtacaggtcatcaaggtgacacggtcctcacccggcacaatcttgagcttcgacgtgtcatccggcaaaatcaccgaaatgcggtccactttgtagcccaaagtttcgcccatgacaa

SEQ ID NO: 954 - DNA, 8883 bp, Unknown
  R117_24m  MAG No. k141_15797
catcttctcgttctgctcgttaatgccttggcccaaagagaccatgagcacaatcgagcagcagccgacgataacgcccagcacggtcagaatcgtacgggatttacgccgccataggttttgtctgcagagccgcagtatgtcgccgaatcgcatggtcgggcctttcaggccttgtgggatgagccggctggtgcgactgatgaggctggggtgactggtgtgataggagcggtgtctgccgcagcaccatccgtcacgccggtatcggtcttatcatccttgccttcggaccaatcatcccagtcctcatcaatatcgttcttcttggccttctgcttgcgcctgcgacgcacgagcagcacaatcaccacgataatgaccacggcgatcacgacgatgaccacatacaccagcaccggcaatccctgattggcgttctggtccatgttcggatcggccatgccggaatcatccatcggctgcatatcggttacgggtatggtgagcgggaattccttggtcttggtctgtccgtcggaatcctcgtacgtgactttgagcgtggtcttcagctcgcctgacgcgtgcggtgtgaaggcgtaaccaatcgtgccggtggcgccggaagccacattgcccacgtactgggttttcatcgtggcatcgaaaccttcgccctccatcgtggcctcgacgttggcgatatcgcctttgcccttgttcacatattccatcgtgaccgtgttttcctggccggcgatcacctggtcgggcactacgggatcactgatttcgaaccggtcaggctgactgatcggcacggaaatcttgacgtcggactggcttgaggagcgggcgctggcgtccacatactcgtatcggaagttcacggtcacggactgggcaccgcttttcgcggaggcgagcgcctgcatcggcacgctttgcgtcatggcgtaaccggcccacagcgcgtcgacgtagaacgtgttcgtgcctcccgcgatggcgaagctctcgccgccgtccacggtgacgaccatgttcgtcaccgccacctgccccttgttctggaaggtgaagtcgagattgaatttggatccggcggccacggaatcacctccatacgcgaagttggtgatgatgatgttgggcaccggtccggcgatcggcgcggaatcgccgtcgcttccctgagacgtactgttcgtgccgcttgtgccgtctgtgccgtcgaccgcgtacgcctgatgcggaagggagatgacggcaagtgccagtgacagcgtggagagcaacgcgacgatgatggcgatggtgtggtgggagaggtgcttcatcggtcagttccttgggttctatgggcggacggcgtggacggtgtagttggtgtggttggggcggacggcgtggacggaacagttgggcgggaaaggtcggtgttgagccgatcgctggtgatgcggccatcgagcaaggtgacaatgcggtcggcgtatgaggccatctgcggatcgtgtgtgaccagcacgatggtctggttgaagtcatgggcgaatgcgcagatcatcgtcatgacctcggttttggttttggagtcaaggttgccggtcggctcatcggcgaacaccacctcgggcttggtcacaaacgcccgggcgatgccgacgcgctgctgttggccgcccgacatctggcgcgggtaatggctgagacgatggccgagcccgactcgtttgagtacgccacgcgccgcgcgctcgcgttgctccttgggcactccgcggaacatcaacggcatcgccacgttttccagcgcggtcagattgggcaacaggttgtacgactggaatacgaagccgagatgcttctggcggaaggccgccagctcacgctcgtcgagcctgctgacgggtacgccgccgattctcacgccgccgcgcgtcggtttttccatgccggccaactggttgagcagcgtggatttgccggagccggattcgccgaaaatgcagcagatctggccttgcgggatactgagattgacacggtcaagcgccaccaccgtctcatcctcgacggggtattccttgcgtaggtttcttacctcgatgattgctcgcggcacgggcccttcttccttcgttcgtcgccattggcggacgcgcgatagctggttattatccagcacatctcaagtcagtatatagccgttatgcaggagccgcaccccttaagggtgttcccggatggcagtgataagcatataaccgctgatctcaaggtcgacagttcaggctccagacggacccagaccggcataatactcaaaagcccctggcccccacagacgatgagggaccaagggtttattgcatcgtgaccccggacgggctcgaaccgtcgaccttgagattagaagtcacatgctctatccagctgagctacggggccaaactcgtgtaagtctagccgtaggggtgtaaaacacctcggcgtaacgtcggcttgcaccggtaccatcggcgatatggggacaacggagagcaacgtagatcacgccgcatcgggccagaccgtcgcaggcgatagtggtgagctcactttcacatacgcacagggtcgttttgccagtgaaggcagggattgggaaagcccggttgtgaccaacatggctgcatccgtctctgccgatgccggcaatgcccccgccggcagcatcatcaacaccggcgccaacaacactttgaccagcaccaccgaatcgtcgcttgccaccctgctgtccgaccaatgcccgttcgttatcaaggccaccattttcgagggcaatggcaaaaacgccattcgcgaacgtcacacattcaccggctcggtgctgcgccagctcgaccaagccagcgccctgctgaacggcatcaacgaatccggccaacacccggccatagccctgcgcgaagcattggtcaacgcactggaacatcgcgattacacgtactccggccccacactgatcaatatcttcgattcccgcctggaaatcgtctcgctcggcggcctgaccgatggtttggaaatcaacgatctgctcaacggcgtatgccagccacgcaccccgcgtttggctgaattgttcgccgatctgggcctctgcgagaactgcggtaccggtattcaacgcattatggacgcctacgcgcagagcgcggtcagtccgcaactgcgcgtaggccccacttcggtggcgatggtgctgcccatcccggtctcggccgaggccgcatccttgcatcggaccgataccgatgcttccgccgcgcccagcaccactgacgaagcgcagcgcgccaaaatgtattcattccccacgattcagcgcatgacggataacgccgcagatgctttggccggcgcacgcatcatcggctgcgcgccattgcagacgctgattctcggcagtggattcggcgagcgcccggacggtgacgaccaggtcagtacccgcccgctcgatacagcgacgctggaaccgtcgcctcaaacgttggagcagttcacgctcaatttcctcgcgttccgcggcgtgaagctcagccgtaaaaccatgcagaaagcgcttggcctgaacaaggatcagatgacgcagctcttggaccagctggagttgagcggcaagatcgaacgtcatacgcacgccaagtccactacgtattcgctggcacatgcctcaggacggtaacgaccagagcggcaacaaagcggcaacgaccagagcaatacagcccaaggcacgataaagcagcagctcagttctcgaatacgcgatcgcgaatcatgcgaccggattcgtcgagcgcggtggagaaacggccgtagtcggacagaatcacgcccatgtacagcatgtccacgagcgcggtatcggccacgcgcgagaaaatcgcattgccatagatcgtgtgcgagtcacgacccgtcagcaacgtcacgtcggcccagctggccagcggcgcgccgatggcattggttatggcgatggttttcgcgccatgcgatttcgccaatcgcaacgctttgaccgtatccgccgaactgcccgaatgggagaaggcgacggccacagcgccgtggggcaggtgcccggcaccgatctgctgcaggtaagcgtcggtattgagacggcatgtcagtcccagatagccgagcttggtgaacagatccatcgccggtgtcaacgagttctccacgccgaaaatatcgatgaactccgattcggcgagtagggcgaccgccttgcgataggccttggggtccaacgcactgtgcagctcatcgatcagcgccttcgcgccataggccgctttgccgggaatctcatcttcgccatcccacggattcagatcgaatccagccaacggattgaaggtcactttgtgctcggcggccggatggcgcaacacgtaccgcagttcacggtaaccgccgaaaccgagcttgcgggcgaaacgaatcaccgtcggctggctgacgtgggcgatgtcggccatctggccgacggtcaggtcggccgcctcctcgatatgatcccgaatatactgggccacggcgcgctccgccggacgcagcgacggatacacgtggtcgatgcgctcgcgtattcccaccgaggattgcacagccgcgctcctagtcgtccgtattttccattcctgtttcgagggtaccggctgtataccggcgaacagtcgacttggattgaccgcaacatgaacggtgagcgaactcttccgtttacctttccgctccattccctctacaatcaaaaccatggtgcggattagcgtgggaagccccacccatcacacaagcgggcggctgtacggcgtgttcttcgaggacatcaaccatggtgcggatggcgggctgaacgccaacatggtgaacaactacagttttgacggcgtctatctcgaccatcacacgtggcgtatggccggcgccgaacgatggtgtacacaggccgattccctgcgtttctgggatttcatcaactgttccgccgccagcctcggcagtgagatacgcgggattcacggccagcgggtgaccaccgactgccccgccccgccaattcacgcacatagccgatacgctcgcatcacgtccgatgttccttccgaaaccggccctgcatatctggaaaacctcggctataacggaggcggcgacaacgggggcgagcccgcgttctccatcgccgccgaccacacctattccgtcagtctcgcggtacgtccggttcatgggcgggccaagctgtccgtcggcgtggtcgataggtacggtctgccgctcaccagcaccactcgattgtcgtatatcgtggacgcagatccgcttgacgatacggaagagaccggtctgaggcaggacgatggtgccaatgcgcaggattccggcgtttcgatcagtccggattcgtcggatggtgccatcgccatcggccgtgacggctggtaccggttcaacgccgacgtaaccggcctgaacaccgattacggcaagctgcgtatcaccattgacgccggcgaacgcaccacgttcgatctggatctggtgcagttcatggatgcggactattggggcgcgggcgacccgaaatggcgttacggcaagctgcgccgcgatctggtggaaaccattcaggcgttgcatccagcgtttctgcgattccccggcggctgcatcgtcgaaggtgtgacgcccggcaatgaatatcgctggaaggataccgtcggctccctggccgcgcgacgccaacagtattcgatgtggtcgttcaagatgccggatggttccagctattcgcagagctatcagatcggcttctacgagtatttctgcctgtgcgaggacctcaaggccaagccgctgcccactctgttcgccggcatcgcatgccagtcgcccggccgcgatccgcgccacatggatatcaattcggccactttccgcaacaatgtgattcaggattacctggacctcatcgaattcgcgaatggcgatccggagtccagctcgtgggccgcggtccggcgtgatatgggccatccagaaccgttcggcctggacatgatcggcgtgggcaacgaaaacttcggggctgactacgtggccaagtttgacatgatcagcgaggccattcacgaacgatacccggatatgctgtgtgtgatgagcgccggactgttccccttccagccgacgatgaaacgcagctgggaccatgcgcgagcgttggccgcaaccgattccggggcacatgattccgccaccggtgacgcgattatcgtcgacgaacattcttaccactcccccgaatggtttgcataccaagcgtcacgattcgacgcttacccgcgttgcggcgccggcgtctatttcggcgaatattcagccaacggctattttgccggccaaccgcagaccgaacagggcgcgaacacgtggaagtcggcactcggcgaggccgcgttcctgaccggttgcgagcgcaattccgacgtggtgcgcatgatctcctatgcaccgctgctcgcgcatatcccggctaaggggtgggcgcagaatcttatcgaactcaatccggcgcatgtgaaccccacggtgaattatgaggtggagcggctgttttccacgtatctgggcgacacgacatatgccgtgtccatcgagcagaccgcgtcacgccccgccaaacatctgtatgtcagtgccaccgggcatgacggggatgacgcctgccgttacatcaaaatcgtcaatacctccgattccccggtggatgtgacgttggaaatcgcgcgcggactggccgggctgggcgcctcgccatcgcgaccggtgcgtttggaggtgacgacgttaagcgccagtccgacggcgaaaaccactatcggataccgcggcgaggcttcgggggcgattgtgccggaacgtcgggcttacacattgccgtcgccgtcttcattgctggcgatgaagatcaagccgtacagcgtcacgctggtggcttcgcgctgattgacatcggccattaggccgattcctttgccgttagaatcaccctcaaggatgagggggaatcgtgcagattcagggaataataggggctatcccccatagcgaatacaagcacgggagggcaggatggaaaccacggcggccagaagaccgccggccaacgatgaaggagtatgcggtatgtttatcaatctgttccgcaggcagcgccctgcgctcgcccggctggcccgcaactccaacgcctatcgtcagccgatggttgcggccgtatcatcgtccgcagtcggagtatccagcatcacctctgcatccaccacagccaacacagacggcgtatccggcgtatccacgctggatgccaccatcggccgcattcatgacatcccgcagtcggccatgagccgactgaccggctcccccaccgtatacgcgcggtagaccaccccagtcggcttcgccgacagcccccgtcagcggggtggagatggctgggctcagagactcggctcgatgatccagctcaaggtcagcaatacggccaaaaacagaacgttgacggcggagtagacggccagataccggcctttcttgtgcgggtattggcgcacgacgttcttgtaagaaataagcgaggccatcgaggcgatgagcgtacccatgccgcccaaattggtgccaatgatcagatcgcgccattggtcgcagaagccggaaagcagaatcgtggtgggcacattgctgatgacctggctggagccgaccgccacctccagcggatggccgccgaccagcgagcgcgccagttcgtagaattcgggcacgcgcttcatgttgccgatgaagatgaagaacatgcagaaggtgagcggcagtccccaatccacgtatttgaatacgcgccgatcggtgaacaggaacacgacgaccacgatcacgcacatcacccacaggggaatcacgtcggagacggccagtaggcagacgatgaacagcagcgagtagacgatggtgcgccagccgccataaccggcgccgtagccggtgatacgaatctcgtcgggctggtgtttgttgcgctcgggagccagcacgccggtttcgaggtcgcccaggtcgccgaccggtttgccgccaaacaccacggaaatcacgatgaccagcaacacggccgccgtgccggaatacggtgccatgatgccgaggaattccatggtcggcatgccggtcagggctttgagatacaggttgtgcgcgttgccgatcggggtgagcatactgcccacgttcgcgccaatggtcatcagcgtgaccacgaggatggtcttatcctcttgcccagccatgatgagcacggccaccgcgaacggcacaaacgtgaccagcgcaacgtcattggtgatgaacatcgcggaaaagaacgtcaaagcgacaagcgtaatgaccagtccgcgcatggtgctgaccttctccagcaatcgcgaaccgatgatgcggaacacgccgatacgctggaatccgcacaccacaatcatcaggcagatgagctggctgatggtgctggcgtgaatgtagcttttgtaatcggcgtccggcggcacaatgaaacacgaaatcagggcgagtattgcggcgacgatgagaatcgtctcatttttggctacattgatcagccagcgtcgcatccattcctccgtgaataacccaatatcgcagccgttctattctacgcgcagaccggcataaggtacgtagtcgcgttgcgctggcggacatgagtttttggaccggtgccgc

SEQ ID NO: 955 - DNA, 35508 bp, Unknown
  R117_24m  MAG No. k141_15868
agttcgccttccaactgtgcgatggagcgaaccgcaagatcacgacttacggcagtgatgtcaacaatcatcgaatcaacccgtctcacgccttatcggcgccggcatggccgagcacgtgcttcagcgggttcggcacttcggcgtccggacggcgcaggtacaacggttcgaccggcgtatcgggattacggttggcaaccagttccgcatcagtggcaaagatagcgagaccttgctccccttggtccaatacggattcatcggtgatgtcgccaagctgctcgattgcacccagcgcatccgcatatttgcgggccccatgacccacaacatccacgaccacatccacattgctgtcttctggcataagtccgtcgcggtacgtatgaacggcatcattcacgcgctgcgcgatggatgcagggtaatcgatatccatgtcaatcagagccgtcgccacggtttcgccatcgggatcgccaacgagcgggtccgagtacaacgcaaaatagagttgcttgcggcgtgcgtcgtttacggcaagagtgagcacatggcatttatgagtatcgccgagagtgccggctttgccacggcgaatgagattccattgcacctgaggctcaagaacattatggccgataagcgtcgctcccgttgcgaaagccagtgccttggccgtaacgataccggcacgcagaccagtaaagggggctggaccggtacccacaatgactgttgcaatgtcagatgctgggaacccggcttcctcgaccgcgcgcgcgatattgacctgcagtttctccacatgggtgcgcgaatcggtctctacaatgggctcgcgccccacaatgccgaccgtcgagccgaatgaggtgtcaatcaccaacgtgcaacccatgaatcctcctagtcgtaaagcctctagagagtgtacatcgaggagtctataggcgcatggcttactgcagatcgaacgcggcccatcgcttgccgactgggacgaatgcgacggtacgagtgccgttgctggtgagttcgccgtctgatccagcggatgcggcatcggaggaatcgagaggtcgatcgatatggatttcaagtcgttctggcgccaaggcggtggccatttgttcgccccactccataagcaccaccgtgttctcgccggggtcttcaagttcttcgtccaatcccagcgattccagctcgtccaacaaacgcccgatggcgtcctgccccggcgcataggctgagccgcccagacggtaggcatccacatgcaccagatgagacggagtgccgtcggcgaaatgcccgtcgagttcgcgggcaatggtgaatgtaggagacacgatgggttcggtaatgcccagccccgccccgaagccctgggcgaatgtggttttaccggcaccaagagggcctgagagcagcaatacatcgccgccgtgtaccattccggccacacgacggccgagctcctgcatggcctcgctggtgggagccgcaatagtgtgttcgctcataaatacccctttatcgacttttaccgacctttatgactgatgtcttcaatgcagcgttccagcgcatataccgggtcgccaccgtttgttttgctttgctcatccgcccaggcgagcatacggatgcaatgcgcgagtcctgccgaagtccagccgccaagttggcgcatcgcattcttcagcacccacggattggttttcgcttcggcctgggaaatcgtgccggcccgtaccgccgaggctttggcaatggtacggagcttcatggccaacgcgccgatcagcgcgatgggatcggtcccttgttccacagctgcacgcatcatgacgatggcttctgcggttttgccttccacggccttgtctgccacggcaaaaccggtgacctgcggattggcggtcaaatactggttgacacggtcgaggcccatcggattatcgtcaaagtcgaaacacagttgctcgcacatggcggcgagttcgccggttttgccgccgagtacggataccagctgctgtgcggccatcggttcgactctacgaccacgtttctcgaattctccgagcacgaaattgagctgtgcatccggtttcttcaaatccggcacgtcctctttgcgagcgccggctttcaccagttggtcgatgattttgcgccctttgacgccgccctcgtgctggcagatcaccacgctggagccgttcggatccttggcggcctgcttggtgtacgccaccagagcttcggcgagcttgtcgtcggcattctgcaggttgacgagtttgaccacggcaacgtcggaaagcaacgatgggctgacggcttcatcgaaggcatactggtcggccgatgcggcgtcgagttcgatgaggtcggcgtcgggccgcgcctccaacgcctgcgcgcacagtgccttggtgcgcgcgtcgttcaaatacgagtcgcctccgggcaccacggttaccggtgcattcgctgctgttttcgtcatgcccccatctcgccacacaggttggacaatgacctgccggcatcacgattttgccggtgccgtcaagatagtggtattcggctgggattgcgatggttgctgcaccgaataccgcattggctattcggcttgccgccgcgtaaagaggcgtctcgtctcctcacaccagagactgaggcggacgcgccaagcggaaccgaagcgcacgccagacattccggcctcataacgacggacatgctggaggcaacggctgacgaacaccagtagcatgccgataccgatttccgccgccacaatcagcacggcgcccgtaacgccgtctttccatgggatgacggccatcgtgctgccgcccagccacaacgccacccgttccatcaccagcgtgccccatgacgatatccacgcgaatacgccggccagccatggcgtgcaccatgcgcacgtcagtgccatcaatcccgccatcgtggccaatcccacgaacggtgacaccagcaggttcgccggcacggacagcaacggcaattccggttccatcaacacctgaatcggcagggtgaacaattgcgcggccacggtcatcgccatcatctcggcgatgctgtgcggcatcgctcgctcaaagacaccggccagccgccccgcaaacagcacgatacccagtacggcggccgaagacaaggcgaatccgtagctggccgacatatccgggttcaccgccaatacaccgattatcgtccagcacagggcgctcaacgcttgcgtacgccgtcccatcgcatacgccaacgcacctatcaatcccatgatgaacgcgcgggtgaccgaatcactggggaacatcgccaatgccagcagcgcatatactccagagaccagcaacgccgtcagccgccgatcaagcagcatccacatgcataaccgacgcaccagtcctgccaccagtacgaagtggccgccggatacggccatgaggtgcatgatgccggaccggcggaactgattttccaacgtttgcgcatacgtgctgttgaccggcatcggaccggcatcgccgccgatataatcctggccaagcacacccatcgtcaatcccggcaccaacacacgcccctgatcggacaattgtccggtcacggtgaaaaacgcctcctgcatatgtgcgatcgcggcgagatgccacggcggagcccgcacctgcgctaccggctgttttccttccaagagcagccatagcggtatgcgtccatatcgcgcttgctgcaatacgcccgtcaacagatagaccgcgcctcgacgcaactgcccacaatacgattcatcggcgtatacgcgcacggcgaccgtggaacgtacgtccgcgccatccacagtgatgccgctcagccgtatgtccgtctgacaatcgtatgtgcgttggtccgaagcgatcacgggcgtcgtcaccgtggccatgacttcgtggtatgaactggattggcgagcttgtgcggaggcaggatcatgccaggcaatggtgtccgacgcgattgccgtcatactgccgatgcacgccaccgcgacgcatacggtcaatgttcccgtccacctgatccgcaggcggaaagacaccacgatcatcgccgccacagcggcacatgacgccactgttataggcaatattcgtgtgacaggccattccatgccgattatggtggcgtcaatgccagctccggcatcggcctttgcctgaccggtgccgagtccatcagacatcctccatgcgaataatgcgtgcgctcccagactcgccgcccacatcactatggcgatcggcagcatcctccaatcgcggctcccctgctcgcgcagtatccgatccctgctcatccgaccgtcacctgccctcgcatggtctccaacgtcttggagccgatgcctttgacatccagcagctgatcgactgatgcatacccgccaatcgccgtgcgatgatcgatgatccgctgagcggtaaccggcccaatacctttgatggattgcaattcctcaacggtggccgtgttgaggttgatgagaccatgcgtggaagcgccggcatcgctgccgtccgtctgcatgtgcggagattgcgtggtatccgattcggggttcgctgtggcatcggaatgctccgactgctgcggatccgtgcgtttctcgtccgtggtgttctgcgatggcatcgtctgatctccagcggagccgcccgtggtctgcatggcggtcggttgagacagcatggccatattcatcgactgctggaccagcaatgccaagctgatgccaagggcgacgatcagcagcaatatcacggccaaggcatgcccaatggtgaacgacaatcgcggctgatcccgggtgagtctggctgattctccgacggcatcggcggaacgtacgccaatcagatccgataacgcacgtttgtcacgggtcgcctgccgcaggccgctctgcgccctttggggcgggtggccggccggacgaatccgtgcatggccgggaggcggcggaggcgtcgtgggccgttccactcgcggttggggcatggcttcgctctgcctgctgaatgcgcgcaaacggttggcggcatggtctgcgcgatggttatgagaaacgcccatgcatccacgctgatggattcatgggcgtttgtccagctgaaacggggtatgtggttctagcttatgaagttatccacaattgaggtggggcggttgacgctcccctcagtctcgcgacgcgagcggctcccctcaaagaggggagcctaacccgcaacaagtcactccgcggggacgatggagacgatcttcggggccttgacgatcaccttgcgcggctccttgccgccgagacggtcggcgacggcggccagcgcctgccgttcgaggtcggccgggtcgatgtcgaccggcacttcgagcttggcgcgcaccttgcccttgatctgcaccacggcggtcacggtgtcgtggcccacgtagcgttcgtcggccaccggccacggctcggcggacagggactcggggtggcccagcttgctccacatctcctcgcagatgtgcggggcgatcggggcgagcatcaggaccaacggctccactgcggcacgcggcacggccttcagacctgtcagatggttgttgagcacgatgagcttggcaatggcggtgttcggacgcatgccttccatttccgcggtcacttcggcgatcgtgttgttgagcagtttcagtgtcttctcatcgggcgcgtcctcggtcacgtgggcctggccggtggtctcgtccaccacgttgcgccacagacgctgcaggaagcgcatgccgccgaccacgttgcgggtgttccacgggcgggattcgtccagcgggcccatgctcatctcgtacaggcggaaggtgtcggcgccatagttctcgtacatgtagtccggagtcacgatgttcttgagggacttgcccatcttgccgaattcgcggttggcgtgttcgccgttccaggtgaacgtcggctcgccggaggcgtcggccggcccttccacgacctcgtccgccggcacgtactggccgcggtcgtcggtgtaggcgtaggcctggatcatgccctggttgaacagcttgtggaacggctcggccgaatccacatagcccagatcgaagagcaccttgtgccagaaacgggagtagagcaggtggagcacagcgtgttcgacgccgccgatgtacaggtccacaccgccttcatcacccgagtacttgttgtggttcgggcccatccagtagtcgaactcgtccttctccaccatgtgcttggtgtcggtcgggtcgatgtaacgcatgtagtaccagcaggagccggcccagttcggcatggtgttggtgtcgcggtagtaggtcttcttgccgtcgcccaagtcgagctcgaccttgacccagtcctcgttgcggctcaacggtgcctcgggattggactcggcgtccatcggatcgaaggtgcgcggctcgtagtcgggcacgtcgggcaggttgattggcaatgcggaatccggcagcaggtgcggggtgccgtcttcgccgtacacgatcgggaagggctcgccccagtagcgctggcgggagaacagccagtcgcgcagacggtagcttacggtgcccttgcccacgccggcggattcgagccaggcgttgaccttggcgatggcgtcgtccacgcgcaagccgtcgagcgacagcgcgtcgcccttagcgtacgtggattcgacgtgggagttgatcacgatgccgtcatgggagacgaacggcgccttgccctcgtagttggccaagtcatcgccggattccggcagcggttcaacggtgtagatgaccggcagaccgaacttcacggcaaagtcgtaatcgcgctggtcgccaccaggcacggccatgatggcgccggtgccgtagtccatcagcacgtagtcggcggtgaacagcgggagcttcgcgccggtgatcgggttggtggcgtacaggccggtgaacagacctgtcttctcaccgccttcgtccacgcggtccttggcggtcttggcttcggcggcgagcctgtaggccttcaccgcctcgaccgggttggcatagccgcccttccagtcttcgggtacatcggccggccattcggcgggcacgttctccagcaggtgatgttccggggaaacaacggcgaacgtggtgccgaacagcgtgtcgggacgggtggtgtagatttccatgtccttgtcaccgtcggcagtggccacggtgaagtgcacggaggcaccatgggattcaccgatccagttgcgctgcatgagcttgaccttctcaggccaatcgatgccgtcgaggtcggcgatcagacggtggccgtacttggtgatgcgcatggaccactggcgtagctcacgctggaagaccgggaagttgccacgctcggacttgccttcggcggtgacctcctcgttggccagcacggtgcccagacccgggcaccagttgaccggggacttggagatgtaggccaggcggaagtcgttcaagatatcctgctgctcggcgtcagtgaggtcggaccactgcttgccatcggactcgtggcccggaatggccttttcgccggattcgaacttggccacgagctcggcgatcgggcgtgcggagcccttggagccggacgggttggtggcgtcctcgtcgtaccaggaatcgtagatgcgcgagaagatccattgggtccaacgcacgtagccagggtcgatggtggcgaacgtgcggcgtttgtcgaagctcaggcccatgcggtgcagctggcggctcatgttggcgatgttcgcctcggtggtcacgcgaggatgctggccggtctggactgcgtactgttccgcaggcaggccgaaggcgtcatagcccatggcgtgcaggacgttctcgcccttcatgcggtggtagcggctcaccacgtcggaggccaggtagcccagcgggtggcccacatgcagacccttgccggaggggtacgggaacatgtccatggcgaagtaggcggtgcgcccctcggcgttgcggcccttgccgtccttcaaatcgccgttgacgttggccgcccagaaggtgccttgctcatcccagatcttctgccacttgttttcgatgtcctgcgccagtgcggcgttgtagcggaagttgggctcttcggtttgcgtgctcttctcgttgtcactcataaatcagcaaggtagcctcgcaactggacacgtcgtcaatcgttattcagcatccgagacgatggctttggggtcaccgttcagcgaaaccatgagctttgtttggcttgtgaacgtatccttggcggccgtccagctgccatcctcaaccatatcttccaatgcttccgcgattttctgcgccaattggctggtgccttgactcacggcgatgccataactgacctcgcccttgtccgcaatcacgtccatatactggggcccgttggccgcttgaagaccggaaagcaccgccatatcggaggctatggcatccgccgaccctacttgcacggccgtgacgcactgcgcataactgctacgctcctgaatccgagcctgcgggtggttgccgcggaagatgccgactgtctcgtcacctttcactgcgcacaccgtgccgtcgcctacgtcgcccaccgaacctgcgtcattggtgaatcggccacgctcatccgacctgaccagcaaaccgacgctggtcgtgaggtatggtccggcaaaatcaacgatcgcgctggacccatcggtgataggccaagaggcgacgaccatgtcgacctgtccattgtccagcatggagcgccggttttcggggcgaacctgcttgaagacgatctgcttgttcgcatagccgagtttggcggccacgtatttggcgatggtgatgtcgaagccctggtatgtgccgtcatgccatgctcccaccgatggttcgtcggctgcgaccccaatggcgatggtgggtccctccggcgctccggagacggtggtgacttgaatttggccgcaaccggccagaccagataatggcaatatcacgccaaaggccgcggcgaatcctgccatcagccgggagcgaaatccgcgccgcatcgggcggcgggcgcggagcatgctacggctgacgaacgatgaccagtggtgcataaccgtcaaacgccttacttgaacatgcgcgaacgtgtgaggaaccaggcaaccgcaccggaaagcaccatggagatcacgatgatgagcaggaagccccaaggcttgtcggtgaacggcatgcccatcatgccgccgtcgaagttcatgccgtacatcgagaaaatcagcgtcgggatggacagggtgatggagatgatggtgaagatgcgcatcacgttgttcaggttgttggacacgatcgaggcgaaggcgtcggtcatgttcgcaagaacgccgctgtagatgttggccatctcgatggcctgcttgttttcggtgatgacgtcgtcgagcagatcctcatcgtccggatactgcttgatgcgctgcagggtggtgagtttctccatcacgatctcgttcgatttcagcgatgtggtgaagtacaccaaggtcttgctcagttccatgagcatcacgatctcgcggttctgcatggagtggcgcagcttcagttcaagcttgtcgctttcgcggtcgatgatgcgcaggtaacgcaggtacatcgtggcgttgcggtacaggatctgcaggatgaagcgcgaacgcatgaaggtgttgaagcctcggatcgtgccttccatgaatgggtggagcacgggcgtgtcctgcatgcagacggtgatgatgaggttttcggtgacgatgatcgacagcgggatggtctcgtaccagtcgcgtccgccacgctcttccacggtgggaatgtcgacgatgatcatcgtgtaatcgtcttcgacgtccacacgtgaacgttcctcgtcatccaaaggggcgcgcaggtcggccaggtcgatgccggtctgcgaggcgacggtggcgagctccacatcagtgggttcgctcaaacataaccaggagccgttttccggtttctcgatctgctccacctggccattgattgagctgaagattctcagcatgtcgcctcacccgccttccgcgctttcctactgttctatcgctgtacggttccaaaccgagattagtctagacccaccgttcgaatttgcgagcggggtttcgcatagcgaccgtcaccagacgattggctgccaacttggcatgtgcggtccgcgcagatcggtcggcccgttctcccagtcggcgctgtcggcgatggcgggagccttgttgtattcctccaactcccacaggggctgttcggcggggatgccgttgacgctgtggcgcactttgagccggcaccaacaggcgttgcgcatgccgccgagtgcgttcatgccgtccgggtcgagttcgagcaggttggagatggtggcggtaatccatgagccatgggtgacgagcatcagcgtggtgggcatgctgtctgaataggcggagtcggtgaccagtgcgcgcacggcatcggcacctcgctggcccacggcggcacggctttccacaccatgcttggtttcgcccccagtgtgctgtttccaagaggcgtagtcgtcggctgccacggctttgatttcggcgcgggtcatgccttcccactcgccgaagctgcgttcacgcagtcgttggtcacaggtgaccggcaatcccaaaatatcggcgaaggcgtgtgcggtctgttgggcacggaacaggtcggaggtcatcaccaccatgcgccggccggcggcgggggcctcctcgaactgtcgcgtatcagtgcgttcggcggcgtcaggaccaggctgggcgatggcttcgggatgctcggcaagccggttcaccttggcccagtagtaccgtgaagcgagcgcgaatccggtctggtcgacctgccattggcctacgatgtcgagcggcacatcgatctggccttgcaagcgatgttcgagattgtattgcgtacggccatggcgcagcatcatcacttcatcgatcatcggttttcgccacctcgttctcttgcggttttttcatactcatctcagcacaacccctagaatggcggcatggagatttctgagtcgacttgggcgttcatcgccaaacaccgccgtgaagatgtgcgtgatgtggccttgcacgccaggcatgatggcgacgtggatgtgccgttcgcgctggagcagattgccggctggcagcgcgcttcactcaagctacctgactgggcgtcccatgatgggctgattttcccgccgcaagtcccaatggaacaatgttccagccagttcacggctcaatacaaagcccggttagcacagcgattgttggacggggaagcagtcgacgacgccgacgattccccgacatccctagtcgatctgaccggcggtttcggcgtcgacttttcttacatgtcccgagtgtttgaccatgccatatatgtggaacaacaatccattttatgtggtatcgctcgccataatttcccgatactcggccttggccacgccgaagtcatcaatgatgattcaacagcagtgcttgatacgcttggccgagtctccatgatcttcctcgatccggcccgccgtgacgatcatggctcgcgtacctacgcgattgccgattgcacgccggatgtgctgaccctgaaggatacgctgctggccaaggcaccgacggtcatggtcaagctctcccccatgctcgactggcataagaccgtcgccgatttcgccggcgcggtgcatgaggtgcatatcgtctccaccgggaatgaatgcaaggaattgttgttggtgttggggcgcggccgttgcgcctcaccgctcgtggtatgcgtcaatgacgggcaggtgctgtcgtacaaggccggcgataacagcgacaatcacacccctatcagcgattctgccttggttgcacgcaatacctgtaataccgaggatttcccggctgaggaaagcgcgaacggcttcgattcctcgcattggaagtacctttacgaacccaacgcctcaatcatgaaggccgggtgctttgatgttctcgaacagcgcttcgtcgtgcatcacatcagcccgaatagccacctgttcgtggcggccgaacctattgccgattttccaggcagatcattcgtcatcgaatccatcgtcaccatgaacaagaaagaactgaagcagctattggccggtctcacgcacgccaacatcgccgtacgcaattttcccctatccgtggcccagctgcgcaaaaaactcaaactcaaggacggcggcaacacctacctcttcgccaccaccgacctcaaaggccatcacctagtactgcgcactgaaaagcgaaaaagtggctccctctgacgaggaagccaccaatacgtcagctaatcagtccttggcgatggtcttgccggcggtcggaccggaggcaaggttctggatctcggtgacttcaagaaccggaatcacggccggcttcttggtgcccttttcctcggcgatcttgacctgctcgttgtagatgtcgtcgtcaacgtgcagcaccacgttgccgcggaagcggtagccctgcttcttctcgaggttggcgaaggcgatgaccagcggagagccgttcttgaggttctcgtagtgctggccggcggtgcgctcgtggtaggcgatgtgcgtgtcgtccagcacgaacagggacatcttcgggccgaggtccagttcgccgtccttggagacggtggtgatccaaccgaggttgttcttgatgaattccttgatttccggagtaatgactgccatgtcgaatcctttcatgattgctatggacaacgtatttttactctttccagagtaccggtttcgagcgcgactagcccggatgttcgctgtgagtaacctcaccttcgcacagctttcatccggttcttacctgtttggcgatgccgcgccccggccgcgcaccagccacacacctgtcacacacccgacgcccatcgaccggtcgattttggccggtagttcccgtaatctgtgagccgagagagccacaagttttcctaactgtcctgaggtgcaccatgggtttggtcgaacgtttcagcaagctgcgcagccgctggtcccgcagctttcccccgaatctcgcccgactcatgttgctgggctgcgccgcattatggggtggcagttatctgctcgccaaattcgccatggaggcgattccgccccaatggctgatgggtctgcgcatgataggcgcctgcctgtgcatgctggccttgttccataagcacatcgtgccgtatctgacgccgaagatcattgtgccggcgctcgtggtgggtctgacctactggggcacgatggtcacccagaccgtcgggttgcagaccattgaaccgggccgcagcgcgttcctgacggccgcctactgcgtactcaccccgttcgccacgtggatcatttcgaaaacccgcccgaaggccatcaatctggtcgccggcgtgatctgtctgatcggcgtcggcttcgtctcgttgaagccgggcggttcgttgtcgctgggcgccggcgactggctgaccatcgcaaccgccgtcatcttctcgttcaatctgacctgccttggtgtctacaccaaacgcttcgaccctatcgccgtcacttttgtgcagttcggcgttgccggcgtattgttcatcatcggcgcgttgttcaccgaacccatgccgaacgccagctggctggcaccctcagtagtggccagcgtgctctatctgttcctcggcgccacgatgagtgcccagatcatgcagaacatcggtctggctcacgtgcctgcctcgcaggcgtcaatcatcatgtgtacggaaagtctgttcgccgtcacgttctccgcgttgttctggggcgagacaatcatgtggacttcactggtgggtttcgctttgattttcgccgccgtactgatgtcggtgatcagaccgaccgggcagtcgctgcatcgtaattgacgatgtcccgcggcctgcggcgacgcgaaacgcacgtgtgtgcgctgcagggcgtgtcggacctgcacgaaggccgattttgaaggtctcgtgtaggcctcgccccgcttccatcgagtctcaggcaacctgtcagcccgacaccctacggtcgtgcattgtgaagaagttttttgaaggaatctccctctcatccatcgtggcgggcacccttgccgccgtcacctcgttcctgctcgcctcgaagatcggcatcggcggttcggtgatcggagcggcggccagttacgtcgtctccgccgtggccaccaagatctaccagaacgtgctcaccgcctccggcgaaaaactccaatcggcctcgtcctccggcaacgggatcacgaaggacgccgagaacggcgatgccgatggcggcaccccccgaacggccggcagccggaccgacgttcgggacgagcccgatacggcgacgggcgtgaccgccgatgatgcttcctccacacgcagaccgcgtgaaatcgtgttcagccgggcgaacggcaggacgtactcggtcgatgagctgcgcaagtcccgcttccgcgcttcgaagcacaccgccatgatcgtcaccttggtgtccggcctgctcgccgtggcggtgacggccggcgtcgtgatgctggccacgcagggacgcggcacggacaatctcgtatcccccaccacgaccacgcccgcgcgcaacgacaccggcacgcgaacgggcacccccgatcagaacaacgctctgccccagacgggcaccggcgatgattcgaagggaaccagcaaggattcgaaaaccgacgccccctccaccgacttcgacgccaacggcacctcaggttcgaccggcgccggcgcctcggattcgaaaaccgacggcaccgccaacggttcgaacggcaccggcacctcaaagaatccgaccaccgaggacccgaccagccaaggcgtcggcggcagccagaccggttcgaacggcaccggcaccggcaccggcaccggctcgacgcaaaaagatccgtcggaatcgacttcaaccagcaccggcaccagcggcaccagcggatcgccggccaccggcccagacgcgggcctgtctcgttaagtgtgtaactggcgttttcattgttgtgttccctcgcttggccagcggtcggcgaaggtgatggcaaaggcgttgagcgcgggcttccggcgcgcgctccatcgtatccgtcccttgccggtggggtccagcgagcggacggtcaggtacatgcacttgagcgcggcctgctcgtcggggaagtggccgcgggcgcggatggagcgcttgaatctcgcgttgagcgattcgatggcgttggtcgtgcagatcacgcgccggatctccacgtcatagtccaggaacggtatgaaccgttcccacgcgtccacccacagcctgcggatcgcgggatatctcgcctcccacttgtccagcatcgcgtcgcgggccgccgccgcggcggcgggcgacgtccagatgcccagcacgtcgcggtcgccctccagatccacgccaacggccacgtagaacgcgcggttggcgacctgcccgtcgcgcaccttgacgacggtcgcgtcgatggacacggccgcgtacacacgatccaggggacgcgagcaccattcgtccttctcggccacgacccgctcggtgatgcgactgacggtctccctggacacgtccgccccgtagatctcctggaagtgggcgctgatctcgccggtggtcaggcccctggcatacagggacagcaccacctcgcccaccccgggcagccgccgctgccgtttcctgacgacgaccggctcgaacgagccatcgcggtctcgcggcacctcgatcctgaccggacctaccgaatcggtgaccacggtcttggcggtggtgccgttgcgcgtgttcgcggccctgccgtccttggatttcttgtgcttggcgcggcccaggtgctcggtcatctcctcgtccagggccgtctccagcacgcttttggtgaactgtttgagcagtccgtcgggccctgtcaggtccagtcctttttccttggccatgcgcacgaatgtgagcgccgcctcccgctcggcgttgcgtttttccgcgtccggcttcttcgtcggtgtcatgtttcccattgtcccagcacacatcgtccaccagcctttccgaccggccacacgaccggccagttaaggccagttacacacttcgagagacagtcccacgtataccggttctttgtttatgtaagggaatgattgatggttcggtttgcctgtttgtataatgcgcttatttatcttggtgccggatgtttttcggtctactatatggtggcctatcatgatgtgggcctgtcggtgctgctgatctccatcgtcaatgtggtgttcgacgtcagcgaatcggccagcgagctgcccacgtccgtgctgttcgaccggtggtcccgggaacggacgctgatcatcggcgtgttgtgccgcgtcgcgggattcatattgatgctgttctggtccgcgaacttcgccgtgctgtgcctggccaacgtgctggccggcatcggggccgcggtcgaaagcggcgcggcgtcctcgctgtacatcgaatacgcccgcaagcacgatccctcgctgggtatgaagaccttggtgtcaagactgtcggcgatgatcgctgtgtgcacgatatgcggcggtgcggtcggtgccgtgctgttcctgcttgactcccagctgatctggctgggcgcgacggtgttctacgtattggcgatcatcccgcttctcggtctgatgagggccgggtcgcgcaccaaggccgcagcgacggatgggagcgggacgacggaacggcaggccgaggcgtccgtcgaatccgatggatccgccgagccgggcgagtccgggacctcgctgacggtgttggatcatgtcaggcagaccgtggcggccgcggccgtgctgctgcggaagccggagatatggaatatggtggtgttcaatctgggtacgttgtcggtgctgacgttctggcagctgctgctgatgggccaccagaccggggtctggtggcagttcgccggcctagtgttcactaatatcgcgcagatcgtcggcagtcgtctgggtatgctacggctgcatccacgttccggcgacattgcgatcctcgtgctcatcgtgtcggcggtggtgcttgcggccacgccgatgccggcggtgaggatcctggcgttcttcgtgttctcctgcgcgcagatgtacgtggcgaacatgatctccagcagcttgcacgagagcattgacgattcgatccgcgcgaccgcgttctccgtgggatcgctcgtattgatggccttcaccgcggtcgtcaccccgctgtgcggctacatcgccgacacgttctcgatttcctggggtacactgacaacgatccccctgctggtggccctcctcatcgccggacttgcgcgaaagcctgaatccgacaaacgggtaaaagtcgatatttcgttggattgagacgtcaagggcttgcggacacgatgtccgcaagcccttgacgtctatatgtcattcattcatggttggaatgcgctcctcctacgcgtgcggttgaatggttagtccatcgctatcgtcggagggtgtcagggccgaagatgaaaccgtctgttccgggtgcgtgatccaggtggaatggattggcaacggtgtacgacttgtcgccgggtttcacgtcgtccgtgtcgaattcgttggaatccttgtcgagcagtgggctgtccagcgaggcgggacagtacacggtgacgtgccagttgccgtcgtccatggggatgagcacagtgcagtgccttggagaccgtctgctgcggcatcccttatggatgattccttgataaaggagtttcggggggcgggtaacaaaaacccggaaccgaagttccgggtttttgtctggctcctgcggctgggcttgaaccagcgaccgtccgattaacagtcggatgctctgccaatagacaacaggcaattcgactgccatgtcaggtatggtaatctcgaaccagccagaagatcgataagccaaattacctgcgactgaagtgaggacggaatcatgcgtagcgagttctctggtctgttgtattgcgcgggtgcattaatcgcagtgacctcttgggctcttttcatgttctcgaaagaagtccatcggaaaggccgaacagtatccatcctgagattgcccgtcatttggatactgttcctcgtgagttcggcgccggctctcgcatcatatccggtttttgaaatatactcaggatctatggatccagatgtcctcgatttctacagtcagccgttcatacggctactgccagcagcgacctgcatagtgaatctgtgcgtatcgacatgctgctccatggctcttgtcagcaagcgcagaaaaaccgaacatcgaaaaatctgaaccacagcattcgagatgagatgccatggaaaaaccgctgtttctgctggccttggtgccgctggccgtcggattggtcctgatatccgtcgtgatcggatccaaaaaccgggaagagaacgcaaaaggactcttctgcgtgtcttctcggcgctcatggtcgttgccggcgcgttggccatcgcgagacaactcgcatgacgcttcacgctgcggctcggcttcccggctatcggtcgaagccagtccacgggccctctgtgccattccccgcaatcaaacagcaacgcccggtctcaagcccatgagacacttggaaccatgactaccatcatcatgcgcacctcgcatgataatcctagccaactgtttttggctttgttccaaggctttcgatttttgggaaacctaccgattaccctcgtttctccacgaggcacccacaggcacccaagaataatctcaactgattcccaccccaccggtcggccaccatcagccggaacgctcgtatctcgcggcgttggcgatctcgttcgcctgaagcgtcgggcatcgcgttgacgatccgctcgaccttctcgcgcaccatggcgtcgagcttgctctcgaacatggcctggtcgaactgtatgatttccttggacatggctccatgcctctttccaatcgcggtttttcattgtctggcgactgaaaatcgtacccagtacggcccatgtccttttccatcaaggccggaatccaaaaatgcgcaagaattcggtcgttatccccttagagactaaaggaattctattagttcagcaaattcgtatatcaatttattttttagcatgtcggacaatacagtaaatcaaccactctatggctaagataccaaggtagaaaagcgcccatacggaaaaactaatcagctttactcctagtgtctgtacagttccatgcccgtccactgttcttatgaaaaggaatacactaatgcataagaacaatatgaattgaatgatttggaaaattctccaacctttgttttccacaatcaccctcctgtaaccccaatctctatatgctgattccaccattataagccgtccttggtgaaatgtcaggcgccccgttgtctaattgaaagtgcaacacccgttagattggagattgtccggataaccagtccgaagggatgttgcacctatgggagaagtatattcgcacctgtcggaagaggaacgccaggtcatccggatcgagatcggcaacggcaccagcatccgcaggatcggtctgatgctcggccgcaacgcctcgacggtcggcagggagatcgaacgcgacacgtggttcccgtccaacgagaacgagtcctgacggccgtaccggccgaaacggctgaagacgggcccgtggacgggcggatactacatcgccggccccgccgcggcgcaaggccgaccgcaggcgcgccgaaccgcgcaagcgctaccgcctgtcatgcgaacgcctgtgggcgcgggtggccgaatggctgggtcgcggctggtcgccgctgcccgtcagcggcaggctgcgcgtcctgttccccgacgactccgccatgcgcgtgtgcccggagaccgtctaccgttggatctacgccgaccgccatcgccgtgaaagctgggcgcgctgccttccacgcggccacaggaggcgtcgcaggcgtggcggcaggaggacgtcgcgtttcccgattcccggacgggttcccatctccgagcgtccgccggaggccggcgaccgcagcggtttcggccattgggaggccgacggcgtgatcggcgccggatgcaacccgcacaccgaggtcgagaggaagaccaggttcctcatggccgggatcgtgcccggcaagaccgccggggaaagcgtcggggcgcagctggcgatgttctcgccgctgccggccggcgcgcgcgtcagcgtcacgcacgacaacggcaccgagttcgcccgccacacgcgcctgcgcgacgagccgggcatggacacgtacttcgccgacccgtactccagccggcggcggggaagcaacgagaacaggaacggcatgatccgccggcatctgcccgaacgcagcgagatccggatggacatgaccggggaactgcgggagattgtcgacgaggccgacaaccgtcccatgcgcgtgctggactaccggacacccgccgaggcattcgccgacgaactgctagaattgcaggaccaacaggggtgttgcacctctaaatagacatcgggcgcttactgtggcgagaactggatctacagggccaacgtgacacaaattatcgaagaacacggcatctcagtcacggtccaacggcagaatgccggaaccgctcgccgcatcgttacccaatgcattggtctcaatcttggtggtcggctaccccatgcccctaatcacaacccgcattcctgcaatcaggcatcaccacccggtctcaagcccatgagacacttaagaccatgactaccatcatcatgcgcacctctgatgataatcgcatgtggtcgtttttggctttgttccaaggttttcaatttttgggaaacctgccggttacgctcgttttccacgaggcacctacaggcacccaagaataatccgggaacgttccaccaccctgccggcgctcagcgtcttcgccgaccggcacggaaaagcgcaataccccctgtggtttcatgatgttccgcatgggtggtgcccagaagcattcacccggcagcatgtctccatggcggacaatagacagaacgatacgcagcccgtgcaaccgtcccagccgccaatggcatccaaatccatcccgaatcccacaggcccattgcagacagcccagatcagctggctcatggtccaaagccgcctgcgacgccaccgtcccaatagcaggaacggtcagctgcgcagtatgatttccgccctgtcggccagttcccgttcgcgcacacccatggcagacaggatcgcttggctccgcgatggcatggtggaggtcacccgtgcgaccaatgcggagaagcgaccgaacaattccaagtaatcgtccttgtcaagcaaataaccaagatcaccgatggcctgatacacgttctcgttagcgcgcccatcgtaccgggcacaatagcagcgctcgtcatgcgcgcacaggttgcggtagaacaccagtctgttgaagatgctgtccagccgcttgatggtgatgcgccgtggcctgtcgtgcgtgtccgcatacaaaccggtgaaactttcggcgaccgccaatcggacggccggggactggacttggaagaaccataccgtctggccgaaggaaagatcgttggccagcacccacaacggaacctggccgttgtggtcttccatgcaatggcggatatacgccttgccgccatagtcgcccctgttgcgcgggttgccgtccaactcaagtatccgcttgaagaccttgtcgatcaatgccatggcgctcggacggcacctggaatcataatagtcgggattgagatacgggttgacctcgtcggggtgcagcccggtgaactcatgcgcgcacactgccttgagcgcggcctccgcccgtgtgatggaggaaaacaacagttcacgcaactcacggtcgaacaggaacagggcgtacagatcatcgaaacgcgcgcccgttccgtaccggtcatcaccagcggtcaggcatgcctttcggtcgaggaacaaatccttatagccattgacgatcggataatagccctcgcgcctgagcacatgacccgcaccggcatcgacggccatgccacgggagcgcagaatgcgcagctgttcgttcacactcctgtagggcttgcgcaacgacatggatccgacctcccccaatccagcgatgaaagcactgaggccaccccgcgtccacggaatggcctcagcgaaccgaacgaagtccagcttatttcgctgttacagaatagcgccaatcccccgcgaatgcaacccagccagacggcggacgatataatgaaacctccatatcatcattccagaggcacacgccggtccatcaagaccaccaccagaaaaacccaaacgcccacaaaggagaagacgcgcgcctccacgaggcctgtatgaccctcgctctttcaagcgtctgcacgaaccgggcgaagtcgtagatgccggatgtcgtacatcgatgatgtcgggtccccaagcagggtgctcgtggctcttcaccaggaggctggaacactttctcgtcgattccgcaggagcgacgcaagccttccgctccttgaactgggcctggcctctccggcaagccctactacaataggactcactcctccgcagttcgagaatcgagtcaatatgtgccgaatttgccacattcttgcaggtctcctagtgtgtgccggactcctacgcacagtaagcggctttatttttgactacctgcatccagaatacgtgtctagctttccttcatatctttattttttacgagcggttcccttccttgtcgctgctggtgctatcgaaactattttattcctgacaaaaaggagaaataaataaagaaactcaaacaaattgtcactgctctagtatctgtaatattggctggaactgtgacagtaaatgcgtcggcagcagaatctatcgaaactccctataggagtcctaccctatccagctttccgtctaatgcttctctggaagatcttgagaaagcctcagataacgaagatctgagaattatctcatctccttctcggggtgctaattacaaaacgtgcgctgcagaggctgtagctttactgcggatttattctactacaggatccggctcgtcatctagtttcacgaatctcggtcattcttggcttatgatcacaaacctgtctggttctacggcagacattgctgggattaacgttgctgatggtaaatctataacagcaagcacttgggatgaatccgtagatgtcagtagagaatataagggtctgtggctcaatctttattcgaagcttaattccaatggtattaatcttcagaatgtttccattcaattacccttaaggcaaattgatttagatacagtgaattctaatattaaaaataacgatagatggggctatcttaacaactgttctactttcgcttcaaaaatttggaattcaattgctagtggcagcagtaaagttgacgctggagccatgaatacaccagccagtctagcaaaaagtattacaaaagttggtgaggcagaatcatatacattgttaaagtacaatacttcttcaccgcattacgattccgtatattacggctatcctcccataaagagtaataacaataattagataaccaaatctgtccggtaaagccagactagttttatctataatgtgagccgcaagtgttggcatagcgcttgcggctcatacgcacgataagcaagagccacagcattcccacccggtctcaagcccatgagacacttgggaccatgactaccatcatcatgcgcacctctgatgataatcgcgtgtggtcgtttttggctttgttccaaggctttcaatttttgggaaacctgccgattaccctcgttttcgctgaggcacctacaggcacccgaaaataatccaggagcactccaccgattagccgacgacgaacactccgactgacctacgattcccattcaagactttccaccaacaacagacaatctcctctttgagatatttcggtattccgatccggcgtcaccgaggatcatcccgaccggcgtctgtgttttggcttttcctggcttggaggaacgatggcacgctgataggagtaatgctcgtacacacgttggctctgcgcgagagacatgtcgtacgcctcgttcgccggttgcgcatattcaccaagatgagccagatcgttcgacatggtcaacggttcggacaatggtttgacgattcttctgaacatatcctcgaggggatgcaggtcattccgctgcattccctcgatcgaggcccggtcgttcgtccttttgtcgatgagtccccagtcgaaatgccagccggcctcgcgcgcaatgatctcccagaaaatgcgttgagtccgtccgttgccctcacggaacgggtggaggatgttgaagttgttgtagctgacactcagacgcctcacgaacgcttcccggccgaggcccttgaggagaccgtcaccgcgaagcacctcctcggagtagcgaacccctatgctgaacagctccaacggttggaagggaagcccctcgcccttgcccatgtcgatggttcgtatctcccccgcccagtcgtacacgtcctgaaagaggaaccggtgtatgcggcgaagctgttccagcgtcccctccgcaggtgggagattctctctcagaatggcggcgcgggcggagcagagatcgttctccgcagccgccagcgcatccttgtccgtggcgcccacaaggttccgcagcacgttcgttcctagaatcaggtagggatcgaagacacgcgccatcgtcactccaatccgtaacggcgacgggtgcgggaaagaagctcagcgctgccgatgctcccccgcgcatattctccggcatcgcgtatgaaggccctcgtcacgtcaccgccttccagccgcacggactgcaccgacagtccgacgttctccgtgcggcggcgcatctcggattcagatatcgttccgaacattgcacctccttttctctttagattctagcaaaaccgacggcccttagagataacgcccgaattcttgcgcaaaagcggttcggcccgttgccgggaggacaacttcagtcggttgattgcatgatgccgtcgagccgggacatgtccaggtagcggcgtgcgctccattggttggcggtgacgtagcggatcctggcgcagacgagcatgagcgcgctcctgccgtccgggaagctgccgaccactctggtgcgccggcggatctcgcggttgagccgttcgatcatgttgttcgtgcggatccgccgccgatgctcgacgggatagtcgtcgagcaggtaggtcgcggtctcgctgatgccttccctgaggcaggaggcggcggccttcagccccttggactccatttcggtggcgacctgttcggccttctccaacgcggcctgccggctttccatggcgaacacggccttcagggcggacgcggcccatgccgcgtgcttgtggctgaccttggacaggacgttgcgcatgaagtggaccatgcaccgctggtagcgcgcgtccggcagcatcgagttcacggtggagacgagcccggcgcaccggtcgccgaccacgagccgcacgcccctgagaccgcgttcgatcatgctcctgacgaactgctcccagctggccttgtcctccttcataccctccgcgacgccgacgacctcacggtggccggtgtcgtccacgccgatggcgaccagcacgctcacgttctcgaccgacccgccccacgtgcgcttgtgccacacgccgtccacgaacaggtacgggtacgaatgggccgccaggggacggttccgccattgatcgatgtcctcgtacacgcgcttgagcttgtcggagagcgtctgggagggcatccgctcgccccacagcaggcggctgatgtcgtcgacctgacgcgtgctgacgccggccaggtacatgtcgatcagcgcctcctcgacgctctgctcgcgacgccggtagcgttcgatgaccgccgactcgaagaccgcgcccttcagcttcggcaccctgagcgtcatcgtcccggccttcacggtcaggttccgctcgtagtggcccgcacggtaggccctccgaccggacgcacgctcgtatctcgcggccccggtgatctcgtcggcctccgcgtccagcatcgcgttcaacagctcctcgcccttccgggacacgagacggtccagcttcgtctcgagcatgttctcgtcgacctgtagaatctggttcgacatggttcgtcgcctctttccatagcggttttatgtttggcgactgaaatcgtaccccggcgacggaccatgtcccttcattcagacctcaaccaaagtgcgcaacaaaccgggcgttatcaaaagcaaaagcagctggagtcgacaatcaccttcaatgtcaaaatgctattgacggcttatggttattcgcagtccagcttggccgaagcgatgggaattggccgttcggccatgtccctaaagatgtcggggaaaacaggctggtctgtatacgacctggttaatgcatcaagattcttgaaagtaagcacggaacaacttcttgatgattctctgatgaggagaatgggcgtttcggacgatgcggaggcggatatggaaaagtccgccgtttccggcggactttccgatgatggtacccccgtcggagcgcgcctccgcggaggcactcgagaacatccacccgttcgccgacgacaacgggcgtaccggacgccagatcctcaacatgatgctcatgcaggcggggtacgagcccatcgccatcaggcatgatgccggcagcacctacgccggacggctcgagcagtggcaggcgtacggcaatccggttcccctggcgtgcatggtcgcggactgcgtggtccgggaacagtgccggatcgggaagatcgtgtccgatatccgccgcgggcatcccatcgccggacacgccagaggtatacgtgaatagtgtgtttacacactgttcgagaataataccctgacatgtcaactaacgcaacgtttactgggatgacggacaagaaggttggttcctatcagctcataatgacgttgccgactgcttgatggtggttgtggcgcttgtttgttcgattccgccggtgctgggtcgttttcgtctggctgaacggcggccaatctgggagttcgttctggtagacctcgtcgggccataatctcccagattctgcgggagtttacgctgacttcgggaattcgccgctgaactcccgtgccggacgcgggagtttacgagaatccggtactctcatgcataatctctcaacaaaaacgttggaattccgcgattctcaaaaatcgaccttgaaaccgttcccgggagaacttcgccggattcatgtttcgcgctaaactcccgcgcgcatccggaagttttcatagaatcggtcgcgcaaacggacatccgggatttctcaatttctcccgggatcagcctcttccaccgagttttccagaccacaatctgaaaactcgtgatttgagcctgctgaatcgagattttgagttcttcccaaactgactgccgcaaactgaccgcactcatcgtcctgtcagcgcagccggtttgcggaatggaagacgtgtgcggagagcagcgcgcagcggtgcatagtccccatggttggtggccgtccgcggctactccagcggtgtgcgatcccactggtcggcgcgtggaatggtgcgcaggctgcgcgaactgacgattagcagcatactgacgagcatcaccgcccagaacaccagcatagtcccgctgaatccgaaagcgggcaacagacttccggccgtcgctgagcagaacgcggacagtgcctgggccggtacggtaagcgtcacggtgatacgcccctgcatcgtgtcgggcgtcttaccgaaaatgaacccgagctgcaacgcgttgatgatcgggaacggcaggcacatcacggcgttggcgataagcagcacccagtagttgtcggtcagcagcatcggcagcgaagcgatgcagatgaacacgaatccgcagcatgtcaccggcccgaccggtgcggtatcgctgatccgtccggcgatgaacgcacccgccagcatcgcgaggaatacgcccgtattcacgaatccgatgagcgtcgcgttcacgccggtgcgcatcagatgcagctgaatcgcatactggaagccattgaccccgaaattcgccagcgcggacgacaccatcgtcaacaccagcatcctgcggtgcagcgaccacgaccatccttcggcgaaatcacggaaaaatgacgcgccgcccgctttcccaccgtcatcgtcgctatcgccgttgccgctatcgctgccgttccgcggatttccgccgactcggatacgtgtcgcagccacgcctgccagcaggtacatgaccgcagccgacaggaacggcaaccacggggcgatgccgtacagcaggccgccgactgggctgccggccatgttgatggtcgcgtcacggccttcgttgagactgcgcgctttcggatatgagcgaatatcgacgatggatttgagcatcgcatccgaggcggggccgagaaacccgttgaccgcagactcgaacaccgcgatggcaagcagcacggggaagaccagcttgccggccatgagcagcgcagcgactgacccccaacagatgacgcccgctgtcgcgttcacgatgatcagtgtcttgcgatcgtgacggtcggcgaatgtcccgccgaacacggcggccgcctgctgtgcgatcgcggccagcgagcccaaccaacccgctgctgtggtcgatccggtgagcttgtatccgatcagagagaccgccagataccgcagggccacgccgatggccgtcgcgctgtccgccgtgaaccatggcacgtaacctgggatatcccacaacctgctttcgcgcacaggagcagaaacgagctttaacgaattactcatctaataatttatccttaccctaccaggactggaatcctacagaagattaggcggcactggttctttacaaacttgctcagtatgccaagcataatcatatatatcgaagtaacccttttctccataatgagcaggacagcaatgacatcgataatcttcaacctgttccgctaccaacgatcccaatgttgaacataatcgatagctaagcttaccggactcatggtgcagcaatagcttgcctttgattgccaagtgtgaagaaatatagtcatatttattgttcggataatagaattcaggcaaacttaccgaattaccaaaatagcctggattaacaatgaacgctatatctttcttatcacatgagtagttaatcatccttgcgacttcggtggtgcttggaacgtctgccgcttgaattactaagttgattttctctcggtcaattaattcatcaagttcactatgacaagttatcattttatcaatgctatctatagaaagacatcttgacgccctggatttcagcacatcaacctttttcttcccaatgtctgttcgcacgtaatcctgacggtaaatgttgtctacagtgacaacatcatgatcgaccaaagtaatatgttccaaagcaagcattgaaatgtgccgataaatatgacttccaatagacccgcatccgagcagcaggcatctaatttgtcgcggctcagcgtgttcgacacgcaatacgtccaaactgacaagtttgtcaatagccgctggggccggtaacgttttgttggactcgtggcataatcaaaccatagaaacaaagaaatccaataaagcgacaccgtatccaagtgcccacctctatttgacggaatgcaccatattccggcaccgacgaacatcaggatcgagccccatcaccaatcggcaccaagccgcccatatcccatgattagctaaagatatctctgaatcacagcgttcagaaaggaggcgccatggaaaagccactgcttctgctggccttggtgccgctggccgtcggattggtcctgatatccgtcgtgatcggatccaaaaaccgggaagagaacgcaaaaggactcttttgcgttctcttctcagcgctcatggtcgttgccggcgcgttggccatcgcgagacaactcgtatgacgcttcacgctgcggcatgttgtcccggctattgcccacgcccattcccagctctccgcgccattcccgcaatcacgtctcttccccggtctcaagcccatgagacacttggagccatgactaccatcatcatgcatacctctgatgataatcgtggtcagctgtttttggctttattccaaggttttccatttttgggaaacctgccgattaccctcgtttttcacgaggcacctacaggcacccaagaataatctcgactgccccaccggccgaccaccaccggccggtccatgatgctcattcgagatctcccgccgacgataggagcccggacccataccgtctatccaaggggaagccaatgaaggacacggagaacaggccgcaaccgagaaaacgcaggaaatggggatcggtgatcgtccgcagggacgcggacggcaacccgaccagtttccaggcgcggtacgtcaacccgctcgacccgcccaagaaggtcggacggaacttcggcctggaatacgagacggaggcatacaggtggctcgacgaggagcgctacctcgtcacactccacaacaaaggcatcaggcaatgggttcatccatcgcagcgaggcgcaaacaccatgcccacattcagggaatactccaaggactacttcgacaaataccgcaaaccggacggcagcaagctatccggccggtccaatcgatgcaacggaatcgtactgcgtcggctcaacgagacgttcggagacaccccgctcgaccgcatcacccggcaaatggtagacgaatggtatgcaaacgccagagacacgttgacggcatggacgttcgaacaggcggcgcgaacactcaaacgaatcatgctcgccgccgcgaacgaacaggcggatggcaccccgccgctcatccccgcgagcccgtgccggtaccgcgtcgtcaaaccgcaatccaaacgacgtgaccaaccgccggtcaccgccgacgagatcaacaggctggccgagctcttccccgactaccagcggctcgcgctctggctctcccttctggcaggcggactgcgcctcggcgaggtatgcgcactgcaactcagggacatcgacctggagaacctgcaactccacgtccgccactccgtcaaccgcggccccgacgacaggggcaaataccaattatgcgagcccaagaccaaaagcagcaaaagggtcgtgcccatcccgaaaccactcgccccgctcatcgaggcccatatcagccggttctgcaaggaccgcaagcccgacaccatgctgtttcactcgcctatgctggacgattggctgctcccgcccacgaccatcgaacggacattccgcatggcccgcgaaaagatcggacgccccgacatcaccttccactcgttgcgcgccacgcacgccaccatgctcgtcctcgagggcgggaccatgcgcgagacgatggacgacctcggacacaccagcctcaccgtcgcggtggacagctaccaacgggtcgtcagagaacaccaccgcgacaccgtggaactcctcgcctaccggtacatgccatcgaacgatccgaccgtaatccgcacggtcatcgatcagaaggaacgccagatcgacaagctccgggacgaagtggaaagactcaggaagatcctgctggaacgggataccggaataccgacggacccggacaccgttttaccgaaaaaccaaaaccggtaaagaccggcatcaaacggaacagcctcacacgtctaagtgttgcaacaagtacagcggcaacgcttaaacacgtgaggcagccacggtcgaagcgcgaggcaatgccttcaaccgactggataccgcgataccggaaccggtaaataccgaaaaaccgagataacgaaaccggttttcagccctcggaatccattaccgtacgacccttgccgaagagatggccgagccattttctgattcgcgggtcgttcacgttgtcgttgtagacccatccctcgttgccggtgttgtacggaggatcgatgtagatgcaatccaccttgccttcgtattcgggcagcagggccttgagcgcttcaagattgtccccatggatgaccatgttgccgcaatcggatccatgcgaatccaaaacgctcttttcagggatgcgttcgagtacacggtacggcacttgacggtggtatgcgaccaccttgctctttcccatccaccccaaagtcggcatgacccgttctcctcgctacatcaaatcgacatatccaaagtataggctttcgggctaacggctcatatggcgcccaggaccttcgcgatcaatcccggcactcttgccatccccgtcttgccgagcaagattcttccgcagcgtgtcgccgaatctgtccagcagatccgttttgctgcgaatggcgtccggcttccgacgcaatccctcgaccagatcgatgaacgcgtgttcctcctgttccacgcagtcgaggaacacagaacagaacgccacgggatcgccgtccacctgccaggtctccagactgcgggcatagtcgcgcttggcgtcatacttgatcgccacgggacgatagccgtgcttcagcagcatgaaattgagcagctggcggccggtccgcccgttgccgtccatgaacgggtggatgttctcgaacatcgcatggaagccggcggccctgagcagcggatgagcgccgctcgcgtccagcccgtcgatcagggcccgcaggtcgtcgcggatctccagcgggtcggcggtcttgacgcgggtcgcggtgatcctcgccagataaccgtaggggcggaacgtgccgcgggcgaacggctggaggtccagcgccgtcacctcatggacgcgccggaccagttcctcatccagtctcctcccttcccgggcgtattcgcgcacgtaggccatgccgtccgcgacgccgcgcgcggcgaacacgtaccgtgccggcgaatccgacgggacgaactcgccctccaaaaccagggacgtgtcctccagggtcagcgtggatccctctatggcgtttgaattgtaggtgtagcgcaccagccagtcgcggtcgtaatccgccagcgccatgtcctcgacgccgtccagggggtccagtgcgcgggcacggtccttcagcgcgtcgattcgtcgcagtcgttcggcgattcccggctcgcgttcaaggccgagcagttcctcgggtagttcctgtatgcgctgcgatagctcgggattggccatcatgtccctcttttcgtgttccggttgcaaagtccattattccagccgcggttcgttccgtcctgcggcctgcatgtcatagggaggcgcgccggccgtcccggggcgattcgaacgccgcggccacttcttccgataccggcatgcgcatcgtcaccctgccggtttcctgcgcggcggcacgtttcatggctcggcgttcggctctggtgggccgttcgagaatccactcggcgaacgcgcggataaggatggacgcgacgatcacgccgatggatccccagaagcacgggacgaagtccggcttggagtggtcgtaccagaaccagacgatcaacgcgaggatcaacgccaggccggcggacagggcggcgagcttgtggaacacgagggcgagcgtgcggatgggatgcgtgaccagtcccaccgccagcgcgacgacgacgagcagtgcgacgaagccggcggcgatgacggcgacgcccaggtatatcgcgagcatgtagagtccgaacatgatcggccttccttccctctcctattccgtttcttcgggcagataggtgtagtcgacggcgacgccctccgcctcaagcagcacggctgcctcgcgcacggcggcggcgcggcgcttcacggattcctcggcccggacccagtcgggcagcccctcgggcaggtcggagacgcgggagaacgagagcacggcccgctcatctcccctgtgccgttccacgatggccacgacggcgcgcctgtgctcggcgagatagtgttcgagcatctcccgcattctccccgatggttggatccggtatttctccgactcgtatttcttgaccatgtccacggtgaggttcgcaagcacggccgcgtcgtgctgggtcatgccgatgcgttcgcgcgtcgcgcgcatccacgccttggcctcgctccaatcctcttttgccatggcccctcctggatataagaaagccgaatccgcctgcgcgaaccgtgattatacttctagtataatcgaggttttctacagggcggacccggcgtttcccgggacacggccgtggccgcgccccggtttcgtcactcggtcggtatcgatggattatcgtcggccgtggccttgcgctgctggtcgagcatctgctgctggatcaggacgctgttggtctgtgccgcgtactgcttctgggccatgtccatgctttcctggtggcgttgtccctcgacgtcggcgaagacaagccgctggatgttctgcgcgagctgcatgagcttgtccttttcgaggatggacaccttgacgctgttcctgccgccggcctggttgacgaagtcgagctgcgcgctcatcgcgttcgccaggttcgcggccgcgagcaggaggaacaggatccccacaagcgcgctgctcgaaaggaacgagagtccggcgacgaggaagacggcgccccagacgaagctaccgaggttga

SEQ ID NO: 956 - DNA, 53351 bp, Unknown
  R117_24m  MAG No. k141_16163
tagctttccgtaccccattgcggattgattagtaccgccaccgaccgcgacggcatggtgacggccgataatccattccgaacgaccgatggcgttttcgtattgtgccagctgtgcccgaacggtatgtcggatgcctcgggaaggcttttcgaagcgttcttttgggacatgaccgacagcagattgcgtttccgtattcgccgtgtggataatcacgagtgggtgaatgatccgcaacccgtgcacgtttactgggtggcattcaagcagcagtcatagctttccgtaaccccgatccatttcacgaaagtgaccattgacccggaattcacaatcagtggatacgtcgtcaatggtttggcgaccgtctactgccggtgggtcaaccaagggcctttcggcaataaggcgtggaatacggtgccgctggcggaaatggacgtgcaggctgtctatgaaggtttcaacatgttcgtagacaattccggtgcagaccggatgcagaatcgttttctgtacgtcgtggaaaacagggtttacttccgcacctcgtatgatgcgaacatttccggacacacatggcatgtcggcagcgtatcgtttccggtgacggcggtttgagccgtgatgtacgaggcggatgtgatgaaaccgtctccgttctggctgccgccacaattccggtaggtgaatttgccgtccgggagtatggtgaaatctcgttgggtgttaccgtcacgaccgctgtacgcccacctcgtcataatcaatggacgccagccagccggcaggacgccgaaatcgccggtaccccatgatgcagtgttcgcgctcttccaagccacgttgatttgagcgacattgccggtcttaacgccagtcaccgtgccatactggctggtgataagcgtctgggttacggaatcccacaaagcccccttcggtgtgaacaggcgtaccggcgtgccgaccgtgatgccgtccaatgggatacgccacaacggcatgtatgcgtcaaccgcgccggacagtatcttcccggacggaatggtcgggtcggcggcggtcgtcgcgttcggcgaacccttcaacacggccaactccaccttttccacgccggtcgaggaatcacgatggtaatgcgcgcaaatgatgtcattgcgtttcatgccctgcgacccgttggagatcgtcaccgattccgccgccgtgatatgccagtccaagccttgtatcgacgcgcaacccgtaccgatggtggccttgttcgcactgcccatcgtgcacttgaacgcgtcaccccagtcgaacaccacatcagacttagaaaacttggcctgatgaataatcgccttgtcctcacttgaaatatgagccgtaccagccttgccgtcaacaagttcgatggtcacttttcaacctccttcaaccatgctccaaacgaagcgtcatccttctgcatgaacgtcatgaacgacgtattgcatttggaacacaattcatagatgtcgggcgtcacatcatccgcgatgcgggtcgccttgccagccgaataccggcgcacggtgaaccattcacgcgcctccgtgtcaccagcggcgacataagcggtcttaccgcacttgtcacacacgtacttcgagtaaccgtcagatttcactagcctatcctttcaaacgtaaaacaaccaagcgaaggcaactgcctccacgtgccgccgaaatccacggaagggttgacaccggtcgtgttctggaccacgtatccgattgggaacacgaccctcccggaagcgccgccgccgacatgcgcgctgatgacaccgtcaacgctcacgatcgtggagccgtccaccctcacgccgcccagcatgtccgtggacgctttcggcagcgtgtaggcgttcgcgccctgttcgaccgaagcgagctttgaccgctcgtcatcggtcatcatgcccgacttggcactgtcggcaacactcttcgcatcagacgcaatcgactcggcgttctcggcggtctggttcgccttgccgatctgcgccgcgaaaccggaagccgtcttgttcgccgcctcggcgacctgtctgacggaatccaaatcctcggaagcgacctccgcgttgatcgtgccgcctgaaatcgacaggccacggccagccgtcaaagacacgccaccaccggtcgaacccgaagacgaagaggaagaggaactcgtgtaattcgaatattccgtcttcgaggaagccgcgtcgccaacctcatacgatacggacaacaagccgccagacagtttcacgatcttcttcaacacgacggcagtaaccgtcagaccagtgacatgatcgcagcccgcaaccctatcgcccacatcaagcgacaagccgtcatgcacagtcacatcgacagcgccagcgccctgcaaatcctgcaactgcttcttcgtctgcttgtccaactcgtccttctcggcggacgaataatcatagactgcggcgatttcgtcacgaccaccgaacgtgcgcgtattggacaccttgccggaaccatccgcataatagtggacgaccagacgattcctcaaatcacccttgcccaagccgatcatatggttggtacgccggtaatccttcgtgatggaaaaatcaaccagatcggaatcaaccgtatcattatggtcaacaatcggcttggcatacatccatacagtgccgtcaacctcctgaaacatgagtttcagatcattcgccgccagcatcctgcggatgccatcatacgcagtgcaataccggtcgaactggaacgttggaatcgttttcgtggaatccgcgcgaaccttgaacacgtcagccaagccaatacgggccaacaggttcgacaacacctgattcacagggccggacaccttcagataatcctgccccgaatccggctgcaacaccttaccggccaacatgccatgccaactccgaccggaatacgttacgacgctcacaccgtccgacagttcatccttcatatgatcgacgatgccgccaacctcggtcccatccacatagacaagaccacggtcaggcagcaccgtaccgtcatacaacgtcagctcgaaatcattctcaccagacccccacgcgcaatcaaacacgcaatccgaaaccgcatggaacggcacgccattctcgtcagcgcaaatcagatcaaccaagtcgggtccccattctcctcgacaaccgtcagatcaaaaccgaaaccggaacccaactcaaccacgctcgaaccagccggaacaggttggaaaacatactgtccacgattcaaaccggaaccgcgcacaccccacgaaaacacgttccgcagagaaccatccgcatcatgcagcatgatcgacttcctcaacgagtcaaccaccacgtaagcgccagcgggaacatcaccattcaaccggtacacgttcccgccaatcgtcaacgacggattcgaaacagccccatatatgaccagacgaaacggcatcggaacacgcatacgattagacaccatgcatgacggacgcgaaacagccagatcataacccatgtcagtcggcaaatccaagccagacgcggcagacccgggcacaggctgatacgacacggtaacggcatcatgacgccacacaccatccaacaagacgaacgaaagcgcacacaccgggtcggacgaacccgggtgcgaggaagcctcggacttcaccgcataacacgattgcgtccaaacctcccccgcaccattcacagcctccaaccgtcccggcttgccaacagccagatcagcgtcaaccgtccgcatgaacgagtcgaacgcagccgcatcaccataatgcacgtcaacggaaatctcccgacgtttcctcgaaacaccagtcaatccaccgttacgcaccgtataatcccattcacggccacgcaactccaacgcgccctcgaaatcaaccgtcgcataatccgacacgtcgaaccgttcaccggtcaaaccactcacatacgcaagctcacctgccacgattggcctccaatacatcacggatgaaatcacgcttgctaggccaaggactgctattgcgactgatctcaccgccgataccgtcacggaagcccgcaacctcacgacgcagatcgttcacggcggacaccagttcgcgatcatcccgtgaaggaatgttgaccgtgacggacgtggccgaatccaacattctctggacactgacaccggaagcgtaggcgttacggctcatgtcacgcgcggaacgcgcatacgacgtgcgagcctgagacaccgccctgtccagatcgccggtcgcgttcaacacgttcaggaaattcgggccgacagtacggtcaagcctgctcgccgcagcagcacgaataacatgctcaccattcgacagccacatgggaatcgaatcggacgtgccagtaccagggccgctgatacgaccaccggtagccgcacgcgcggaaccatcgccgctcttacgagtgatgacatccacgtaacgagtggcaaggacggtgccatccagcgcgctgatactacggaacacactttgggcatcggaagcatcgcccagcacacgaccccacgggcgggaaatcgtcgtaccatcatatgcgttcgtttccatgaacgccgtacgcgcaccactgttgtcgcccagcacacgaccccacgggcgggaaatcgtcgtaccatcatatgcgttcgtttccatgaacgccgtacgcgcaccactgttgtcgcccagcacacgaccccacgggcttgctatggtcacaccgttgaacgcctgaatgccggcgaacacggcacgtgccacactgttgtcgcccaacacgcggccccaaggctgagccaacgtcacgccgtcatacgctctcgtattgtcgaaagcgttccgggcgctcgaatcatcgccaatcacaaacgtgtgcgcggtcgcaagcgtggaaccgttaagcccctgatatttcgccaatttcacactggcgtcatcatcgttcgcatcaatatcgaacctgatgcccttcgcggcaggaaccttccgcttctcaatatcctgcatcttgccgctcgccttatccaaagcgtcgatgagaatctggatctgagcgtcagtcaacccactgtcacgaagcttctgcttgacggcatccaacttcgggccagcctcatccttggcgagaatatcgatctcagccttcgtcagaccaaaacccttagccaaagccgtagcatccttgatcttacccgaagcgttatcctgagcgtcaagaagaatgaccaaatccttctcgctcgcaccacccatgagcgccttcacggcaccgaccaactggtcgaaactcgttatatcacccttctggacgagatcaagaatgatttccttctgacctttggtcaactcaagcttatcgatataatcctgaacctgagccttcaccgaatccatattcgtcagatcgaacttcgtggacacgttatcgggaataagacccatctggtcggcaagcccagcagcggcctcggctgacatgccgcactgttcggccatctgaatgatttcctgacgtgcggaatagacggcgttcttggctttctggttcgcttcggcgctgccattgcccgcgtagatgatgttcttcgcggccagtaaagcgctgttcgcgtaatcggccatcatcttgcggttggcctgggcgtttttgctgttgccgtccaactcgtaattgttggctgcgagggattcggacagcaggctgagcttgtcggaggccaacgccgaaacgttggcgacgctatcggcgctgccgatccaatcggacgccaccttcatgcccttcacccattcggcgtgggagtcttcaagcacgccaagcagacgttcggcggcctcggtctgctgctcgttgacgttcaccatctgaccattcgcgcccatgacccactgctggtcgttcttgatgtcctcaagcttcttatgcatcttgttataagcgtcgttcgttccggtcgcggcggaattcaattttttgacgctgatgccaagagcatcggccgcatcggaggcgttcttgaacgggcttatcgacttctgaataccgctaagacccttctcgatggcgttgccatcagggagcttccaaccgtaatccttgtcggtccaattctccgaaacggtcttcatggctttggaaacagccgtggaagcgttctccgcaccgctttgaacgttcttgaacgagtctgcgacagtccggttcaccgtctgcgtgtgcgcgacggcatcattgtacgagctgatcgcactgcccgccagactcaatgccgtggtcgcgccgccgatggcgatgccgacaggcccgccaaggaaatcgaccacgccgctcaaagcggtcttcagcaaaccagtcttacggacggcaccctcagccgcctcgccgacaccacgaaccaaaccagcagaaccagcgccagcggcaacgcctgcgacggaggaaccgccagcctgcgcacgattcatgcgattcagcttcgcagtggtctcgtcggcagcgacacccatccggcgaatttcggaaacctcaccggtcagcacgccagccgtctgaccggacttcaaacgagccatagcccgaaccagctcgctcatactgatcgcagtctcctgcgaggtgatacccaactggctcaaagtcttccgatactgcaacgtggactcgatgttctgcaacatgccacgcttcaacgaattgtaagcgctgatgccagcctttccgaacgtcgcatacatgccgaccatcgcctgaacgggcgcaggcagcttgccgaacgcctgagccatggcggaagcgccatcggccaacaccttgatcgtcggagccgacgacttcaacgtgttccccaacgttccaccgaacgtgtcggacaattcgccgcccatcgacagcagactgtcgaacatcggagctgcggaatcaacggcacggaacaccttctggaatccctcggacacgccgttgctgaaatccgcgatgccatgcttcgacttgccggcaagactgctgatggagccaatgccggtggacaccatagagcctgcgtcaatgaacgcctgcttcgtcgtgtcccgcagctcataagccgcgtcgccaatctcacggaacgaatcatggaacttgcccgaagcggtcttcgcgccaccggcccacgcggtcaacgtggactggaaacgaacgccgttcacggccttgtccgcacggctcaaagcgtcggagaacttctcgatgccattctcgccctcggccaacgtgccgaacgtgcccttgaggataccgccagccgacttgacgctcgacatgagatagccgccctgctcgatggccttctccatggcctgagtgaccttgccggtacgctccgcctcatcgacccactgcgccatcagcgtggcgttgcggctcacatagttggccatgcgcggcagatacgagctggtgctgtcgccaagcctcacaacggaagcggtgacagcctggacgccagggtcaagcgcgttcacgcccttgaccgtattgccgagaatcgaattgatacgggacacgtattcgccttgggcgactatcttcgcggcgttcgcggctatcttgccttcggcggaggaaaccttctccataccgtcaacgaacccgttgccgcccaaagcgtccatcatgtcgatgaccggctgcttggcttccgtccagaacgaatccgacagtttcttctgcaagccgcccaacttcgtagtggacacgtcgatataatccgcgtaattcttcacggcggaatatccagcgccgaaagcagcggtcacacccaacagtgcgcccggagcagccaaagccgccttgctcatcatcaccagagaagcgccggcactgccagccgtgcgggacaagttcaacgcgccagcgccaacggacgcgaacaccgcgcccagcagactccacttcggcacgatctcatcgaatttgtcgaacatgttcacgagcttctgccactcgttctgcacgccacggacaccagtagcgccagcggtcatgccgctcatgatcttgccgaaatcggtgcccttgaactccgcgaaaatgtcaatcgtgcgcgggcgagtgaagtaagcgagatgggcgcgtgctgcggcggtctccaagtccacgtccatgttgaacgtgtcattggccttctggaaatccttgatacgctcctcggcacgcttcatatccaaatcaagatcagcctcaagctcgaccttgcgatctgggttgcgtctcacctcttcggcgacctgccgggcacgctcaatcagattcttattgtcaacgacgatatccgcaggaatacggatacgcccctgctgaagcctacgcagacgcttttcaagcgcatcagccgtatcggtccagaaatcaacacgaatcctaagctcgttctcacgttcgagcttcttcgtcaactcgcctacctgatgtgtgatgttcgcatacttgcggttgaaccgactatcatccaatacgagtctcgtcttgatcggattggattcgatctgcttgcggagcctgttgacggcggcgagctggtcgttcaactgcttgttgacttccgaatacctgccgtacttgttcacgccacgcaaggccttctgcaagccggtcaaccgctgctcctgctcgtcaagcagacggttcgcctctttcacgtccttgccgtacgtgttcatcacgttggaggctgtcttcagattccgcgcataccgtgccgtgccctccaacaggttcccctgccattcggcaccgtcacgccacgaatcgttcagccgctcctgctccatgcgcgcggcacgttccgcattgagctgacggttcagatccttgccgaaaaagctcacgccggaaagaacgttcgtcttgcccatgtcggaggatttgacgaaaccgctacgggccacgctgtcgaacgtcttacgcacggacttcgtatgcgaatccaattcgacaagctgtttgtccaaatcgtgaatccacttcgccacactatcggacttcagcctgtcctgctgtctggcaagcctgttcgtctcgttcgtgacctcgcgcatgttgcgtgcggtggcacggtattcggctcgaagctcacgaagcttgacggtctgcgccttcgcctcatcgcggcgtccaccgccacgaagcgaatcacggtacgcggtaaccttggaaatctcggaacccaactcgtcgtaacgcttccgcaaagcatccaacgtgctcatgttgccaagaatctgcctgttcagctggttccactcgtcgccacgcatcgaaacaagctcgtcacggtcggcgcgaatcctgcgcatcctctcttcggaccggtcaagaagaagcatctgctccttcaaacggctcgtttccgttttcccgaacacgccaagattctcagtgaacacgtcgccgacgttcttctggaccttacgcaactgttcgacacggccgatcgccgtgtccagacccttgacgacaccactgccgtcgaaaaccggtttgactggcttctcataccgtttgcgcagcagttcatcctgcttcgacagttcacgcaagccggacatgtcaacgtcatacgagacattgacgcgagcgtcccgcccattccacttctcatacgtgcgcgaagcggccatgtcatccgggtcgaactcaaccggaaccttcagatcacgaagatcatgcagcttcgccctgagttcggcgaaaaaccggtcggtaagaggaacgacatcaataccgacctcgccagcggaaaaagcaggacgctccatacgcacacactcctaaaagaaacacccacgaatccaaggggaagaaagaggaaaaagacccctcggaaacatgggcaaaaacaaaaaaccggcagaatcagccgccgaagcaactacgaacccgagccatatagtcagccagactcgtcacatgcgaaccatccacacgattgacatcacgagacacggcatcgacgccgggcgggagaatcggctcaaagccgaccttcttcccgctccaatgggaagcagccagcgaacgcaacgaatccaacgtgttctgcaattgcagcaacagcatttcggactggtcgaaaccaagccaccccaactgcaatcgttcggaactgccggaaccgccaccggcaccatcatgctccaacagccatgcacgccactgtgaatcggggatggcttccagaccatccaacaagtcgcaaaggaaattcggatcatacgcatgcatgtcggccggaagattcagccggtagaaacgacggaaatcggagacgacccctactcggcagtccgagactgctttttcgaggcgcttgattttcccagacgctccacgtagaagcgtgtgagagacgcgaacatgttcaacaggtcaaacaggccacgacccttcgtccactccgcgtaagcgtcagcattgacggcaagccccttgtagaaagggtcagcgatctccacgtattcggccatggcaacggcgacagcatcatcagacacggttttcttcgccttgccgccgaacacgccaccgtcacgcatgacaagcagccgctcgttcagacgacgttcgaccacggcgaacaatgcggtctgagacggcgagaaagattccgcctgcaccatttccggcaatcctgccatcacatcatcgtaaccggacagaccatcccaatcggtcggaaagacattctcttcaacatcgttttcagccatacaaaactccaatctgtgaaaaagccaacacccgtctgcggtaaaaaagaaaatcccctgatgggcgacagacaggagaagaacacccgtcaggggaagaaccggaaaccctcagactcacgcgaccttggcgaaatcgtcaggatcgtagaaagcgatgctggaagccttaccgctcttggttttcggaagaacggtggaagtcatgatgttgccttccagcttgaacgtgttgaaatcatcctgggccaaggacggaagctcgctataggcgaggctcatgttcggaatccaaatgccgaacttctcgccggtgttcgtgtcttcgatgtagatgaacagcgccttcggctgctcgaccttatccaaggcgactgcggtgccgccaccggtgatttcggcagcgtcgaacatcagtttgaacatttccttgtcgccctggacgctggaaatcgtgaccttgccggtgacggaatcgtaagtggtgcggaatttgctcttgttccaagtatccttggttgtcgcgtcgccgccgctcgtctcgaaagacggcaggtcggacgcgctcaaatgacccatgttcgtatacttcttggcggtctcgccaacggtcgccgcctcaagactgaacagtttcagactcggcaaagcagtattggcctcggcaagaaaagcggcaccgcgaacactggtaaacacggatttatcattgatagccatatgaatggccctccttaacaagaaagccccatccgcaagcggacagggctttaaaatcagaatctttgaattattgggaaaatcagcggacggaacccgcctgcaccagcttcgtgcaggaacgcacgacagcggtcttcgtagtcaccacgtcaccaatggcgacctgctcgaacgcgggattgtcgggaatcgcacccacacggccaaaaccggtaggctcgccgtaaggccaacgggaaatcgtctcatgcagaaacgaacacaggctggaactaatgtcaggatcacggttcaccacggtcagcgacaacgcgaaccgccaaacccacgccttcacattccaatccggttggaacggagcgccgcaatgccagatcaccacatcatggtccaacgcatacgaatccgtatccgcgatggcacgcggcaacaccacgacgttatcgaaaccggccttacggaaatcgacacgcttgaacagcgcatcgatcaatccttcggcatccaacggggcacgcacgctcagatcagccatacttggcctcgctcatcacgtacatgcccggtaggtgacgttgcgcacgcacattgaaatacccgtactccaagtaggatgcgatctgcgagccgtcacggccgttcacgctcatgaccacgctcgtatgcgagccgtgagcgtgaacatcaatatcaatacggtcggcgacactcgaatgcttggcccgcatgtcggccaatgccttcgcgcgagcctgaaccttcaaagcatgggggcgagtggccttgccgccgaacgtttccgcgaccctcgcattcaaatcagggcgaagcttcacataccccatgtttcagccccctccggtggaacgggcggactcaccttgttatgagccaactcggacgcatacacgcggcgagccggaaactcgtaatgccgagccatatcggacgaatgaggaagaaaaaccggcgaaccgtcaacctcatagcaggagccgtcgaaccagaaccatgaatagaagtcgccatgccattccggtgcgagaaccttcacctgattcatctcgcgattaccgccaaacttctgcggagtcgtatcctgcgcccaattctcactcatgacgctgttcttctgagtgcgtccgacaacgcaacagtaaacctcgtgaacatccgcggtatacgagactccgccactggtgatggacggcacgaaaccacccgcgcgaaccacattggaaaccgtggccgggtcaagaaccctaccatccgcatccaaatacttcggaacggtcgtactcccatgacacgtcacccacggggtcatgccctgatagacgatcacgtcacgatgaagcagatccttgggcacatgcttaggagccgtatccttgtcgtaaacatgaccattcttaggtttttcagcataaacagccatgctcaacccccataaccgggctctagacccaaactgatgtggctcgcaccgccaacaggattctcggaacccaacaggacggtacgatcatccttcgagacgaaaatacggggtgaaggagaatagccgggcgggtcagcttgcggagcattccgcgtatacgtgtacgagccattcgtttcagacttgtactgttcagccttcgccaaccgcaacaccatttcgcagacaacttgtgcgaaatcctcctcgctcagacggccattacgaagccgcacacgaacgagaggactcacccccaaacaagtcaacgcggccctacggcatcgggtctggacccacacatcgtcatatggcgcatcatcaccagtgaacaaggcggcatccgcagtggcgaactccgccatgtacttcacccaatcaatatcgtcaatgatcgcagtagacacggatgcctcccgtcaatcaggcggacaggacagttgccttcaaagtgctgttggacttgaccagcacaggcagggcggaagcgttcacaaacgcctcatagcccggattggggccggtggaatccagcacgacaccgactggaccggcatcatatttacgagtgatgccatacacggccttctccttggcctgagcggtcggaccgaaagcggtgtagcccatggaagtgtcgcccaacgccgggatcaacagcacggtgttctcaggaaagaacgacttgaccttgcccggcagttcaatcttcatctgacgcgcgtactccttgtacatgtcgtcaacgatgattacgtctcgaatgtcggtcatctgcacgagcacgtacttgagttcgtcatccttcaacaggttcggcagtgaagtcttagcggtggtcggataatagtacttaatcatcgcggcgttcttagccaacgcacgccacaccttcttggtggtgagcatgatgctcggagcgtcaccttcggcggcatcaatcttgtcggcccaatcacgcaagtcctgaaccggatcgccgccatcagcccaagtctgaccagaatccttattgatggtcagagaagagtcacgcgcgtaatcccactcattatcgaaagcggaatcatccttcgggctgatcttcgcgttaacagtagcttcgacacggtacctctccaaagtgaacgccaattccttgccaagacgcacgaacgcctcacgcagattatcggcggcggttggagtggcaaccacgccattcacttccgggtcgatggtgaagctcggagaagcgacaccctttacgatatcctcttcggacacacggtgacgcttacgcaacggcagcatctccgtatacttcttcctaccaccggcgtgagtctcgtcatacggtgcctcggcgtcatatgcggagaactcaatagtgtccacctcgaaacgcggctggttcggaacccagctgacgttgacaccagtcggattgttcatatcggtcagaatctgaccgaacggcaaagcggaagtggcaccctgataagcgccaagcacgatgccggacgcttcggcaggggtaatgaaatccttgtttaccagagccattaaaaagccttcctatataagggaacccgccacgatgggcgggtttttaaaatgtttgttgtgtgatgcgcgtcaagcgaagatgccggcgctcttaagagacgccttcaaagcggcgacagtgtcttcgcttggagcggagaccttcttcacgccgccaagagcattggtggatgctgcggggagagtgtaggaaccggaagcggtcacggtggacaacagttcgacatcggaaccggagcctgcgtcataggacaggatcagaccatctaccttcgcgctggtgatggccacgggcagctcccccttgtcgatcacggccatgtagcgcagaccggaatcgacgtaccgttccttcagccccttgcgggtgaactcgaccttgacctgagactcaaggaaaccggccaccttgttctgacggccatcatgggcggtcgggtcatacgggccgaaattgttgctgttgttgatacgagccagcggaatgccggaatacaggtatgcgacagtgttctcgtcatcgatggacgcgaagtacttcgactcgttagcgccgcccacgaacgtggacaagtcgagagtgaccttcttcacgccgtctgtaatacggttaagcagccacttctgcttatcctggggcgcggtaaggttcaccgtgcgaaccatagcgtttgccataggtttactccttcttggaatcaatcaacgaatgcttaagcccgtattcgtaaccgctcttcgcatccccctgagagggcgcgtgaacatgcggcgcggaattggacaaagcggttttcatggcctgtttgcccgtgttgcgcgaggaatcgtcagcggcatcatgctcacccgtttcaggcttgctcggcatgaactgcacgaacgaatcggcccatttgataatctcgtcagggtcggtttccttgcacaaggcatcgaaagcctcgtccgtaatctcaggatgctgcttctgcgcggtcagcctggcgatacgaacctcagcgtcagcgagacggccttccgtatcggcaagcttcgcttcggcggcattggcacgatcacggttctcatacatcttctgctcgttctcacgggcctgatgcttccacatgcccaacttctcggaaaggtcatccgcaccattcttttgagacgccgtattggcggctgcggtagaagtagcagtgtccttcggctgcgtgttcacgcccgtttcaggcgcattcgtagatgccgccgttgcagcggtattggtattttcatcagccattaggcttgaatcctttcaatagtgttacgcggcctcgccaagcatcgaccgcatctggttgagcatggtcttctgccatgccatagcctgtttcaaattcttggaaggtttgaacgtgaacgtcctaccctcatagcggaaagtcaccggcttaccggccttctgcacttccttgtagcgccggttgaactcgattgcccgattctccatgcgacggcattgagccaacgtggactgacggtcaggcgtatgccaagcgtccgaatccttcgacggaaccggatcaggtgtatcctcagcatcctcagcgagaagcacggggccaagctctccatgagttatcgtcttgaccttcacctgcttcaacgccgatgaactagtgccgccagcctcgtcgtacaagcgtttcaaatccttctgattcaattggaatcccggatcgtaatcactgccggcaggagcgacgccacaatggcagttcgcgtgcaacggcatcagattcgacgtggaataccaacggtctgcggcaaccacacacaagccacaggaaccggtcttggacagttcgggatgcaacaccctgcgatactccaacaccttgctacccttgtaccggtcaagcgtggcgctcgtctgcgccctcgaaacatcctcgtcaacagtggtccgcaaacggttgaacgcctgttccaaccacttatcgacctcttggaacgtttcatcagtcctactgggccactccttcggacgaatctggggagtttccacagcaagacttcgatatgtgtcagccggacgttgcgccacaagccacggatcagtattgtcgcgcgggaacacaagacctggaacgtcacccttcggactgacgcccacgagcctcaacgtctcattcgcataggagacacccaggcggcgcacctgctgaatcaacgccatttccaacaaggccatgcgtgctgcgactgcatacgtcatgccatcgttccaccagtctgagggagtcaacgcattccatatcatgtgcgcttggctcacatactggttcaccagcgttgcgcgagccttctcaagcgtgtcagccaacgtttcaagcgatttaccggccatcaggactcagactcgccttcatcgacaagctcgacatcaacattaggcagaccatccacagcggacttggtttcatcatcccaacccgtagccggttccactgcggcaacaagcttcgcggtacccttatccgactggccggaaacattgaactggtcggcaagacggttcatatcatcctcggcaacatcctgagccgtatagcccatcttgtgcgtgagaatcgtcctacgcgccaacaagccgctctgatacaacagttggcaagcctgagcctgttccagcgaactggtcgtatccatcggcttccacaccatctcgaactcgctctgcgaagccttggagccgtccaacgccaaagccatacgaatcatacggacaataggctcggcgtcaagatcgttcatggtctgaaccttgaacttcaacgtctcacgcttcagttccgcaccactggcggaaccctgcacgtcaggcgaaagaatatccaacggaatgccggacactgcggcaagctgcttcacgtcggaaacaatgatgttctgcaaactaccggtatcggtggtctgcgactcccaaatctccacaccatcaggcaactgccacaatgctgccggacccatagcgaaacgcttcgaatagtcgatgggatcgccaacctcagcaagaccgttgatcacatcggggtcttcctccgtgtaagtctgcggaagatcacctttgacggcacgttggcggaacgcctgcatcatcgtgatgcacaggcggtcgaacacctcacggtcgatacgcttcaacatcggaagatacggctcgaacaagccttgaccgtcaaccgtgctcaaccggactataggcaatgagtcacagtccagagcgtaatcgtattcgtcacccttactatcatcccacttccagttcgttccaggactccacgccttgccttgattgatgaaaacggcaaggtccccatcatcggaaggattgactacagtacgttcggattccctgtacgccacacgcgaatacacacgcttggagaacccgtcatcgtcacgttcgatacggaacaaggtaagagtctcgacaccatgcttgtcatcatgcgaatacatgatcgccgcatcgtcattgtcggacatccacgcttcccaaggactcaacgccttgatataacggtttccctgcccttctccaacgagagcgaacgaacacccgtaatcgcccttgtcaggcagtagatgacggcggagaatgaacgacaggccacactgcttggccatctggtcggcatcggtatccttcaacgaggaatcctcaaccttacggaaaccattaggctgctgccggtcggtcacactctcgctgatacgacgcgcgagattcacgacacccaactggcgcatcagcttgtagacaggagccgcgttcgggtcaacaccctgcggaacgctgctcctgtccaccatctccttgccatccttgaacaacttcaattcggcaatatccaagagacgggaaccccactcctgtgccaacgacgtaatcacgtaagcatcatcgtcatcaatggatgccccgtcaatgattagctgcaactctgccacagggcacctcttccatcagtagattctcgacggcgcgcgacgcctcttctcctcggctatctccagatagcgggcgcgtgcgcggtatgcgagaatgcccgcgacgcaggcatcgatcttgttcgggctggccggtgattccttgagaatcttgtagccatacgatttgtccacccggcgcggataccggaaatggttgacgagcctcgggtcggcaagcaacgcgatgctgttcaacgctggctttctgccttccggctcctcatacgggtagcggaaacctgtggccgcgttctccgtggcctgatacatctcgttcttccagttgttcgtatagaacttgacgagatcgccgttcttgcgggggccgaccttcagtttcttcccgtagtccttctcccaagcgcctatcatcgactcgaagaaggccgcgtcggcaaagaagccgaccacgttgtacttgtcgagcatgtctctggcggcttggtcgaaagcgtcacggtcaaccctccacgtggccttctccggcccgtccgggcattgctccagcttgataaggaacagcataccatcggacaccctgcaaccaacgagggctgtggagtccttcgacacggaaccgtcgaagccgagcgttatcggctccttcttggtgacgaatttctgccaagcggtttcgagcttgcgggaacccagataaccggccatctcgtccttgtacaggacatgggattgaatgtcggactccctgagccaagcgttctgcacgctggaaagattgttcaggaagtagcgaatcgaatctgcgggatcggtgtccggctgatagatctggtcaagctgaccatccaacgtcaaccacccgtccttggacgggccaagctcgccatcggtcagcgaataacggccatcggcgctcagaccggtcttgttctcaatcggcacgtcggtaccgtccttgagaatgatatggtccttcccatcagggcttttcaaggattgaccgtaggcaatctcaagagccttggtcatcttcttctcgtccgagaagtcctccacgtccaacgtcgcgtacacatggtcgaagtagatgccggcacgatgcttgattcgtcctgcggccacatcccacgcatacttgtacgacgcttcagcgatactgccctcaccgggacggtacatcgtggaggtctccatcatgaacgtgccagcggtaccggcacgcttgccgaggttacgggccacggtcttgtacacgttccacagcttcggctgcaccataagatgcgtctcgtcggcaagaccacaggtggtcagctttccatcctgactggaagcgccagaagtgatgggcatgatgattccgccctcgggaagcatgatacgggtcgtgcccacatccatgcccatgcccttccaatcggacaaggggccggaatcgcagttgtagtagatggactcgaacacgttgccggcctgctgttcggaattggccaagcacacgacctcgggttgggtgacaggcttgcccacaggctcaccctcgtgatactcgtaggtctcgcccatgaacgtgtaggtctcgccctcacgcgcccaatggtcgaaacgacaaggaccgaaaccctcgaacatgccaacaccagcggccttgcccgacttgtcgcgacccttggctcgggaaaggaacagacgattgaacttgcgtttgccattcctcttcaacgcataggcgccgaccatgaactggtactcgtccaaatcgaaatgcataggcaatccgatgccgtcgccacgaccgataagcgtgaacgtctcaatccaccacaccgccagatgaccgagggaatgatcgtactcccactgcgtcagctggggaataatgtcatgcgccaccgttcaccaccctcaactgacggcggcgacggtcaacatcctccttcaccgcctcgccacgggtttccgggcgaccggttccggtactcatatcatcagcctcaatggcctcgatcttcgccttgatgcgggcggcgggcgtgataagaaacgagtcctcacgctgacgaatctcagcggccatcaccgcagaaggcttcgacatacgccagtaatcatccttcagcttcgccaaatccatcagcgaaaaccagtcggcctccatgcccatgcgcggagccataggccccgtctgcatcgacttgtaccagcgtttcgtcaagtcaagccactcacgcccatcaggacgagtcgcgggcaagtccagacccatcacggtatcaggactcttcaaaaccatattcctaccggccttgctacgaccggaatgaccattgccagccatgcttcaaccccattccgcccgttccgggcacgccgaagccaaggcattccgcctacaggcaacggttatggactagaagtcggttcgccaaagtcgcctgacgcgatttctccaaaggaaccttccacttaaacgccggaccatcaggcccgaaagaatcaacatcgaccctcttgccgcacacagcgcacacgccatcgcattccgcgatgacatccgcgtcggtgaacgactccacccgaatatccggctcgatatcctcggcctcgacctgcttgacgaacaagggggtttccggattggggggatacttcacagggtctttatccgacagccgcttgtacttgctgcgatgcctgccggaacagaaaatctggtcaacacgagacggttgaaaataatggcctataggacacaaacgggtacgaaacgggataatcggactccccgcataccggtcacggtcataatgatgacggcacaagccgcgcgcatacaccgtattcccgcagccggccaccatgcatacatagccgctcactgaaacgccggatgcgaataccattgctcttccttccggcgttcacgattcatgcgccgctgctcagcggactcctgcgcggttttctgcgaatgatggtacgggcacaaggcccacagattcgacggggaatcatcatcgggctcaccgttcttcgcgcgaaccttatgatcgacctcattggccgaatagccgcaaatatgctttgcccccgtatgccaatcagtcacaatccactggcatcgatagcggtcccgctccaatatctgcttgcgggtccgctcccatccgggattgaaccgtgcatcacggttggaagatgaccaagccatgatgactccttatatataaggggacggaaccggtgggagcgtggcgagcgagcattccaacggggttaatccaaatacaggggagttggcccacgggccaccggttcctagaggcaatcccgagaatcgaactcgaacctgcgctttacgagagcgtcgctcttccaatgagctagaatgccatgcctcccactagggggcgctattcagttattgccgtacggcatggcgtgaagccgccgccggcgactggcgatgactgagaagctgtcaccgccaagagctgcctcttctcaaggcatcgcatacccgggaagaatcgaacttccgtaaccggttttggagaccggtgcctgaaccactcggccacgggcatttggggtagtcaattgtttaggctggctgacataccttgaccagacagcggagagagtgggagtcgaacccacacgcccgtcagggcagactgttttcggaacagttgccgccgccaatcggctggcctctccaaatctcgcaacgcgccgcacgaatataatgcgacgatctccgggcgctacccgacgttctctgcgaccagggcaccctaggtattcagccccagtcctaacaaccagatatttggcactacattgcgattgtggcggcagagagaatcgaactcccattgccaaaggcagtcgggttacagccgacgcgcactccacgtgcctaccgccagaccccgattgtggcgcgacccgtaggtcatccacccccagcccctacgtagcaggccagatcgggaaaacaaaggccgcttcatagaaacgacctaggagactccttctacgatatgtagatgagctaagaattgcgaggtggtggattgcgttttaccaccaacgccgagcatgtgatgcactaaccgtgtaccgctgtagcgttcctcgtcacacttcccccgctaaagggtgccgctaagccgtgacgcagccttaacccggcatacatgcaatccgggtttattcagccaacctcataaagcatcaagggagcgaccctcgatacttcgcggacggtgcgagattcgaactcgcggaacgccaaaacgacattcggcggcttagcaagccactgcaatcaaccggactctgccaaccgtccacaccgcgccccggttcaagaaacgacaccaacactgtctgttgatgtgatctaaaggcgcggcaaaaacaaaaccccgacgccaatggcatacggggtgaataataatttgtcaagaatctgagctttgctccaatccccgacaatctatctacacgatattttactcacaacaagcgttgcggcaagcgttgcagtgaagaaaatgtgaaagaacagcactcaccacagaagcgaacggtttttccataatagccccagatcgcatccagcgtcagagctagagacccagcggccccgcgtcttgcccgtgggtacccttcccttgggggtggggtgtatgtgtcggcgtgtcgtagtgtggcgcgtggtatgcgcgcggtcgtatgcggttgtgagtatggccgtgtctgtgacgcggctatccgcgttgactgggtgtgagtgtggcgtggtcgtggccgtctgtgccgttgcctgtctatccgtccgtgtgagtccgtcacgtggtggtgacgtggcctatccgtctgcgtgtctgtgacctggtggtgtgttacatggggtcagccgcgcggtttttgtgtcgtgttctgcgggtttcgacacgccgaggaatgctagtgtctgcaatggttttagtggtggtttgcgatactgatttgcactccgtatggggtgcatgtatagtgatagctatcaaccacggaacgacaagaaaggaaccacgagatgaacaccacggagattaaagccaaggcctttagagcggcggtagacctagccacggtatgtaagccctgcacctatgacaacgtgcttgacctcacggccatgtccctcggtatcgagatggacgacaacgaggaataccccgccgagctataccgcaagtttgacaacgtgtggaatgacctcaacaagtaatcagcgcggccatagtggctaacgctagggtgcaagtccctagtcgcgcacttagtcccctctatccaaaactcatagtgagcggcgggtaatcaggcggacatgctcattgataactaaaaagtgttgccgaaagtcggttgtaatctgcgtagtgagagtacgtcaaacaaggttgcataaatgagttgcgtctaccggcgtctagcctaccgggctagtgaggataagagagcgggtatccggcatggaattgtccccgctatggacgttgccacttatggtggcagacatggagatatctcgatatcttcttgcgacggctaaaccgagcgtctggaattgtataattgggcccaccgatcataagtgaggtgggttatgagtctaagggagctaaggcagaagcgaggatatacccaacgtcaactagccgataaaatcgacggagttggctatgggcgtatcgctgattacgagaatgggcggcgtccgattgagggcatgtcacttggcgttgcgctgaaaatttgtgacgctttgcgcgtgagtaatcctcgcaaactgttagaggctgataagccaaaagaaaacactaacgattagttgttaggtgtgtgccctaatcaatctttgagcgtaggccggttagcggcttaatcaggtgcaaaccctgactacgcactgtggcttagccactaatttaaatgccccgcaagtgcgccaacacttgcggggctgaccttttcaaattggagattcaaagaggcgctacgattgtagcgcctcacgcggaagtgaggaaaccatgcgtaagtgtgtcgcggctgttgccgcagtaatcgccttgatgtcgttatccgcttgcggtagtgacactgccaacataccgccttgcgttaatgaagacgggtctggtcaggctggactctgctattgggactctgcccgtatgggcaacggacgcggtaccggcctgtacatctaccgggacggccttctgatcgacgaacgctactaagcgtttcaaccagttcaatcagtcgcgcggctgtctccgcgcttcatcaattcaagggagattcaacaatgtctattgaggaaatgtgggacgcgctgaaagatgattacggtgtgtccgagcagactttgcaagttatcaccaatatcaatggctacagtaccgacaccatgcatgacgtgctgtacgcggtagccgccgaacgtcacttcgatggcgaggtggcatgatggcacgctacttctacgctttccgctgggcttatggtatcggcacgacatgggatgatgggtcatggccgggtagcctctacgtgttcgactcgatggctgagcgtgacgcttgggttgccgacgacgtgtttgatggcaattggcattgtgaggccatcacgtcgaaagaggcgcgtcatatcatggcggacactgttatcggttgcgacaatgacatggccgtccggtacgacggcagtcggtcggctgtcgaacggtatgcgcccaccgtcgaactggtcagggcatggcggcgtgttgacatgcagaataacccggctaggtattacgcggagtgattgccgtgatcgaccactggggacgcggctatatggtgcgagtccgtcgttaaatcaatcgtttcgggacatggcattgaagccatgccaccgctgttttaagggagctaaacaaatgattaccgctaaggatattacggatatggcggagcgtgttgacgcgaaactgttgccgctctgtgactatgagggtttcgagccttatgagggcatctaccgtctgggcgattacgggtatgtcaccgaaaccgaatataacgcggctttcaaaggcgaaccctactgggcccaggacgcttacatgctggaaggcaacggcgtagggtgtggaagaatcgcccgactctacaacgacggcgacgttgaagcgttgtccgattacatcaatgagcgtttcgataatgaccagatggacgacgttttctacactgaagccactgaggatggcgagtgttgagagtccgtcatgttctgcttgtggccgcgctagtcgcggccattctctttctcaggtgggttggttttatccagccgactccccaatgttccacgccttacggcgttgatgataccgccacttgcgtgtatggcgattacgcctatcaccgtggcgcgcaaatctgacaatcgattttttgaaatgaggtaaacaaaatgaagaagctggctaatgacccgtcgcgtaacgtgaatgccgtgagcggcatgtgggttcggctacgcaaggacggctcgaaatacgacgtgaggtatgtcaacgctagggtgaagcgagtctggtcgttgtcccaaacgtctaatggtaccgcgtggaacgttcaggccaggggagtccagtatgaggattttttgaacggtatgaagtcaagttcggttgaccttgagcatggctggttgctggtgcctgactcggaacgatgtggaatcgttcgggtgccggtgcctgccggtatggacgcgaaacgtgtggccgccattaaggctgatccgctggttgatatgaattggcgtaatgatggtgaacggttcctgagcggcgttcactggccggtgcctgtacctgaagatgagtgcaagtgggctggtgaggatgagtttctggatgatgagccggcgccgattactcaggagattgctgaagtcccgcccaaggtcaacacgtttgccgtgtcctacgcgactctgcctgacctgatgatggctaaggaatgcccggaactgcaaggtttgggccatatcaaggcgttccgtaccagcaagggtaaaaaggtggcgtacatcgcttcggccaacggcaaatgcgtagtcgcctaccgtgcaaggtatgagcgtggcagtgacaagcagttagaacaggcggtggccgattacgtggccgttgcccgtgacctgtgggctaaggcggcgtgacatgagcaagctgagagacaaggccacgcgactgttgttgaagtccgcgtgggaaatggctgatgacaacgaagatgagctatccgccgtgttcgacggtcagcatggtttcacggatgacttacgtaggcgtgcgatcgataccctggagggtgtcggctgtatgcccagtacgccgcctgacaatgatgaaatggaacgtttgaccgctgatagcggtttcacgttggacgtgctggataagagagcgcgtgaggtttacgactgcgcctattccaccacgtatcagcgttatcaaaccgctatcgccatgcttatcgatgatttgctgggagtactgtgatggaagtcaggatatccacggcgaagattcgtgaggtgctggaatcgtccggttgcgcctacactgccgagaatatcgcggccgtgcgtgccaacattccactgcatacgtccgatctgattctggcggcgttgaacgccaccgatttgcccgataagcggtttgctttgccgctgttctaagttcttgccgcctggcgttttccctcacttccgctgggcggcattccatttttttaatccaatatggtatatgattgataccatctgttaaccgttaaggaggtttattatgggtaagctggtcgccaatatcgatgatgatgtcaaggcgcgtgccgccgcgctctacgattccatgggcatgagcctgagcaccgcagtcaacatgtttttacgccagtctttggtggacaacgggttgccgttcaggccgacgcggcacacgccggacggctatccggtgccgcctgttcacaatgcctacatgttcgagcgttcggagaagggccatgtgatactgcccgccgattggaatgattcggaggatagcgtctatgaccagtacgccaagtgaaccgcgtctgtatgacgtgtggctgatgtgggtggagtttcccgaccatcccggtatcggcaagccgcgtcccgtggtaatcaccgaggttgacggtgatctggtgtcgggcatcgtggcgaagataaccggcaacactgattgggatgaggccggcgacgttccactgcttgactggaaagccgagggactggcgaagccgtcgctcgtgcgctgttcgcaacgcttctatttcaacaagagcgaactgttgcgatggttcggacgcctctcgttgagggatgccgagcatgtcaacgacgggcttcaagccacgttggatattccaccatacaggcggagcgtatagccgttatcgttttcatggcctcatggacttgttctatggggctgttcttatataaaccatcatttagaaccgtactatgggctttctatggtgcggttttcatataaatcagcatttagacgggactctggagtggtctattgtcccgtcaatcgttttacgggacaatacaaaggaaggttttgtcatggaagacaagttggagaatttgcaggcgttgattgagagctcgggactgggggatgtacgccaaaaggtgcggggcatgcccgaggcgcgggtcctgtgggtattggatggatataaggttgatgggttgccgtccggccgtgagtttttcatcgaatgggattcgctggagcacgtgcaaaaccagttgagggagcttgcggacggcggctatgacgccgacgatgacgtggcccagatgatgaatgaccttgtgcctgtcgatacggcgtacagtcgtatgcgcaaggtccgcgccagcttgaagtttttcgccgcgatggcggaaggcgacggtatggagacctaccgtatctcccagcatgtcacgacagttgaataccgtcaggtcaaggctcccaagggattgaccttcgccgaactgtgcgattgggtagaggagaacggtgacggcgacctatacgacgttgacgatatcggcagtgacgtgttcgccgccagtcgccaggatggtacggaacttgatcccaaggagtcgaaatgattaccgctgtctaccgttatgagcgtttcgacccggccacgaacacggaactgtggcggcgcatacccggctggaggttgcgtctcatgtggcttcaggcatgggtaaagcgcgataaggcggctcgaatctcatatcgggcttggctgtacgccaatgcttcaggcggcgggcaatggttggccgctgacatgttggactggaatcaggaggtaatcaatggacgctgaacgtatgagagccgccttgcatgaggtgtggaaatactatgacgaggcgggggagagcggggagaactatgtgcttgcccccgataatctcgccaagttcgctaccgacctgtgcagggaatatgaggcggatcgtcattccagtgactgaaacggtgggaaaacggtgccggacgtctagctcacgtccgacaccagcctttatcaatcaattatctctgaaagcaattaattggaggcttatgcagcgtagcacaagcctccataaggaggaaaatcatcatgcaggatgtgaacatcgtaaccacgggtgatggcgtcagactggtcagcccatatcatcccgattgtccgaagaaggcgaaggccatcggcggcaaatgggatgcggccacacgttcatggaaattcgacgcgagagaccgcgaaagagtggaacagctcgccgccgaactatggggctggtcggacggtagcggcgacacggtatcgattcgcgttaatgcggacgactactatgccggagaagagattcgcgtggccggacgttgcgtggcccaccgtccgggccgtgatcacgaggtacggctcgccaacaacgtcgtcattgttaaaggagagttcgccccatctggaggcagtgtgaagtacccgcaggtcggggaatgcgacgacgtgatattggagattcgtgacttgcccgcgactgcgcttgacctattggacaagtccaaatacgagctgattgacggctccccgctcatagcgctcaggacggaacgccagcggctcatggagcgtatagccgatatcgaccgtcaactggcgaaggtagaagcatgactggtattctgcctttggtgcgtaacctgttgactcgcccggatgccgaagctctggccgaggagtatctggcgactgcacctgatgccagtcgcggcaagtacaggcgcattatggagaaatggttcgaatggtgcgccatatatgagttgaaaccgttggacgtcaaaagggtgcatatcgaaatgtacggtacctggctgagaagccaaggactgtcgaaaggcaccctcaaaaccgtgtattcaacgatctgctcgtattacaggtacctctacgaggaggggtatcttgaccggaaccccggattgcatgtgaaacgtccccctacccgtcactggtctcagggttcgtggctgactcgtgacgaggcgcaacggttcctcatgctcgcggaatcacatcctgatgatttcgtgcccggctgctgctgcctcatgctgttgaacggtacgcgcgtgggcgaaaccctgaatctggatatcgaggattggcataagcacgagtccgtggaaacggtacgagtgcatcgaaaatatgattggatgcagaatctcgccatcagtgaccggacctcgcgtgcccttgaacgggcatgtaggaacaggaagagcgggcctatgttcgtccgtgggggagtcagggtaacgcagcctcagattctgtccgtcgtggtcagattgggccatgaggcaggttgcccggaacgtatcaccagtcattcattacgccgcaccttcgccaccctcgcccgcgaggaaggcgtgccggatatccagatcatggcttctggcgggtggagcagcagggaaatggttgattactacgacatgggtcgattgtctgtcactgataacgcaaccgtgaccgtgaccaaggcgttggagaataataacgaataaccgtgaaaagtgggcctgattatacgaaaacatggttctgcttcgtctaaacccgcgaaaaggaattttttattgctttttcgctggtttagtccataatggacgtgttagaagccgtcactgcctctcatggaagcacactaggacggcattcctatcacagcaggtagtggcggtggaaatgcgctacgaatacgtaaaactccgcccatgcctctatagtggtcatgtatccccgaagccatgcgtccctcagtgcgcgatagaaacgctgaacgattttaccgtccacgccttttgcgtaacgtgtgatgaacctacggcacgcatggttgataatcagaatcagtttcggcgtgaaccatataggccactggttgaaatcaggcaaatcgcctaatgagccagccgtaaaaatggttcccttagtcatgctgttcattgtttcctcggtcaatgtttcctccgattctcgataatagcgacggctcccaataggagcatgaacaagatgattggcactggttccactagtggagcctccgcatccagtacagggtgtccgccctgcgctccaagtcgggcaggccataagcggcacgatatgcttgtttggtgaggcagcagcttgcgcgggcacgtctcataccccagttcgactccgtcaaatactgggagacggtcagcgtgtgccatttcatgtagccgagatacgccttgcagcaaccgatcatgccttgttggagcctgacgctactgcagaacaggtcaggctggtagtacatgatcttgcccagttccgtcagcttgttgtttacgatcctgagctggctgggtagagtcatcggttggctcatgagtccgccacggtgattacgtgattgtcgttgagtttgagatcaataccgccgacggtgacgcgaatctctccggtgggaatggtcatatattcacgggttatgattctgctccctggcttttgatactcattgaacgtgtattccgttcgcatgtcgatttcaatgtgttcgatcatgcccctgatgacgcttttgccgacctgtatgatgacttttcttcccagcatgcgaggtgacaggtctgctgcctgaatggtcttcatagttcccccttggctttgcgcatgtaatattcctcagcggtcaacacttcagacacatgcatgccgtccaccatttcatgccacgtcagccacggggagaaagcaataatgccccacatgactgtttgccatgccctgaggtcactgggcttatcccacgagtccttaatcgagtcgaattggcggcgaatgcacatataccagccgttcaattcccccgcatgaacacgcagccagtattcccccggtgccttcggctccacgatgtttggacgcggcttctttggtgcgggacgggtcgcgtacgcgaaattgtcgtgagtgacaacaatggctacatctactggtgaattgtttttggacctcgtaatcacgtaggtttctgcgccagatttacgatggtcaacgctggctgcgtccaaaaaccagcccttaaacacatacgtgttcgtgctgcctttgacgtgaatcagatcaccgggcttcaggtcatcccatgcgacgcgaatcttcttgctcacctgtggtcctccttgccgatatcgctgaatcgtgtgtaaagccggtcgttcacgacgtacgtgttgtaatcatcctgttggatgtaccaccagcggttttgatggccggccttcagatactcctcgcacgtgtggtcgatggtgttgtcggggttgaccttctgcctgaacgacagttcatcgactacgtggttgccggccacgagatcggctatccggtcgatacgctccggcgtgaaatcgggggtgaccacgtacacgacacgcaccttctgacggtcgaaccatttgcggggcaatgccaacgccacgtcatcggacaagctcgtgggccgcatgtgatacactacgcggctgaacctgatctgctgcatgacttgagccacgttgcgtctgcattggaagtagctggtgtgcatctcggtttccgtgagccagtctccggccctgtgtatcgcctcccggtagaaggcgacacgtttcgatgcttccggctcgcgcatggggaacagggggtctccgccgccgctgaagctcaggaacctcatggggtggtgttcgctttcacggctgatggtccgcagcgtggcctgcatgtctgtcaccggcacgttcaatccggttttccttacgatgcagtaggggcatgtccaatgacagccgaaattcgtgataaccgaataatgtccgttcattgtgtttctccgatcagttgttccatttccctcacgttgtcctgcttgcgtttcaacgccacgcaacgacgtatccactcgtgtttgcgcttatagacgtttgttatctccacattgctcaacagttcgttgcaggagcagacaagctgggggatgtccgactccgagtccgtttgcacgacgggtttctccccgcaggcggggcattcgggaaccggctcgtcaaccactgccttcaaccgtctgcaaccggtattccacttctgaacgccctcgtcttcaaataacgaggcgaacgagctgatgattgcggcgtgatcgcaccactccgagagctgccacacggctttttccagatagtagtggcggtcaagagtgatgtcgcgtactacatacttcggtttgggtctgcgcccgcagatagggcataattccaataccggtggttcaggttccggtttttcgaccggttccggctcctccaagtgcagcagtcgtttcagccagttcacatgcccctcaattccatcgactcgttgaacgccttctgaaacgcttcgacagccgtcagttttcccatgtcagtctcctatgtaagtgcttttctgaatatccatgccgtactcggtcacgccgcgcgtggtgacaagcgactgatattccggggtaatgaggtgaatgtccaccgcatcgttcctcatatcgtccagcgacgtgcaatccacgtagatcacgtagggtctgccgcccaagacaggggacagggccttacgaacgtcggccctcaaatcagggtggcaagtgttcgcttcatcgtccaagtaatcggtcattcgctcaccttcacccacaggcagacgaacaccagcacgagcactgccaatacaaacggcacgtacagaggaagcagcaccagccaccaagcccaatcgatcacgtggcagagcttcaacacgatgaacacgatgcccaacagggcgaataagccgccgccgatattcagattcacatgcttgccggtcattcggctgtctccttttcgtccgggtccacgtccttgacgggtatttgctgtatggcggcgatattgtggaacgggacgataacggataacgggccgtcctccaccagatagttcggcgcgtcatcccattccgtttccgaaagcagcacgcctagttcggggatgatgctcatgccgtgggcgatgatggtcttgcctccgttcacggtggggtgaatcaggctcacgtacacggcctcgataccgagatacgaggggatgtcaagttccttggcttcggaaaacatgtttgccataaattgttcctttcaatcgttgatgctgagagcgggctggttttcgagctgggccttgaactggcgttcgcaccagcggcgatgcaatagtgcgagtccggctcgggtgactcgcaccgtgggcgcgtatgcgaacggggtgccgttcctgtgttcgccgtgcgtgcgatgctccttcatgacgagatggccggcgttgacgtggttttgcatcgctgcccacgcattgtctcgacggtagacccagccgagagaacgcatgaactggaacaactggtctcgtccgatattgcccgctccggcgttggtaagctggttggcggcttcggccacgctcatggttccggtcacgttcgtgaaatcgtccaacgccttggctttgggttcaagctccgcgttgcgtgcggcaagctgccggttctcgatctgcgtcttgtccagttcggtgaggataccggccacggccttcggcgtgagcagagccgtggcaagcgccacttcgaaggagtcggtggagtagctgccggtctggcgaatcgatggcagcacctcatgcgtcacccagcgtttgaactcgcgggcttcgggcttgcggctgcgtaacacgagggagtacaagccggactcggacacgaaaacgggtgccttgccgccgttctgggcaatgtccgtagtacggatattggtgatttcatcggcatcgaggtattcccgaatatggttggtggccgtaccgagaatggcgcatacgtccgctccaaggaaccacgggttgccgtgttcatcggttaggacacgcacctgaatgccgttgaagtcgaatggttgaatctggttgctcacttggtgtctccttccttggactggttttgcgaaacctgcatgatctcccacacgtccgcatcctccgacaagccggacgcgagacggtagaagtcactgaacctgtaaagcggattgctgtacgcatcctcgccctgctgaggcaactggcctcgatgtatccaactacgcaaagtgctgcggttcacgcgcatcccgcacgccttgatgatgtccaacagttcgccacgggttctcaccgcctccgattggaggatacgtttcacccgttccgccctgataagggcgaccggcatactgaaaccgcatttcgggcatttcgccgtctccgcgtccgcatagcaggaaagctgacccaagcacttgtcggccgggcatggcccgtacaatacggtttccccgtcatcgtccgtgaggaaacgacgcagcttgcgtgtcagactgtgaaccagttccgcatacacaggggtgctcgaatgctccacgagtttcggatgatcggcgatacggcgaaccatgtccgacagtggcgtggactcgggcagattgatcttcagactgcgcacccactcgtacaacgtgccttgcaaccccggataaccgtggtcatcgtccgcgtacagcagatcatgcagggcttcgcgcaacggtgcgggagcggtgccggattgaccgccgccaccgttcttgtgcccgtaggcgcggttgaggcgatactcgcacaggtcgggcagactgcggtccaaccatcgcaggtcgccggtcaactggctggcgtgcttgtcgcacaggagattcagattcggttcgacgccatgtccgataagcggtgacggcgcgtcggtgacgatatcccgccagcaaccgtggtagcggcagagcctcgtgttttcaggggaaaaagacaaactgacctagaccttcactcattaagagcttcggacgtgtcagcaagaccaataatgcacgggcgtctctagttttccaaatgtggttcggcgtgtcgcggcagtatgtcacccaaccccaagtcgcccgcgccgaggaaatgccgtaccggtgtacgccgcttcggcttcgccggctccaactccaacgggttgcgactcgaggccgtgattcgagccgcctcctcgggttgacggcccaacatgcgctgacgccggtacagccacgccgcgtcaccctccaagccccgcgcatcgcactcacgcgcgatctccgcctccgagggcttcgccttgccgcgcagtcggcggacgatggcgttgatgtcacccgaaccacaccaacggccggtatcgttctccgcatagaagcgtctcaccgcctcctgagcctcggcggcggtgatgtccgtcctcagttccgaatggaacgcttcaagctgaacgtcatcccattgcgcgttgccgtgatgcgcgttgataagcgacaatacggctgctgcctcacccctgctgagcattgaaacctccctgctgctggtatcttgcacgttcctcgggtgtcatgtactgccatgttttcgccagattcgcctcaaggttctgctggcttcgggatttcaacggttgccctggtcgtggcttcggcgcttcgggcttgggtttctcccagttgcgggcgtacagttcaccgccgatgaaccggctgaacgttttcacgtactgctcgtcggtggcctccgcatacgctcgagccttggcttcgagaaacatgctcgggtcggagtctccagcggctttcacgatcttcggccaatcgacctccagctgcatacgggactgggaggttttcccgtcaaacctgttcgtcggatagaaagcctcgatacggtcaagcagattaccgaagtccggcttcgagggggtagggggagttgaattatctttagataattcttctggtgttctggtgttctggtgtttgtcccgattcagacgcgattcagccgtctgaaagttatctgaatcggaggttttcgcctcgtttttatcttttcggtaattttcagcattgctttcgcgcttcttctgcacctgttcgcggcttcgattgtgtgcgagatagccgtgaatgtagtacccgttgttcccgtccggctcgatcatgccgacttcgcaaagcgcatcgatttctgaatcggtgatatccaacacgtaaaacgcatcgtcttcgctgatatgtccgtctgaaagattgtctccgcagaaagtaagcatcatcgtgaacgcgcctattgcgctcgggcatgtgtgcctgagcttgcgtaccttacggttcatgtagaagctgttgaccagttgaacgtatcctttgcgtaccattgtcatgctcctatcagccagtacgtgtaatcggggaacaccatttgcatgaacgtccagcagacgccatacgttgcggaagccgctatcaatccaaaggagaaagcaatgattatcatcacgtcggcgacttcatcgaatagggatatgccccatttcctgaataggtagcggaacacctgtatcccgatgatgaagagcacgaccagttcgatgaaatgcgccagacccaccggactcattccgtctccttcaacagttgacgtagtgactggatggcattctcatcatgggcttcggccatactgtcccagaaatcatgttccacgccgatagtcgcattggctttcaggtgaatcagagtcacccaatcgtagggggagcggatgtagtcggttagacaactgtctgcgtgccaagggtatgcggcgaagctctctccgttggctttcgctctctgtgcgtaccatagggccttctgtaagtcctccttgggatgccccttgtccttgtggcgccacacgtatttgatcatgttgcccacgttgaaactgtattgttcggccaataggatgcattcgaacgggccgttctcgtaatagtccgggttcactgcatctgccatgatcgtctccttaacgtcttgatgaagttgtggcggcttcgccagtccgatggcgtgccgctcgtcgccgtgagcagcacgccgttgtcgtagactttccagtggccggtcgtggccctgaccaccgtgtatccgtgtgaggctatccagtgcatgagtttccggtcgtccccccgcgcggtcatgctttgagcctcatcttcaacgcgagaccattctcatgcacgccaccgttgtcgaagcccatgaaaccgttgaacagttcgtattcgagcagggcggtgtccacgcggaactcgtcgtactgatggtttttgatgcgttccatgacaagcctcatcgatgcgacggtatccctgcggtcggcctgtatgggaatgagatacggccaaagattccattcgcccggatgatcgttcagccaacgggcgaaatcaacgagtttcctatcttccatcatttccccttaggagcgttccctcacgatatagtccgggtgttcccggcaatagtcgtatatcagtttcaaccatgcgatggcgctgtccacgctgccccaatagttcggcggattgtatttgccgcgcaaaacatacaatggttccaagtagatgtctttcaacgccttgtcggtacgggctgcggcctccccggccgtcaacccgtccaggtcatgcttaggatggaccttgtaatcggtgaaaaacgcggatagattatacgtgtagttgaaataatggccatgagcggtccgcacatgctcgccgtcccgttcgcatacgtcaaaccattccggttccggcacatccttgtccactatgaacaggtcgtagctcattcttcgtctccttcgatgattccatgtcctgctatcaatgcgagggtctttaagtcggtgagcacgggctggttgtccatgcttgacaacgtgttcaagccgagacccttatgtttgaacacgacgaaccagtaaggtgcgtcagcgttacccgcctcggtacggccctcctgcatccactccttgagtctccccgtataggtgctgtagtttttacactccaatacgaccggctggccgtggatacgcagaccggtgatatcgccctggtctttcgtcccatgcaacacttcacggtgtatcgtctgctcgctgtcacccaaccgggcgcgcaaatagttgaccaccttggattcaagcagtgtgcctttggctttctgtcggctcattcgtccatccaccattcagtcgggtcatcgtgaaactggcagtccacgcagtccccgaatacgttcaagattcctccgcagtacgggcaatgctcatactggacgggcagataactcggtctcataatcagaactccgggttgtctcgtagtcgtttttgcacgtccccgcgcatctgctcgatcacatcgacccgaagtccggtagccaagcgaatctcctctgccggacggttcgagtcttcaatgagcagttgccatgctttacttttcgctttgctcaacatgagcccccttctccaaattagagctgatacgcacccgatagtcggtgatgctccaagtcagatggttcaactgccagacggtgagtccaagaaaaaccagcagacaaaacgcttgaacaatggccatcatcgtattctttgacgtgatgcccaccgcgagggagaacgagcaaaacacgtcccaccccaaataccggtacacggaccataatccgggtttgctgccgtcacgtcgttcgtaaaccgtgaccatatccttgtcactcatttcgattccttcttctgctcctgttcacgccaccccatacgccttgcaatgggtagccgctgattctgtcgtgttgcgccgcgtaccgtgcgcattcgcatatcgccggacattgggcgcaggccttgagcgccaatcgttcctcgctggacgtggttgggaagaacaggtcagggtccatgtcacggcacgcggccttgtcacgccagccgctcaattcaattccttcttcgcgttttgagactacttacgctcatgattcctccttgagcgtggcgacatatgcgatagccttgcgttcacgcttcgcatacttctcgcatttgcgtttgagacgtttgaggctcatggcgtacaggaagtctctgaagttgccgtcttcgcagattttggcttgataacggccgtagtcgcttcccgcgctgatatgcgcgaccaaatggtctgtaagctgaatctcgttcatgcgttctcctttcgatatgggtttggcgtgtattcgggcgattcctcgccgggcatgggattcatgttcttgacggcttggatatacccttcttcccatgctttttcggctgtctgccggtcatgctccttgagccatgcttgataggcggctcggccttcctcgatggttgactggcctgtaccgaagcaactcaattcgacggcggattggaccaaatcgtcatacactcgtggtttcattcctccacctcggtttcctcgccgtactcgccgtagagttggtctgccgcatccttggtcgtgtagaggcatttcgcgggcgcttgttcgtagtcgtagatggcggctgcgacgacctctcgaaactcctcgcgggtgaatgtcctcgccttatagctcatcgtccgtgctcctttcggtcttggagtcccagagtcgttctcaactgttgcaggcagctgatggcgtacagggtctcgcggtccaccgtgccggtgggcaccacgctcgaaagcgcctcgtccagttccttcagtctggtctcaagatcctcggtgcgggtccaccggctgatctggtagccgtggcggctgaggatgtcgcacacccgttcgaacgccttggactgtgcctgtatacgtcgtacctcggtgggttcctgcaactgttcgagctgttggagccgcaacgccatcttcgtcccgagcgcacggcctatgcctttcatcgcctctcgctgtgcgacatactcggcggcggtctcgtaatgcccgtaccggtccggccgttcgctggcggcgacctttttcagcagccggtgttcgacctgccgggtgtcaccatgacttgggttgggtttgcgccggtatctcaacgtgcgtttggacgggtcgtagtacatgaggccaaccggctcgggcacctcgctgcggtcgatcatgcgggcggggcagacgagggtgagatcgtccacgtacttcttgtagcacaggtatttcgcgtcgcggaggaaatcgccgcgactcaccttgacctcgaatccgctgatccatgtgtccccgcgccagttgacctccaacgccacgccgtccagacgcagcaccgtgtcattcggctcagtgaccgaaatctccgaccaatacccgtcaccgtcacgccggtaacgggaggcgagtgcgcaattgatgtccatggcagtcacgtcaccgttcatcgtctgcctcccatttccttctcgtgtgccatgatttccacgtcattggcgagcattcgcagtatgccggcgagcgtgccatacgattcggcggtcggatacaccgtcttgctgacatacacgtcccacctgtcggagccttgatgattgtcggccttgaggatgatgagcgggtcggcgtcgatgaaacgaccgtccttcatgccccgcactttgagcatcagacgtatcgaatccgcctgctcgctcgtgttgcccaaaatatccagagtgctcatcgtctgcctctcagttccttcttctcgttcgcgatcgattggaggatggcctccaggtcgccgagctcgttcctgctcaaccggatgcggcggatgctgtcgccagcatgagtggccagcacccatgagcgggtgccgtttcggccgtctccgggaatccagctcagggtcacattcccgcaggaggcacctgtgaccatgccgcaccgtcgttcgatctccacgtccgtccccctcgtcgccttcatcgtccgtctccgtgaaatcgttgagcgatgggctggcacagctcatatcccttctgggcccacatctccagtgttttgaggatcacgagaatcgacagtgagtcgagcccgtcgtcaaccagtttgggaatgttgctgtactgtgcgttcagtgtcgtatgcccgttcttgccgctggtgaacgtgaatcccagcatgtccacgggcgttccggtttcctccggcgtgatggtcaaccggaccttgaacttcttgcccaacggcatcgccttgtcactcatcgtccgcttccttgattgcctgttgcagtgcctgcatgagtaaaacgactgtgctcaaccttgatgaagctcctcatgtcgctcattcctccgttgcctccatcgggtaattgatgtccacaagcaactgtggggaatagctgatcagcttcacgagtttgaacggcttctgcgatgtcgggactctgaacggaggctcgtactcccaccattcgctgccgtcgtattcctcgcggcgcaggaacccgccatcagtgaacgccacgaccagatcggcggctatctcctgactgccgtatccgtcgtcgtaatcgatgtcgagcaccttttcggcctgactccacggaattcccagcctctcgtcgcgggagcctacgaatcgaacgtcatcggtcgaatgcttgcttcgtgagatcgcactcttggtttcatctaaaagattcattcttccgttgcctttccttggttgacttcgtaaaccgcgcgggcgaagccgagcggcgtcttgcttcggttgttggctctgtccttgccgctcatgtaccagatacgattccggtcaggagccggcaggctcatgtcctggctgcgaggcggcatctggaatccccccccgtccaaagacaggttttcttcgtgtagttgtcctctggcgcataccgcgtgtaatcacacgggttgaacgtgtgggagggcttgccgaacacgttggagagaaccgacaccgggttctccaccatgtaggggacaccgctcatctcaccgatcacccggcactgctccgccacggaaacggccttcgcctgaaacatgtggtcggcctcgtacttacgggcgaaccattgcgctccactcaccgccatatccgtacatggcgggaacccggccacgaacgcgagccggccggaacggaccagtacgctgatctggtcgaacgcttcctcgatggtgcaagccagtttcaggtaggcaccgtcttcatggtcgcaaccatgctgcgggtccaccaacacggcttgatacccgtgttccacccaagggcgggccatgacaccggtcaggtcgcataggcacagaatcgtgtcacgcatcattcctcgatttcttcgccattcgttgcagatctctttcgcagagccgattcaacacggggtatagccatgcaggcggggtcatgggattccacacggggcatttcttccagtgttttcggctcggggggcatccgtattgcccgcagtagggacatcgacggtttcggcattccaattggccagtgcggtgaaccttgatccagcgtttctcgcaccagtcacagcaatgagtgcttcctgtgagcaggcgtaagacagtttgcggaaacgatggaggttcatcaatgatcgggtggatgttcatgcttccaccgccttgaccgggcggaacggagcagcaagccgagccagagcgctatcagcggaaatccacgatctgtcgaagttccattttccggtaccgatacggatacactggatgcttccacccttgaacatccacgtgttatcgtccttgtccaaccacaggccaggctcgtcgggcagtctcagtctcagcttcagacggagagcgtaggcgaatgacttagagccaatccactctctcacctcaccctcgatgctgacttcgaaaacgggacgcccacgcctcggatcaacgcaccggatgtcatagcggttgccgctcttggcgacaaagatatcgcccgcgtgcacgtcctcgatgttgtcgatacgctcgtacttggggtcatccaccaattcgatagactcgatgtcggctttcgggacgaacaggtcatcgcccattcctagggtgagaacgtaagcgctcttaatatcgccgttttcgccagctacgccggttgctacgtccccgttcttgaacgtgaccttgatatgtagtccggccatctccttgcaggtcttgccttcccagaatggtttctcactcattgatagcctccttggctagttgtcgtttacgtttcagattcgccttatactgggcgggtttctcgggatgctccaacatccaacggcgatggtattcagccatctcacgttgatgggcggcggcatacttacgagccgaagcccgagcctgagccaaatgctccgaccggtaccggcgtgcatgctcattgcgtttctcacgattacgagcgttccgctgattcgccagatcacgcagatgctgcgcatactcggggtcggttcgacgccgttccctaatacgacagttccggcacatgccatccttgccgacccggtacgtgcagccgcaccaatcgcatttcggatgacgttcagttatcaggccggacagttcgccgccgttccggcaatagtcgatgaactcctcgtcggtcatgtcatcgacgttcacagccacacctccccattagtgaacctgcggaacaacacagggtcgagcttgtacaacgtccgccgaaaactgcgggtcacggcagaacaggatgaacaacaggcttactgcttcggcggttcgcatcgcgtccaacctcccttatcgtctaaaagcacccaaccatgttgggcggtgagaatcggcaccagttcggggtgatcgttgaaaccgctcacgatataccccaagctcatggcctcacgcggatgggcgtgaatccacccatgacatcccgtatcgccactcccacacgccaagatgaggttcgacgcctcatgcagtcccggccacttgtgtgaccggagtctgcgatgatgccggctgaaaccgctccagtggaatggtttgccgcagcggacgcaccggtattggtcgcgtgcgtccaccaaatccttgacgtgttgggatgggttagatctgcccattcccgtattcgtcctggggttggctccacgggtccgcaggctgctgatactgctgttgcggttgctggaagccctgttgcggctgctggaagccttgctgatactgctgctgcgactgttggaaaccggactgctgagactgctgggccttgggtttcgcgctcaacaccgcaatggtgcgggccgcgacatcccaattctcataccgtttcccatccttctccgacacccttttggacaagctgccgttcacaagaaccttcacgctcatgttcggctgggacttcaactggcgaatctgattcaaagcatccttcgcctgattcgacaaaggacgcacgccatagaactgaggctccttgtcaacccactggttcgtgttcttatccgtgtaacccggatggacgctgacgttgagaatactggaatcctgaaaatccttgatctctcccgcatatccggtaagcccgatgcttggttctccggccattacgcattcctcctgtaattgttcgtcttgtgtttctctatggcccgcttgttgcagaccagcatgtgtgattgggctccggcgcaatcaacggcaccgcatgtggggcattgggggagcgtgatcttgtccccgtgagcccacaggcatctggcgcacttgcagccaggtttcggtgtgaagctcactggagggcaggctccttctccttgttgcggttgtacgattcgatgaatgtggccgcgtccgattcagacagtttcccgtagaccacgttgcgttgcagcacgctgctgatgaaaccgttctcctgaccatcgggaatacgcatgatttggagaatccggtcaatcgtctgctgctgctcgtcggtcatgcccttggtggaacgcttcttgtagccgctggtctcaccgtcatcatccgtggtcgccagtccgaacgcgccgcaagtgctgtagcgtcgcgcatacgtcaacgcggaaccgagggcctgcatgacgctcataccacgcgaatctcccacctctacggggataaggcaattactggcaatccacttgtccgtgcccttcttcttgacggccgtatccacatacaggcgtccgtcaatcaactgggtcggccattgcagctcgtagccttgctcgtccacatagttcacgacctgagccagggtcgcatacgtgccacgcccgcccttagcgtccttcttgattaccgccatgattcgatttcctcctcttcctgaaccaatctccaatcggggaacgcgatctcctgcggcaccttcgacagcccgtagccacgcatcgcctccaacgggtcgggatacaggtcacggaacgacttgatctgcttcaacgccttacagattttcggttccgccagttcggtgatgatgggcgaatgctcgtcaaaccgccacaccctccaatcgaacggcggattcttctcctgcacgacgaactcgaaacccaacggccccttatattcgggcatcgtcaaccggtagagacgcatgtagaacgcggcctgaatgtgatacccgtactgccagcaggaacgctcgaactcgtccggcgacttcaccgtggtcttgtaatcacggatacgcagcacaccatccgggtcgggagtggacggcaaccagtccgccttgcccttaatcaacaacccggtatcagggtcggcggcgatcatcgccacctccggctgaccgtccagcttcgtgaaaaagtctccaaccatgtcccgcatggcctgaaccttctccacatcatcggcggacagccacacgatgtcgtcagcaccatactgttcgaccagcctgtcacgaagagccttgccctccttggtacgcagattcggtttagccacaacctgcgggccactgcccaaaaccatgctgtgagccgccttgccgaactccaacgccgaagaatacccatgctcaccggtcaggtaatccgaatacgccaacgggcttaccagcattttcttcaacgaagtctggtccaccgcgtccaacgcgaagtaatcgtcatcggtcatctgctcgacggtcattgcccctcctttcttgctttgagtacttccttgcctaaaaccttgatggtgtcggccaccgagtcgagaaaatcgtcaacgtcctccacgtcgtagacctctccgtaaagcagggaacgatacgtgcggaactttctatgccggacatcattcggggtcaacatgagaacccctcgactgcatggacaattgctcttcacgttccatcaggtgactgtggcgccaagtgcgagccttgccctgcttgtgtgacgcctccgcataatcggccacatggtcacggccaacatccccgacgaccttcgacgcctcgttccaatccgagtacacgcgatcgttcactgccacatacttgtccgcgagataacggacgcaatcaccgagataacggatggctttggcgatggagttgaaatcagatgccatcagtcggcgtcctccgtgttgagtagtctcatacggtcgaatggggtgagttccatgattgtttccctccactgggcttgattatttggtcgtccttctacgccggtgctgacacgtccgaaacccttttattggtttccgacgcaaggacgcgaaggggttaaatttttctgagcgccaagccgggagtcgaacccggtgcaccttggagaagtccatgaccattggaaggcttcgtaggtgcggcaccatgcgcttggctgccaccggacgaggaagtaaaggaataaagaaccccgcccggaagaatcatttgggttggatgagggtgttggagccctcgggtgcgacgatcagctggtcggcattctgcagggcgtcgatgtagtgctgtttcagcacgttgtccgtcagcgagtcattgagcaccttgttggcgtcggcctcgccctgcgccttgatacgtttggtctcggccttggtcttctcgacctcctgctcgttcaacgccttctgcttgtcgatctcggcggcctgcgcctccgcgtacttcgaggtgatggactgcgggtagcggacctcctgcaccgacacctgctcgacgcgcagacccatgcccttccatttcgcggtcaacgccttctgaatggcggcggtgtacttgctgcggtcggtcaacaattggatggtgtcgaacctgccggagacctcgcgtggcacgctgcgcacgtcgaccgccgccaccgatttcacgaacgtggtctgcttgccgtagtccttgtacaggtccgtcgcgtacttcgggtcgagcgaatagttgacctggatgtcgatgtccgcctgtgcgccgttcttgtcgttgacggtgacctgcgggcctcgtgcggagcctccgtcgtagtcctccttgcccttggccacgtagctgatgacgttgttgcgggtgtcgtatttcacggtggactgccacgggagcttgccgtgaaatcccgcgtcggcggaatagccggcgatggagccgcccatgttcttcaacacggtcacctcgcccgcatcctgcgaatacaggcacgcgggaaccatcagcagacccgccacgacgaggggaatgaagccggaaccggctccgtcgccaccgttggcgagtgcgacggctatcatgccgactccgatgagcaggagtattacggcgagtatgaaccagatcatttttgtgttcctttcgacaatgcgaacgagagcatgacgggcgaacagcacatgaagcctgcgagaatgctccacgggcccgcatagggttgcagtgagagaatcaggaacccggtcgccgccaacgtcagacaagtgattgtcttcgtgttctcatgccggtgccggcgttcatcaggtgaatgctgccagccggagcagtgagccccatacgttttcctgttcatggcatgtcctttcctcgtggccggactcggattcgaaccgagaacgtccttgccgccaccgtgtttctggtttctgagagatggatgacgagtcctatggtgtggcggcgatggtgcgtgtccagacaccccgaagggttccggccgatggttgccgcagcagatcgcagtatggtaatacttgtagttcggcatgttcgggttctcgcaacggcgcttcatgcttgaccagatcatgtagaggtgtgagcgactctccttctgagtcatgccgtcacctccaagtcaggcgtctcagcgccgaagaacttctcatgcatgtccactgggatggtgagcagttcctcgaaactgactccgagcgcttcgcagatcatgtccaattcatcgactttgaaggccggctggccggcgagtcggcgggatagtttgcttacatcccatccgagtttcgctgcaagccatcggaggcttttctgtgcgatgaagagtcggtatcgaataccggctgttgttagtttctgtgtgctgctcatgtctattaacttagcatatgccaagtttctgtcaagactagacacgccgtatcgcatatgctaagatttaagtatggctaatccaaatgatttccgcgaaatgtctgtgttcgccttggcatttgcgacggagtataaaaagtacatgaaggcgcacaaagtaaagcagcgtcagattgctgaatacctcggtttcaccgaagcgtatgtcagcgaaagggtcaacggcaaaagggccatcgacaccaacgacgtagatgctcttgccgcattgtcgggcaccaccggccgttcgctgatgatcgaactggctcgcctcaccaaggaaacattgcgccagccggtatccgagacagcctcggtggcgtcccagctcgaaaaggtcataggcaagaagatacaggtggagaaggccgcttatcgggatgagaacaagcaggcggagtccgggcgtgaaaacatggactgacctcaccattgaggcccgacacatgggagtcctcatagaggataaggagttcgacgggacgcagtgcggggaatacgatcccgatacccgcaccgcgtacatcgaccccaccatgagcatggaacaacgggtatgcacgttgcagcatgagcttatccacgcaaaacacttcgatgacgggctcggattactgagccgggagaaagaagaacgcctcacccgtaaggagaccgcgttctctctgattaatcccatcgaatacatgcgcgcggaagacctgtacgggggagaaccctacgcgatggcgcaggaactgggcatcaccgtcggcgtcctgttggactaccggcgatggctgcatgacaatcttgccgtacgggccgcatgattatgtaccttatccgtgtttcttgcaatcagggaacacggttcgtggatacaattagctcaccaaccccaatggagagaagagacaaaaaatgagtgaaccagaacaaccacccgtaccggacccatcgcacaagactgaaagcaagggtaccgtcaccctgaaatggtggcagcttctggttgcggcgattgtcgtggtggcgctgtcggtaggagttgccgttgccgtgaacacagcaatccgcaataatactgatgaagccgcctcgtccaaggactacaagaaaccggaaaaggcaaaacctcagcaaacggagaagcccaagacaagcagccgaggcaacctcatcaaacgaataggcgacactgccagcatctataagagtcaggcagacaaaaccctactcgcttcatggaccgtaaccaacataacccttgacgcaccatgcgtcccggcttacgaaggagctgaaacaagccctgcaaacggtcatttcgtcgttctggacatcaccgttgaaacaacttccgattttgattcggattcctatgggcctttgggactgggcgctcccggctattggacgtatattcaaaatgatggcacccagtggaacggcaatctcgatggaaccagttcaaagataacaacctacacatgcctacccgaaaatcagcggcttccccagataataggccaaggggtgaaggctcaaggcaaggtgctgtttgatcttccgtcaacggatggatacttggtctatggcaatgagagcgaacatggctgggaatatcctttagctggacatgccagtgcctgattccacagcataatggcattaatggtcccgtcctcctgtactaagggacgggaccatttttctgaagccgggaatatgctcacgctttccattcgatctgcttcaaatcgagcccgtcgcctatcgtctccatgccgcgcatcaaatcctccaccggcacggtgcggtaatgctcgctcatggctatgctcgaatggccgacgatgcgttggatgatgccgggatcaaccttcatgtggaacaggagcgatacgacggagttgcggcattcatgcccgtaccggttctcgtagtcgggtatgcccgccctgcgcatgaggtcgcgaaacgaggccctgtcatccaacgcggccaacggcataccctcgcgcgtcctgaatatcaggttgtacgggttcgggatgatattctccgtggcctccagataccggtgcacgacggtgcccaactgggggattatcggcacgaccttgcctctcgcggacttcggcggcgtcaaagcgtaccccttgcacaggtgtatcatgtcgtatccgtccggcaccctccaccggtatcgggggcagctcgaaggccgtttgaagccgcacgggtatcttccgtccctgccgggctccccgcacccgtgctccttgtcgaggctttccagtttccagttcaccgtgtaggtgcctatccatatctcgccgctgtccggggtttccaacgtcttgtcccgccacaggtcgagatcgtccaatgtggctcccagtatctccccctgcctcatgccggtgagcagacgccaccattggcgtgcccccagaaacaggtcgtcggaggacgcttcgagcatgtcctgcatctgctccacggtgaacgccttgcggtcctgcgtgccgctgcgcctgtccgccgacacggccacgggcccgttgatggtgcgccggtccccggccaatcccgtgtccctgcgtttcggccttgccgcgctggtgaccggactggtgggtatcagccggtcggccaccgccgccttgaatatctggttaaggatgttgtagaagccaagctgccggttgtacgagcatggggtgccgtcgaggttgcgcatgttggctatcatgcgctgcaccgccgaggcggtcacttcgcccagcttctcgttcgcgtacttgcacaggtgcacgcttatgaggctcgcatagttgttgatggacttgggtttcaggtcgcgtcgtttcagctcgaaccagcgttccgcgtactcgccgagccgggtggcgcgatccacgcccatgccccattcggttttctccttgagggcttcggctatcttcctgtcgcattccttgtaggtcttggcggacacccaccggccgtccaccttggcctgccagttcacgtatgtctttaccgtgccgtccttgagtgtcttccgctgctcgtggcggatggggtagaccgctccggttttccttatcctaggcattcagcatcctccattctccaacattctccaacaaacaatccgtggcgaatggtattccaatggtataccaatcgtatcaaatcgttgaaattccgccgttctttccgtgagagccattgatttcattatacgttactggatgtggaaggtgtgctgaactagcaccttttgtttccgactaagaccccttagaatgtcaacaattccaaggggtcttggcgtattggaaatgttcctggctagagaggtacagatggatttagcaacatttcgca

SEQ ID NO: 957 - DNA, 27008 bp, Unknown
  R117_24m  MAG No. k141_16301
gcggcctgctcgaaacgctgcagcaaagcgttcacctgagaaaccgtcacgccggaaccataggcgatacgggcgcggcgggaaccattgataatcgacggatcgcggcgctcggccggggtcatcgagcgaatgatcgcctcggtgcggtcgatttccttctcatcgaactgctcgagttccttgcggtgctgggccatgcccggaatcatgccgagcagcgacttcatcgagcccagcttgcgtacctgctgcagctgatcgaggaagtcgtccaggccgaaggagccttcggagattttctcggcggccttgcgggcctcttcctcatcgaactgcttctgcgcctgctcgatgagcgtcatgatgtcgcccatgtcgaggatgcgcgaggccatgcggtccgggtggaagacctcgaaatccttcaggccctcaccgttggaggcgaacaggatcggcttgccggtcacggacgccacggacaacgcggcaccaccgcgggcgtcgccatcgagcttggacagcaccacgccggtgaagtccacgccctcatcgaacgccttggcggtcttgacggcgtcctggccgatcatcgcgtcgatgacgaacaggatttcgttggggtgcacggcatcgcgaatgtcgcgggcctgcttcatcagctcctcgtccacgcccagacgaccggcggtatcgatgatcaccgtgtcgtagagcttctgcttggcgagttcgatggaatcgcgggccaccttcaccgggtcgccggagatctggcccggagctgcgacggcctcgccgccatcggattggacgcccttttcgggagcatagacgggcacgccggcgcgttcgccgaccacctgcagctgcgtcaccgcgttcggacgctgcaaatcggccgccaccagcagcggcgtgtggccggaatccttgagccagtagccgagcttgccggccagcgtggtcttaccggcaccctgaaggccggcgagcatgatgatcgtcggcgggttctttgcgaagttcagcggacgatcgaccccttggccgagcacgtcggtgagctcctcgttgacgatcttcaccacctgttgggcggggttgagcgcgtcggacacctcggttcccagtgcgcgctcacgcaccttgccggtgaaggaacgcaccacgtcgagcgccacgtcggcgtcgagcagcgcgcggcggatttcacggatcgtaccgtcgatatccgcctcggaaagcttgcccttgctcttgagatgcttgaacgcattcgagagtctgtctgtcaaagatgaaaaagctgccataatgggcaacagtctagccgccacgcgggaaattgcggtgttggggacgactctttccggggattgcgtcgcggagtagtcagggatgttgggcattcagacggcaaatgccgtgccgtccgctcgtggcgaagccaatcgagtgcttccgataccatggaaaccgtaaagaatcctgtgttttttggaatgcttacgctgttttgaaaatcgctggacaccgcttatacgcagactgccgtgcgctccgaaccatgacgttcgggccaacgcagacatgccgtgcaataaggaaggcccactgatgcccacccaaaaactactcgaacgcaaagccctgatcgttggtatcgtcatcaacgtgctgcaggtcttagccggcatggccgtgttcttcatgaccggcctcaaggccatgttcctcgacttctccttcaccgcgatttccgtcctgtccggaatggtggcggtgtatctctcgtcgcgcacggtgcgaaccaccgagcgcttccccaatggcatgttcgcactggaacccatctacgcgatctgcaaggccattttcaccatgtcgttgttggtgtattcgctgattgacgtgtgccgagtagcgtacgactacttcgtgttcgggtccggcgaacgcattgaaaccggcccggtggtcatctacgagatcctgaccgtaatcgtgtgcttcagcctatacacgtattaccggcgttccaaccgctccatcggcgattccagcaccatgctcaccgccgagtgcaagagcacgttggtcgacggatcgatgtcgttcggcatcggcgtggttgccatcttcctgatgctgctaccgaccggcggtccgcttgacttcctgcactacaccggcgatttcttcatcaccgtggctttggtggcattgaccatcaaggagccgttcagcgtgctcaaagaggcgttcgtggaattggtcggcggcgtgcatgacgacgatgaaaccaacgactacgtggaggccgaggcacagcgccatctgcctgccaacaccgactacgagcagacgctgatcttcaagaccggcatgaactacaccgttgacgtgtatctgagcggcatcggcgaaaccattgatgtagctgacctcatcgaatgcaagcgctcgctggagaaggagctcaccaagcgcctgcacatcgtggacgtggacttcgtgtttgactgattgatgggtttgaagcggctacttcaggctccaagtggaaccctgcgggccgtcttcgatggcgatgccggcctcggtcagggcgtcgcgaatctggtcggccttggcgaagtccttggccttgcgggcctcggcgcgggcgttgagctgctcggcaatcagtgcctccagcgccgcatgttcgggcgactcggccgtgccatcagtggcaccgccagcagacacccacggctcggccagcgggtcgagacccaaggtgtcgagcatggcacgcacggcgagcagcgcctcacgcacctcggccttggcggtttcggaatcggcgcggtcagccagctgtgaaagcaacgtattgccggaacggatggcggtgaagatcgcggcggttgcaccagacacattgacgtcgtcattcatggcggccacgaaatcggcgggcaaatcgtcggcggagacggcagcaaccttctcgcgagaaggctgaccgcccagtgccacaccggcgcgctcgatgaagttcgagacacggtcgtatgcagcctgcgcctcgaccaacgcctgatcggaccattcgagcatcgaccggtactgcacggagcccaaagcgtaacgcaccacccaagcggaatgctcggccagcacgctcggcacggacaggccggtgcccagcgacttcgacatcttctcgcccttggcggtcacccatgccgaatgcatccagcgcgcagcagaggggtagccggccgcgcaggtctgcgccatctcgttttcgtggtgggggaagcgcagatccaaaccgccgccgtgaatgtcgaagccatcgcccaggtaacggtgggacatggcggagcattcgatgtgccagccagggcgacccacgccgaacggcgtcgaccaacgggcgtcctcgggatcggtgtccttgggggccttccacagggcgaaatcacgcgggtcgtgcttgtcgggggagacgtcggccgggtcgaccggattgtacttgtcggcaccggtggcgtccacggacgggcccatgcggtcggccacggcagcggcctcatcgacttcggaagtctgcttctggtgggtgagttcgccgtaatgcggccaggatgccacatcgaagtacacgttgccggtgggcttgccgtccgcatccgtgaccacatagccgtggccgttgtcgagaatgcgctgaatcaggtcgatcatgtccgacatgtggccggtggcgcgaggttccacggtgggcggcagcacgccgagcgtgttgtacgcctcggtgaattcgcgctcgtaataataggcgcgggcccaccaacgctggccggcggccgcggccttatcgaggatcttatcgtcgatatcggtcacattacgcacaaaagtgactttgtaaccgagcttcaaaaaccagcggcgcacgatgtcgaacgccacggcggcacggatatggccgatatgcggtgacgactgcacggtggcgccacacacataaatgccgacttcgcccggcttgagcggcacgaaatggctgacctggtgcgaggcggtgtcatacagattcaggccttctgcggccttggcgacatgcaccggcgtcaggcttgaaggcatgacggaaatgttgaaatcctgcggttcttggctgtttcccataacgctcaagcgtagggtccgaaccagacatgctgaatcgttactcgaagagcttgatgaacgcttcacaggcggggcccgaacgaggtgacagacggatgagaagcgggacaacagtctcgcgagaatacgtctttgaccgctgcggaaactgcgagattcatggatttgccctgctcgttacgcaaacggggaacgctcgtgccacaatagaagtcatggccacaccacaagtgctcattttgcaacatgtcccatgggaacgtccgggacgcatattgtcgaacctcgaagacatcggtcttgagacggtgacgatgaatatcgtcgacaaaaagaaaccggacttgcctgatttcggcgaactggctggcgtggtaatcatgggtgggcctatgggcgcgcttgattacgacaagtatccggggctgaaggcagaagccaagttggcgcgtgccgccgtggcttcaggcaagccgattctcggtgtatgcctggggcatcagattatcgccactgcgcttggtgcgcagctgcgcaagggcgatgcgccggagattgggttcgcgccgatcaagcgtgtggacaagcatgacttcttctccatgtgggataagcagctgacggtgctgcactggcataacgacgtggtgggcttgcccgagggaggccagctgctggcacgttcgtcttccaccaaggtgcaggcattccgactgggatccgcgctgggcatgcagttccatcttgaggtgtgcggctcgctgctggacgaatggctggatgagccgagcatggtcaaggatctcaaggccgcgggtgggtccaagtcccaattgcgcgagcagttcgcccaatacgatcagctactgcatccgctcgccgagcaagtgttctccggttttgcggcccgctgcaactcctacgctcagacgctgaacaaataacgtttgtgggccgccgctgggcaagcgtggcgctacattggtgagtcatgccgacttatgacattggactggaacacgtttcgctcgctttcgccaccaaaaccatcttcactgatgtgacgcagggtgttttcgagggcgaccgcatcggcatcgtcggcaagaacggcgacggcaaatccacgttgctgcacctgttccgcggcacccaggagccggattccggccgcgtgacgaagcgcggcggactcacgttcggcatgcttgaccagcgcgatccgctcgacgacaacgccaccatccgtcaggccgcgctcgaaggccgcgccgactacgaatgggcgtccgacaacacctcccgtgaagtcgtcgaggtattgctcggcggcatgagcctggatgccaaggtcggctccttgtccggcggccagcgtcgccgcgccgatttggcccggctcctgctcaaggattgggatattctcgcgcttgacgagcccaccaaccatctcgacgtggtcactatccactggcttgccgagcatctgaagaaccgctggtccaaaggccagggcgctctgttgctcgtgacccacgatcgctggttcttggacgaggtctgcgaatcgatgtgggaagtccacgatggcgtgatcgagccgttcgagggcgggtattcggcgtatatgctgcagcgcgtggaacgcgatcgccaagcggatgtgcgtgaaacgaagcgccgcaatctggcccgcaaggagctcgcatggctttcgcgcggtgcccgtgcccgttccaccaagcagaaattccatgtcaaggccgcgcgcgagcttattgccgacgtgccgccgatgcgtaacacacttgaactgaagcaaatggccacctcccgtctcggcaaacaggtggtcgatttggtcgacgtgacgcagattttcgaaaaaccgcagggcatggccgatatcgacccggatgtggcggcgctctccgcgtccgcttcccgcgtggatgtggtcaacgccatgtacgccgagccgcagctgcacggttccgttgaggtggcggtcaccgacatgactgacctgcgcctggtggacgccggcgtgccggaagccgtcgaggccgctgaggaagcgcgtaagaaggccgaggctgagagcggcaatccgcagcttgctgacgatcgcgaggttcgtcgcatgaacacgggtggtgaaaccatcggcggtgacactgctgcaacgaattcggatgatggcactgctgcagccggtgtcacctcggctgcacgcaaggtgacggtttccggccgcgagattcttgacgatgtgacttggctgattggccccggcgatcgtttcggcatcgtcggtgcgaacggtgccggcaagtccacattgctgaagttgattgacggttcgattactccgaccgtgggccatgtgaacatcggcaaaaccgtgaagttcgccgtactctcgcagcgtcttgatgagctggagaaactgggccagtacaagatcaaggaagtgctttcccgctataagccgagctacattgtggatggcaaggaagtaacgccgggacagttgatggagcgtctcggctttgaatccgcccagttgatgacgccgattcgcgacctctccggcggacagaagcgccgcatgcagttgctgctcatcctgctcgacgagccgaacgtgctcatcatggacgagcccggcaacgatctggacactgatatgctcgccgtcatggaggatttgctcgatacttggccgggtacgttgatcgtcgtatcccacgaccggtacctgctggagcgcgtcaccgatcagcagttcgcgctgattggcggcaaggtacgccatctgcccggtggtgtgcaggattacctcgatatggttgaggctattaagaacggcaagggattgccggctgacacgcctggcttcgcgggcaccggtaacagttcggcgaagtctggtaggggtaaggcggccgccgtcaatgctgctgcatctctccctcagtccgcttcgcggacagctccctcgtcagagggagccaataacggtgaggactccacctcgaagctcaccggcaaggccttccacgaggcatccaagcgcgtgaatgccatcgagcgcaagcttgccaaactggaagagcagaagaccgaacttgaggcacagatggccgtccatgacccgagcgactacgagggtctcaacaagctcaatgaacaactcaccgccgtcaatactgaaagcgataatctcgaagccgaatggctcgaactctccgaacaattggagtagcgggagaaaccgtaacgttcacaaggcctcggtagtttgccggggcctaccgctatgcaaactcccacggattaatcaattccacgtcggtaccttcgaagtccttgatattgcgcgtggctatggccgcatcccaggaacaggcaattgccgcaatcatggcgtcttgaatactggtaggtgtgcccctgcgttcgcgttcgacaaggatatgggcataatccgcagctgcctgggtgtcaaatgcgaacgtcctgtcctctaatgtcataagcgccagcttgacggtcgtatctgtgtactttcgtcgtttgccttcaggcatgcgacatattccgaccaacaactcggcgacggtgatggcggtggttgccagattgcttgtatcttggttcctcagccaattggcaacgtgttcgtctggctgtttcttgatgatttcgctgatgacgttggtgtccagaataatcatggccgattcctattcaaaagatactggcggtcgggaatcggcggaatttcgctcggatagtgggagttcccccttgtcgagtccctcaaaatccatgttcttcatgaattcgcggatctcgtcatagaaattggtctttcgtgtgatttcatgcgccaccgtgccggccagccattcttcaagaatggatcgcacctgagattccatggagcggttgtttttctcagccacttctttgagctgttgaatctgctcatcgggtatttttcggatggtcaatgttgccatgatgcacctccttgttgctgtcataatgctagcatgaggtgctgtcattttgcttgcagcacgggtgatgaggtatgcacgcatgaaaaaggcggatatgcatcatgcacatccgccctttgagcttggactgggtctccccgcagtcgccgaatcagcgcccggtaacctcggaaccgacgaccttttcgcttagggcgcgcgggccgcgggtcacggctacggcaccggagcgcaccagctcaatcacaccgtaatgctccaaaagccccagcagcgcatcgatcttaccttcggcaccggtggcctcaatggtcagcgattccggattcacgtccaccacacgcacgcggaagaggcgcacgatctccagcacgtcggaacggttggattcgtcggcggccaccttgatgagcaccagttcgcgttccacggtggagttcgggtcgagctccacgatcttcagcacgtgcagcagcttgttgagctgcttgatgatctgctccagtggcacggcctccacgtcggcggtcaccgtgacgcgtgagatgtccggacgctcggtgggggagacggacagtgagttgatgttgaacgcacgacgggcgaacaggccggcgatacgcgccagcacgcctgggcggttctccaccagcacggacagcgtatgacgctgggaaccaggctgggatgcaggatagttagccatgagtgttctcctctcctcagtgctcgctcgcagcggcagcggcggtctcgtgctcgaacacgccggtcgcatgctcgtccggaccggttcccggagccggggtgccgccggtcagcggcttgatgccgggcttgtacgtcacctcgtcgttggaagcgccggcggctaccatcggccacaccatcgcatccttccacacgcggaaatcaatcagtaccgggcggtcgttgatctggttcgccttttcgatggcggcaatcgcctcttcctcggtgaacgcgcggatacccacgcagccgtatgcctcggccaacttgatgaaatcaggcacttcgagcggcgcatcgccgtcgaccagtgccgccgcaccatcggcaccgtgcgcctcgccatcgagcaggttggtctgcgagtagtggtgctcgtagaacagcgtctgccactgacggaccatgccgtacacggagttgttcagaatcgcgatcttcaccggagcgtggtccaggaacgcggcggccagctcctcagaggtcatctggaaggaaccgtcaccatcgatcagccacaccggcttcttgccctcgaactcgcgggccgagcccacggatgcgccgatggcggctggcagaccgtagcccatcgtgccgaggcctccggaggagatccaagcgtgctggttctcgaaatcgatgaactgcgaagcccacatctggtgctgtcccacaccggtcacccagatggtggacggatcggccatctcagagagctttttgatgacccactgcggggccattgatccgtcggtcggctcatcccacgtcatcgggtattcctcgcgccagccgtcgatcgccttccaccagggggccagattcggcttgccctgaatggcctgcgtgcgctggatttcgggaatcaagtcgtcgagcacggtagccgcatcgcccacgatcggcacgtcgggctgacggttcttgccgatttcagccgggtcgatgtcaatatgaatcacgcgggcggtcggtgcgaaggcgtcgagcttgccggtcacgcggtcgtcgaaacgtgcaccgatggccacaagcaggtcagcgcgctgcacggcaccggttgcggcaatcgtaccgtgcatgcccagcatgccgaggttcttcgggtcggagtcgggaatgatgccgcgtgcgggcagggtcgtgaccacgggggcgccggtcaggtcggccagagccttgacctgtgcgccggcgttggagcgggcggcgccgccacccacatacagcaccgggcggtacgactgagagaacagcttcgccgcgtcggacagcacacggccgtgcgccttggtggtggggttgtagccgggcagaatcatgcgctgcggccatgagtagtacatgtcgccggtctgtgcggtcttggtcagatccacgaccaccgggccggggcggccggtgttggcgatgtagtacgcctcggaaagcacgcgaggaatgtcctgcgcgcgggtcacgaggaaggagtgcttggacaccgggtaggtgatgcccacgatatccgcctcctggaaggcgtcagtgccgatggcctgcacgcccacctgaccggtaatcacgaccatgggcacggagtccatattcgcgtccgcaatggccgtgaccacgttcgtggcacccgggccggaagtcacgatgcacacgcccaccttgccagtggccagtgcgtagccttcggcggcgtggccggcggcctgctcgtggcgcataagcacgaagcggaacttcgtgttgtctttgatctcgtggtagacgggcagaatcgcgccgccaggaatgccgaagacgtcctcgacgccgagatcctccagcgaacgcaccagcgcttgggcgccagtcatcttctcgccatcgacgatggtctgcttatcgggggccgcgttgattttcggcacgccgctgaatgcctgcaaaggcgtgggtaaagccatgattcctctcacctcatagattttgccgcgaacctgcccgaccttgggatggggccgggtgcccgcgtgtctgattccagtcgcttctccgagacttgtggccccggcacgactcgtcgctcatgttggtatcagtctattcgcaaatctgacagcgggcttacttagtccgcgtcttgagcgagtccagtgacttccagcccgcttcggcggccgccagctgcgccttacgcttgctggagcccttaccgatgccgatgatgtcgccgttctcgcccaatgagacgcgcgcggtgaagatctgcgcgtactccgggccggagacctccatatggtagaccggctcatccttgccgaggccgtgcgccttgacggtcagcgaggtcttccagtcaagtgccgggccctcggtggccacttcggcgagcgtgtcgtcaataagccggtgaatcaccttgcgtgcctcgtcgatgccgtgttccaggaaggtcgcgccgatgagcgattccacgatgtcgcacagaatggagttcttctccgcgccgccctgctcggtttccccgtgacccagcagaatgtaggggcccaccttgagcttggttttggcgatggcgctcagcgcgtcttcggagacggccttggcgcgcatcttggccagttgcccctcggtcatatccgggtgaatggtgaacagcgtttcagtggagaccagttcgagcaccgcgtctcccaggaattcgaggcgttcgtaattggccacgccggggtgctcatgcgagaaggagcggtgggtgagtgcctgcacgagcagatccgggctgagagtggtgcccaacgcttcaagaagctcgttggccggcgtcggctgctgtggggtttcattgctcatgattgttgtatggtccttcacgcgatggtgatgtgttgtgtgttgtgttgtgttgtttgcgatgcgatggtgtacgtaatggtgcacttatgcgaagaccccgccacccgtcgatggcagggccttcattcaagccgttatcgcaggactcacttggtgtgagccggctggatggcggagcggtaggtgcggccgcggtagttaccgcagctcgggcaagccatgtgcggcagggccggagcgccacagttcgggcagttcacggtcgcagcagcggtggccttccagttcgcgcgacgcgagtgcgtgttggcgcgcgaggtcttgtacttaggcagtgccatttgagtatcctctatttcgttcgaacaattgagcttaagcgtccgttatcttaacgcacggctcgtacaaactccgttcaggcgcgcgtcactcggcctgctcgccgttctgctcggcctcgagctgggctttgagccccgccaatccggcaaaacggatatccgtcacatcgtgatgatggtcgggatcctcgttcagatcggcaccgcactgcgagcacaggcccttgcaatccggtcggcacagtggctgcaacggcagcgattcgaccagcgtgtcgcggatcatcgcctcgatgtccgcgaatgcgccgttctccagcagcggatacgtgtcttccgactcgtcctcgccggcgatgatgtcgatctcgtcgtccttcttgttcttgccgcccttgccgttggccttgtcctgacccgactcatacgggaagaacaccgtcacatcaaccggccagtcctcgtcaatcggcttcaggcagcgcgtgcactcgctgacgaatggcgcgaccaggcggccggtgaagatcaggccgtccacaatcgaatcgaactgcccgctcacgtgtacgggctcgccttccttgatgccgacaatgctgtcgccaatgccggaaggtgccgggaaatcggcgtcaatcggcttggattgaccggcgcgcgaagcaatctgcgctaccggaatggcccacggggaatcttcaactcgtgccatggtatgttcttggtgcctttcgtatgttggctggagttattcgttactggcgttattcgcgttactgatgttgctggtgctgctggcgttactgggcttcgggatagtcgttcagcgtcaggtgcggcatctgttcgccggccgcacgctggcgctcttccagcacgttaagaccggcctgcacatcccgactgagtttgccgagctgctgggacagcccttccatcaccgtagtgcagtactggtccgcgccttgggtcagatggtcggctctggtctgtgcctggtcaagaatcgcgcgcgctttctgccgtgcaagctcggtgacgttctcttggccggccaggaactgtgcctgttcgttggcgtccttgatcatgtcggctgcgcggctttgtgcggaggcgacgatggcgttggactgggtctgtgccgattccagacggcgctcggcctcgcgcatgagggcggaggcgcgctccaactgcaccggcagcattttcttcaactcggaaagctggtcggtgaattcgtcgcggtcaaccttcaccatgccgggggcgaatatgctggacttcgcttcgcccagtgccgcctcgagctggtcgatgatgtcatacaccgtggtgaattcctcgcggctcttgaccgtggccgggtcgtcgtccgtggtttctcgcaggtcgggcatttcgttcatgaacgaggggcgagtgccggcggcctgagcggtctgagcttgtgcccgggtctgctgagctgcttgggcctgcgctttggcctgcatctgtgccggagtaggggtaggcgcggcgggcggcgatccggcgagaacatcggcctcttcggtgggtgccggcgcggcttgcgtagacgcgggcggttccggggcggacggctccggagtggacgatgcggcgtccgcattcggtttggtcagatcgacgtatccagtggggtggtcatcgctcatagtcattagtgcatcagtccttccgctgacgttcctcggccagggcatcggccagcatcggcacgacacaatcgggcaccatgccggtcacgtcgcctccatggcgggccacgtccttgacgatggaactggagatgtgttcaagaatcggatcggccggcaaaaacagggtttcgatgccggcgagcttgcgattgaccagcgccatgccgagctcggcttcatagtcgccgttctggcgcagacccttgacgataacggtggcgccgaccttcttgcagtagtcggtgatcaggccgtcggtggaagaaacagtgacgttcttgcaaccggctttgtcaagggcacggcggatcacgtcgactctggtggcttcggaaaacatcggtgttttcgcggcgttgacggccaccaccacatgcacctcgtcgaaaaaccgcgccgagcgctcgattacatccaagtgtccggcggtaacggggtcatacgagccggggcatactgcgatagtcatgccttatagcctaccgcgaatggtgtgcttcgtgctgccgagcgtgcattgttgtcgcgtcggcgtatgaggcagtgtgtgcggtgccgtatgtggcgtcggtgcggcgttgtgtgcggcattgttatgtggcattgtatgtggcggggtggcgtgatgcgcgacatgggtgtgtggaggtgtgcggattacgcgccaatgggtttcgcgggtaacgacgggaatctatgatggagtgcagtcgaatcgttgaatacgaggaaagaagtgcaccatgacttttgccgagatgttcgttgatgatgccgaaccgctgcgcaacccggaccaaggtgccggcacgtcggtgctggaacgcccggaaaccaaggagtctccggttcgtgacgatggcggcgacgcggatcgattcgcacattatgtttctaaggaccgtatcgccgaatcacgcgcgaccggtcgtccggtggtcgccctgtgcggcaaggtctgggtgcccaagcacgatccgtccaagtacccggtttgccccgattgcaagcgcatctacgaagaaatgacgcgctaaaggtggtacttggctcccctcagcgagggaagccaaaatggtcaccgagccgaaatctcgtcgatcagcttgagctcctcgtcgctgaagtgggtgttcttcagcgcgccgatgttgtcgagaatctgctgaggcttggaggctccggtcagcacggaggtcaccttaccatcgtgcagcagccatgccaggctcatctcggccagcgtctggccgcgttcggcggccagattgttcaggtccacgacctgcttgtgcagtttctcggtcagggcggaatcgttgaggaatcgcggatcgtgagccatgcggctgtcggccggaatgccgttgagatagcggttggtcagcaggccctgtgccagcgggcagaaggtgatgaggcccttgcccagcttgaaggcggtctccttcagaccgttctcctcgacggtgcggtcgaggatgttgtatttgttctggttgatgatgaacggcacgtgcaggtcggcgagaatcgcggcggccttctccatcgtcggaccatcgtagttggacagacccacgtacagggccttgccggagttcacggcctgagccagcgcgcccatcgtctcctcaagcggggtttccgggtccgggtggtgatggtagaagatgtccacataatccaggcccaggcgttcgagcgactggtcgaggctggcgagcaggtacttgcggctgccgaggtcgccataggggccggcccacatttcgtagccggccttggtggagatgacgagttcgtcgcggtggtgcctgaagtacttggcgagcagcaggccgcagttcttctcggcctggccgggttcggggccatagttgttggccagatcgaagtgggtgatgccgttgtcgaaggcggtgaagatcagggacttcatctggtcgaatggcgtgatgtcgccgaagttgtgccagaagccgagtgagacggccggcagcttgaggccggaggtgccggcgtggttgtaagtcatcgtgtcgtaacggtgcgggttgggggcatagatggcggttggctcgaacattgagtctccttacaatgtcatttttgttcttacgaatgctggtctgcgatgggcaaaccgacgccgatcgagtggtattcgtaagtgttcttggatactaaggttccagttcaagtgaacttgaatgcaaacggctgcgacgcttcggcgtgtcgccgcagtaaggagtcatgatgtcctacaccattcgtcaggtggccacgcagttccatatgcagccctctacgccggtgaagactggccggattggcgcgagtacaaaaaccgcgcctattccattgaatgctgaggccatcgagtgctgagctggatgccggctgggcactaagaccgatgtgcgtcgatcgtgggcgcgtctatccgagtaaggccttgctcggcagtgcgcggtcgagcagccagacaacgagcgatatcacgaagaacgctatggccagcttgccgcagctaatgccgaacccttgccagccgagtgcgtcgaggttgatgaagtcgtacggatacggactgccgccggccgccggtccggaccccggccaaatcgtcgcacgggccagcacgaagaccaagtatgcagggaagtacgccagccacgagaacatgtaatgccagcggaaacgccggtgcgggtcgaatagcacgaaatcgataaccgccataatcggggcgattttgtgcagcatcgtattggtcatgatgccaataacctgtggcacgtatgccgggtcgtccggaggcatcaggaagaacgccaccagtgcggtgactatggcgtacacagtcaggcatcccttaggccatgcaggcggctgaatacctttgagcagtgtggccgcgccggcccacagcatcacgatgcccagcacgaaaccggtctggaacgtgaaatacacccagaactgcggtttggaccatgcctcatatgtgcccacgaagcagaaaccggcgatcgcaaagcgccacaacgccacgatgaatctcatgcatcgagtctaccgcttcgccagtgggctgtatggctttgcccggactacacttaggtgcaacttcaccacttatgtaggaaaggccttgcaatggtcgattattcgccggctctgatgaccgacatgtatgaatacacgatgctcgacgccgctctgaaagacggtaccgccgaccgcaaatgcgtgttcgaggtgttcacgcgtcgcctgcccgaaggccgtcgctatggcgtggtggccggcaccggccgcattctggatgcgctggaacatttccacttggacgaagcggacctgaagttcctggccgaccgtcacgtggtaagccccgagaccatcaagtggctggagaacttccacttctccggtacgattcgcggttaccgcgaaggtgagatgttcttcccgaactccccgattttgcaggtcgaaggcacgttcggcgaatgcacgctactggagacgttgattctatccgtgctgaactacgattccgcagtggcctccgccgcctcacgtatggcgtcggcagccaaggatcgtccttgcatggatatgggcggacgccgcactaacgagtgggccgccgtggccgccgctcgagccgccgtagtgggcggattcaagggtaccgccaatctgctggccgcccagctgtatggtctgaaggccattggcaccgccgcgcattgcttcacgttggtgcatgattccgagcgtgacgccttcgaatcgcagatcgaggcattgggcaagaacaccacgctgctggtggacacctacaacatcgaggaagccgtgaaaaccgccgtcgaggtggccggtcccgaactgggtggcgtgcgcatcgactccggcgacctagccgccatggcccagcgtgtgcgcaaccagctggacgccttgggcgccacgaacaccaccattaccgtgaccaacgatttggatgagtacgcgctcgccgcattgcagaccgcgccggtcgactcctatggtgtgggcaccatgctggtcaccggctccggcgctcccacttgtgcgatggtgtacaagctcaccgaacgtgaaggcgctgacggcacgatggttccggtcatgaagaaatccaaggacaaggccacagtgcccggtcgcaaactggcattccgctcctacgaatacgcgttagccgaagccgaacacgtgatttccggctcggaggagaagctggccggtttcacgcctgaaccgacgtggaagaacctgctggtcgactttgtggatcatgggcagatcgacgctcagtggcagggccatgacgccatcatggccgcccacgactaccacgccaaggcgttgtccgaactgcccatcaccgcgcagagcctcatgaagggcgagccagtgattcctacggagactcaggttctctgaccgtatctcactggccgcatccctttggttacattggctactcttccctctgtctgtgtccctctgtctgtgcccctctgtctgtgttggccgcactcctgtggtcgccgccgaggcggggagatccaaccccggtcgcacccccgtgtttgcaccccctgtggctgtgtcccggggctgtattggccgcgtcccctcgggctgaactgcgtcccggttcgccggacgtggttccagctgagggtggccccccttgtttttttttgggggggggtactgttcaccggggaaatatgtatatgtgcatgctgttgcaatgtacattttgttgtcagttgacaacgtcttgattcagatgaattggcgggaaatggccatttgtcttatccaattgatttgaagagcgttgtcagctgacaacgttttgtacatggtgcggaacgacacatattcctatcctggtcaggatgccgacgaggtggagtgaaaaaccaaaccatttcagaggatattgcaccgagacgttgtgggattgccgtgttgtcggtgatgttacagagatggcgcagtgttgcgtgaggggtgttgcgtgaggggtgttgcgtgtgatgttgcgtgtgatgttgcgtgtgatgttgcgtgtgatgttgcgttgggctgattgggaggaatagtgtgccgatagaatgccgtgatgcgtgcagagcaatcgtttgcggagcaatcgttgaagaatcgtgtgaactgatgcgatacgaatcataccgtctctgaattgtgggatatgacgaatcgtatcgtcatgggattgtgggatatgatgattgcggtttgatgaaatgaccgggaaatcggccgaggcaaggtgacttcgatgagtgaaactctcaatgatgagaacgcggcgggcaacgatgacgtatcagagcggcgcgctgtagagcatcgagcgttagaacagtgcgatgtcgtgcatcacggtgtggtatctggttgccctgttaattcgtgtgcggctgtgctgaatgaagtgatgtcgcagactggttggaatgcctatgagcttgcacagcgtactggtttggatcggtctgcaattggtcgcgtattgcgtgggcaaagaggtatgttgtttgatgttttggccgaggggcttgagcgggctggttttggtcttcacctagaagccgtggccccctcgcaaacgattccggaagacgaattgcacatgttgttggcgcaactgcgtaggcctcctgatttcgatgcaatagaaagcggagcgacctggtctacgttgaagatgctctgcgtcaatctgattcatgctcggaatgttcaacatcaacgtatatcgttcgtccgagcggttgcacgggtgaacgatgcgtgctggattgcgtttctcgctggtttataccgttttctgcgttgggatatcaacccaaggaacagacgcttgacattggttcctccgtaccggtatggcttggatggatggtggtccccactgccgagcgcggcaattatgcacgtgcttcatcgatatgaagagccgttgcatgacatggactatacatatttgccgttaatcgattacgaactcaacgctatgcagcgcaagcaattcaaccaagatttcatggaatatggcattcttattccagcggacgatctttcccaatcctcatcaggtacgcaggcattgactctgtaagcgagtggtgcataagaaaatagtggcgtgcagccaagtgtcatggaatggatatgtaagcagggaatgacattgcgctggggtttgatgatggttgacgagttgctatccaggcatagagcggatggcgtatgctggggcgcatggttgaaatcaaagatatgcttggcaatcaccaaataattcgtgccgacggccgcaaggtcgacgagctgcgccccgtgcgcatcacccgccacttcaccgacgcccccgaaggctccgtgctcatcgaatgcggtaacacgcgcgtgatgtgcaccgccacttttacccctggtgtgccgcgttggcgcaaggactccggcctcggctgggtcaccgccgaatactcgatgctgccgcgtgccaccgccgaacgcaccgaccgtgaatccgtacgtggcaaaatcggtggccgtacccacgaaatcagccgactgattggccgctgcctgcgtggcgtcatcgatatgaaggcgctcggcgaaaatcagattcagcttgactgcgatgtgcttcaggccgatggcggcactcgcacggcttccgtaaccggtgcgtacgtggctttggtcgacgcagtcaattgggcggagaagcaccgccatatcaagtccgccagccgcgtgcttaaggactatgtgtccgccgtatcggtgggcgtgatcaacggcaccccgatgcttgacctgccatacattgaagacagtcaggccatgaccgacatgaacgtggccatgaccggttccggcaccttcatcgagattcagggcaccgcagaacaccgtccgttcaaccgtgccgaactcggcaccctgcttgacttggccgaaaagggcaacaaggaactgcaagccgcccagcgtgccgctttgtccctagactaagccagctccccttcctttaggggaggttgtcggctggaagccgtacggtctgcaatgtccagctcccctgacaaggggagccttcttaaaggagaacccatgcaaatcgtcgtcgcaacccataacgaaggcaagcttgtggaaatccgccgcattctcgaagaggatcttggcgtggatgccgaaaacatcgaactggtgtccgctggcagccttcacctgccggacccggtggaaaccggcgtcaccttccaggagaacgcgctgctcaaggcccgcgccgtggccatccgtaccggtctgcccgctgtcgcggatgattcaggtctcatcgtcgatgtgatgggtaacgctccgggcattctgtctgctcgctgggcgggtgctcacggccacgacaaggccaataatgcgctgctgctcgcccaaatcggagatattccggatgacaagcgtaccgcgcgcttccgttgcgccgccgcgctggtggtcccggacaccgaggccggtgccgacgtgaccggtggagtggctgccgacggcattaccgttcacgccacggctgccgatgggagccctgccccggtgcatgcccggtacgccatcaagtcggagacagtggaactcggcgacatgccgggtcgcatcatccgcgaggctcgtggcgaacacggtttcggttacgatccgctgttcgtcccggacgaccagcctgccggtcgcgtcagcgctgagcctgaccatgaaggcgagccgctgaccagcgccgaaatgactccggccgagaagaatgcgatttcccaccgaggcaaggcgctgaaagccttggtccccgctatcgaggcgctgctgcactaagtcgtctagactgtctaactgcactgagcccctcccgaatcgggcaagtgtctagcaagcgcctatgacctagcaagggcgatacgaaagaaggccggcgcttagtgcgtcggccttcttgatgaacaagagccacccgatagaatcgaactaccgaccttcccacgaacgagggggatgctctaccactgagctaaggtggcgtggctccaagagccaagtagagaatatagcactgcgtttgattcagtgcaagccagacgttcatcatctttgggccattgttctttggaccatcgtggcggcaatagtgcgaacgatgtgcacacctcatctgctcggacgccattcgtcgtgtgcgcgttatgctagcatggtgagcctgattgactcggaggcaaagggaagcatgcgtgattttgtgctggtgaagttgacagacgaagagttcgatgatttctccgccaggcatccacaaggcaatttccaacaaacctcggcgatgggacgccttcgcgccgcgcaggggatcgacgtcgaatatctggccctcaaggagggcgagaagatcgtcgcggcgacactgttcgaaactcaccgctctcgattctctatatttgcggccatccatgatggcccgatgtgcgactatcacgacaccgaagcattgaccttcttcatggatgcgctgaaacgccatgccaaggcagagggtgcttcacagctggagatcacccctgaatccccatatcggcttcgcgacaccaatggagcttctttgccggatgatcagaatggcgctcccgacaataagctgatagaacagctcgaggcgatcggcttcactcatggcggtttcaccgtgggctacacggcggttccgcgttggcgctacctcaaggatctgactggtattaccgatgagaaaagtctgctgaagtcctatgataagcgcacccagtggagcgtgaagcgtgcccaatcgatgggtgtgcacgtgcgtgagctgtcggacgacgagctgggggtattcgcacgaatcgagcggcaaacagccgaacgccgtagcttcgaataccgtggcgaagcgtatttccaccgtttcaaggaagcgttcggcagcaaagcgcattttatggttgccgagatccgcatcgatgaatacatggcggacatgacggccaagcgtgaagcgctttcggccaaggtggcggcattgaccgccaaaaacgccgaacgtcccaccaccaaaaccgaacgtcagctgggggaggagacccgcaatctggcggcagccgaaaaacgcctgaacgaggcggccgagttcgccaaagacggggatgtactgccggctgcggcatcactattcgtggagcatccgcgcgaggtcatctacctgttctccggtagtgtcgagcggtacaagcccttctacgcctccgcgctgattcagcatgacgcgatgctgcatttctgcgtggaacacgggctgtctcgctacaacttctacggcatcgacggcgtctttgatgatcccgatgacgagggtcgtggtgtactggagttcaagcagggcttcaacggatatgtcgaggaacttccgggcgagttcgtgctgccggtcaaaccggttgcctatgccatgaagcaatttgcgcacaagctgctgtcgcggtaaacggacgcagcacacaggccattccagagcccagagcaacgatcagagtaacgacaagtaagaaggttcgattatgacgcaatccgatgcaggcgtcgcctcgctcacccctaccaagatcactcctgccgagctggatgcgttctccgcagctcaagtgcaaggtagtttccagcagacctcgcagatggccgccatgggtgcattcaacggtccggtggactatgtgggtgtcaagcgcggtgacaagctgattgccgcctgctacgtggtgtacacgcggtcccgtttcggtctggaaggctcggtctggtgcggaccgctgtgcgattatgacaatccacaggtggttgaggcgatgaccgaagccctgcgtcgttcggccaaggcccatcacgccatcagcgtatcctgctggccggccgcagtctaccgtctgcatgatctggacggcaagccgaccagcgacccggacaccacgatgatggacaacatggcccgcttcggttggaaacatggcggcttcaccgtgggctacgaatccgtggtgaaccgctggaacttcgtcaaggggcttgacggcattcataacgagaaggaactgctggcctcgttctccaagtaccgccgtaagaacatccgcatcgcccaggattccggtctgcgcgtgcgccgactggaacgcggcgaactgagcactttcgtcaagctgtgcgatatgagcgccgcacgtcaaagcttcaagagccgcgatctggcctactatgagcgtctgttcgataccttcggcgacctgatcgagttcaaggtggtcgaaacccatttcgacgaatatctggacaccctgcaatccaagctgaatgcggcctccaaagacaagcgcaacctcgaacgcctgctccagcgcgcgcaacagcagccggaaggcacggccaagaagggtgcctccgacccggcaacgctggaaaagcgcatcgccaccgcagacaagaagattgcggcgttggaaaagaccatcggcgaagtcaatggcatcatcgcctcggacggcccggtcattccggtggaagccggtgtctacttctggcatccgaacgaggtcgtctgcctgtccagcggcgaggacgatcgtttcatggattactacccgtcttccctaatccacttcgaggtgatgcttgactgcatcgcccgtggcgtggagcgcttcaacttctatggcatttccggcattttcgacgccaacgatccttcctacggcgtctggcagttcaagactcgcttcggcggattcgtggaagagcttccgggcaagttcacgctgccggtggacggactgcgcttcggtgtatccgaagccgcacacaagctgctgcatcgctgacaaacagtggcgagcacggacacagaaataaggcacaggtgacgacgagatgagcgcgactgtgaatcgaacagatacgacgtatacgtttggcgtgattacgcccgaagagctcgaccggctttccgaagccacaagccagggcagcttccagcaatggtccgggcaggtccgtcttgccaagattcgtgggcatgaagccgaatgcgttggcgtgttcgacgcatccggcaatctggtaaccggctgcgtgattctgtacctcaatggtcgtttcggtgcagatggctccgtatatttcggccccatcggcattagcgatgatccggctctgctatggaccatgaccgaggcgattcgtgaatcggcccgtcgccaccatgctgtttccgtggcatgctggcctaacgtcgcctaccgtctgtattcctcggacgggcagcccgacggcgagccgaacgatgcactgctgaccggattcaccgatgccggctggacgcatggcggattccataccggttatgacgtggtctgccagtggatgtacgtcaaggatctcaccggcatcaccaacggcaaggaactgctggcatcattcggcaaacgcgctcaatggagcgtcaagcgggcgcagtcgatgggtgtgcacgttcgcgaaatcggccccgacgagttcgacgtgttcgccgatatcgaacggcggaccggtgaacgccgcgggttcgcgacgcgcggcgcggactatttccgccagttcaagcaggcgtatggtgcggatgcgcatttcatgctcgcggagatccacatcgccgaatatgtggcggatatgaccgccaagcgcgaggcattgcagactaaggtcgcacagctgcaggcgaaatacgatgaacgtccgaccacgcgcatcgaacgtcagctgggggaggaatcgcgcaatctcgcggccgccgacaagcgtctggctgaggtggagggatatgccaagaagggcgatgtgttgccggcagcggcttcaatgttcgtcagtcaccctaatgaggtggtctatcagtattccggttcgttggaggagtacaagccgttctatgcctcggcgctgattcagtacgaagcgatgctgcacctgtgtgtggaacagggtgtgagccgctacaacttctacggcatttccggcgtgttcgacgatccgaacgacgagggccgcggcgtgctggaattcaagcagggctttaacggctacgtcgagcagatggtaggcaaattcacgttgccggtggataagttccgcttcagcgtgagcaatctggcgcacaaactgctgcatcggtagcaactggcggtcgggggacgaacctatgtgggctgcgtctcgtctgaccgtgcgcccgccgtgtgcctacttgcgcatttgctcacacgcccatcagcgcatgagccacagccatcatcgccagtgaaatcatcgcggtgatggccagtgagaagccagccagtttggcgttgccgagtactttgtcggtaaacagcgtggagaaaatggcgattggagacaacgcgcaaatcaccatcacggcgcgaatcgaagccgagaacggcagcaggaaccacgagatcaacgcgaaggcgacgctgaacggtatacgccaagcgatgacggccatgacttccttcacgtcatgcttggattgaggcaggtccatgagcatacccaccatcagcatcgacaccagcgcgttggcaccgctcaacggttgggtcatagaggcgatccaattgggaatcttcacgttggcgacggtcaacgcaatcatgagcagatacgtgtcgaacggcaccgagccgaagaagctcttgccgatggtgcgcagcaatgcgcggcgggcaagccgtttggcgtcgcgatccttgggcttttcgtacggcaaggtgggcgccgaatcggcgtgttgctcggcaagtgttttgccgggctgaatatgcagcagttgctgggtgagcacattggtgccggcggccaccatcacgcagttgccgatatcgaacatcgcagccggcaccaccgcgcccgcaccccagaatgactggacgacc
